United States Patent Application Publication US 2023/0026259 A1 - sequence listing, part 27

SEQ ID NO: 109731 - DNA, 4969 bp, Homo sapiens
  Payload ID: 1548
  Gene Symbol: ATP2C1
  Gene Name: ATPase, Ca++ transporting, type 2C, member 1
  Uniprot ID: P98194
  ENST ID: ENST00000508532
  CDS Start-End: 410-3169
caaagctgggttcgcggctggcccaggagtgcggggcgcgactgggcggccggcggcggggaggggcggagcgcaggagtcggaggcgggagcagaccagcacggcctcgcggagccggcccggcggaccgtgacgggtcccctcacctcctcttctctcccctccccgcccgccctctctccctcccttcctccctcccgctcgcttcttctcacgccgggagcaggctcccgcctcgcaccgctgccccgcgagcagctcctcttctcccgaggcgcgcggggcgcccccgcgagccccgcggctgagaccccgcagcctggaggagggctgtccggggctttggtgtggccgtggctgacactaaagactttgtagccatcaacccgagtgcagtttcgatggaaaatgaaggttgcacgttttcaaaaaatacctaatggtgaaaatgagacaatgattcctgtattgacatcaaaaaaagcaagtgaattaccagtcagtgaagttgcaagcattctccaagctgatcttcagaatggtctaaacaaatgtgaagttagtcataggcgagcctttcatggctggaatgagtttgatattagtgaagatgagccactgtggaagaagtatatttctcagtttaaaaatccccttattatgctgcttctggcttctgcagtcatcagtgttttaatgcatcagtttgatgatgccgtcagtatcactgtggcaatacttatcgttgttacagttgcctttgttcaggaatatcgttcagaaaaatctcttgaagaattgagtaaacttgtgccaccagaatgccattgtgtgcgtgaaggaaaattggagcatacacttgcccgagacttggttccaggtgatacagtttgcctttctgttggggatagagttcctgctgacttacgcttgtttgaggctgtggatctttccattgatgagtccagcttgacaggtgagacaacgccttgttctaaggtgacagctcctcagccagctgcaactaatggagatcttgcatcgagaagtaacattgcctttatgggaacactggtcagatgtggcaaagcaaagggtgttgtcattggaacaggagaaaattctgaatttggggaggtttttaaaatgatgcaagcagaagaggcaccaaaaacccctctgcagaagagcatggacctcttaggaaaacaactttccttttactcctttggtataataggaatcatcatgttggttggctggttactgggaaaagatatcctggaaatgtttactattagtgtaagtttggctgtagcagcaattcctgaaggtctccccattgtggtcacagtgacgctagctcttggtgttatgagaatggtgaagaaaagggccattgtgaaaaagctgcctattgttgaaactctgggctgctgtaatgtgatttgttcagataaaactggaacactgacgaagaatgaaatgactgttactcacatatttacttcagatggtctgcatgctgaggttactggagttggctataatcaatttggggaagtgattgttgatggtgatgttgttcatggattctataacccagctgttagcagaattgttgaggcgggctgtgtgtgcaatgatgctgtaattagaaacaatactctaatggggaagccaacagaaggggccttaattgctcttgcaatgaagatgggtcttgatggacttcaacaagactacatcagaaaagctgaatacccttttagctctgagcaaaagtggatggctgttaagtgtgtacaccgaacacagcaggacagaccagagatttgttttatgaaaggtgcttacgaacaagtaattaagtactgtactacataccagagcaaagggcagaccttgacacttactcagcagcagagagatgtgtaccaacaagagaaggcacgcatgggctcagcgggactcagagttcttgctttggcttctggtcctgaactgggacagctgacatttcttggcttggtgggaatcattgatccacctagaactggtgtgaaagaagctgttacaacactcattgcctcaggagtatcaataaaaatgattactggagattcacaggagactgcagttgcaatcgccagtcgtctgggattgtattccaaaacttcccagtcagtctcaggagaagaaatagatgcaatggatgttcagcagctttcacaaatagtaccaaaggttgcagtattttacagagctagcccaaggcacaagatgaaaattattaagtcgctacagaagaacggttcagttgtagccatgacaggagatggagtaaatgatgcagttgctctgaaggctgcagacattggagttgcgatgggccagactggtacagatgtttgcaaagaggcagcagacatgatcctagtggatgatgattttcaaaccataatgtctgcaatcgaagagggtaaagggatttataataacattaaaaatttcgttagattccagctgagcacgagtatagcagcattaactttaatctcattggctacattaatgaactttcctaatcctctcaatgccatgcagattttgtggatcaatattattatggatggacccccagctcagagccttggagtagaaccagtggataaagatgtcattcgtaaacctcctcgcaactggaaagacagcattttgactaaaaacttgatacttaaaatacttgtttcatcaataatcattgtttgtgggactttgtttgtcttctggcgtgagctacgagacaatgtgattacacctcgagacacaacaatgaccttcacatgctttgtgttttttgacatgttcaatgcactaagttccagatcccagaccaagtctgtgtttgagattggactctgcagtaatagaatgttttgctatgcagttcttggatccatcatgggacaattactagttatttactttcctccgcttcagaaggtttttcagactgagagcctaagcatactggatctgttgtttcttttgggtctcacctcatcagtgtgcatagtggcagaaattataaagaaggttgaaaggagcagggaaaagatccagaagcatgttagttcgacatcatcatcttttcttgaagtatgatgcatattgcattattttatttgcaaactaggaattgcagtctgaggatcatttagaagggcaagttcaagaggatatgaagatttgagaactttttaactattcattgactaaaaatgaacattaatgttaaagacttaagactttaacctgctggcagtcccaaatgaaattatgcaactttgatatcatattccttgatttaaattggcttttgtgattgagtgaaactttataaagcatatggtcagttatttaattaaaaaggcaaaacctgaaccaccttctgcacttaaagaagtctaacagtacaaatacactatctatcttagatagatatatttttttttatttttaaatattgtactatttatggtggtggggctttcttactaatacacaaataaatttaatcatttcaaaggcattctatttggtttagaagttgattcccaggagtgccatatttcagctactgtatttcctttttcttgtaatgtaagcagctcagataccatgtgctatcatttttgtatcaagttttttgcacaggatgtgaccactgtcagatcactgttcttttctttctttttgtgattgaaaagcctatactacaatttgaagtaaatttttgtttttcttagtaagtgtaaatggttgctttatttttattttaaaaaggtatgtctttggtttggcagaattcatgcagggctatcaagtggtgttctagggtaacagtgtccataattaacgcttagtcatagagtcaaaaacatttaagactgattgggttgaagtttataataaattatattaacatgtcttcctttttgaggtaaagatatatactttgtcaaatatcattttgtcatcctctaaatataaatccaaatacctcagctaagtaattctattttattatttttactgttatgtatgtttttaatcatatttcttaggaagtataggctactggacttagaataaaaagtccccaaacccaaacaaatggtttatgaaccagagtatatgtggaagattctttgctggtcttgctctgtgtgcatctgaagcttctttggcctagattttagcacaaacctgagtatatctcttctactttcatcatgtgttctgtaccttctttttgtttcattgggcatgctagggaaataggtggattttgtgtgtaatgccatcagtttttatgaaagcttgatgaggtataggtcatttgttttgagtatgtgggccagaaatttaaaattagaaatttgtttttctgttgagtatataaacaaaaattggtcccaattctaacaggtttaatccttcttgaagccaataagttttatcttttataatctgtcaggatgaaccactccttagcttttatccaatattaaactgcaagtgttagcactgaaatattgtcattgatagggaaaatatctattctttgagtcattgttactgaggcagttgagtgtaaggagctggctgcagtttattctacttaaccctttaaggctgaattgtcaaatgtacattgttccatgtcgttagatggaacatggaagccattgtctaatcaactctatcattagtgacttgatgtctcataccttaattttgtaatgatttttattctctgttacaaagacttgaaatacgtattaaatgcacgttaatgttttgctttgcattttaggttcagattatgacttgattgaaataaatgtgcctatacattcatttgctttgtactataaaaataaaaatgatttcttaagttaa

SEQ ID NO: 109732 - DNA, 943 bp, Homo sapiens
  Payload ID: 1548
  Gene Symbol: ATP2C1
  Gene Name: ATPase, Ca++ transporting, type 2C, member 1
  ENST ID: ENST00000508660
  CDS Start-End: 1-943
cagaaggggccttaattgctcttgcaatgaagatgggtcttgatggacttcaacaagactacatcagaaaagctgaatacccttttagctctgagcaaaagtggatggctgttaagtgtgtacaccgaacacagcaggacagaccagagatttgttttatgaaaggtgcttacgaacaagtaattaagtactgtactacataccagagcaaagggcagaccttgacacttactcagcagcagagagatgtgtaccaacaagagaaggcacgcatgggctcagcgggactcagagccagtcgtctgggattgtattccaaaacttcccagtcagtctcaggagaagaaatagatgcaatggatgttcagcagctttcacaaatagtaccaaaggttgcagtattttacagagctagcccaaggcacaagatgaaaattattaagtcgctacagaagaacggttcagttgtagccatgacaggagatggagtaaatgatgcagttgctctgaaggctgcagacattggagttgcgatgggccagactggtacagatgtttgcaaagaggcagcagacatgatcctagtggatgatgattttcaaaccataatgtctgcaatcgaagagggtaaagggatttataataacattaaaaatttcgttagattccagctgagcacgagtatagcagcattaactttaatctcattggctacattaatgaactttcctaatcctctcaatgccatgcagattttgtggatcaatattattatggatggacccccagctcagagccttggagtagaaccagtggataaagatgtcattcgtaaacctcctcgcaactggaaagacagcattttgactaaaaacttgatacttaaaatacttgtttcatcaataatcattgtttgtgggactttgtttgtcttctggcgtga

SEQ ID NO: 109733 - DNA, 3148 bp, Homo sapiens
  Payload ID: 1548
  Gene Symbol: ATP2C1
  Gene Name: ATPase, Ca++ transporting, type 2C, member 1
  ENST ID: ENST00000504612
  CDS Start-End: 1-2711
acaaatgtgaagttagtcataggcgagcctttcatggctggaatgagtttgatattagtgaagatgagccactgtggaagaagtatatttctcagtttaaaaatccccttattatgctgcttctggcttctgcagtcatcagtgttttaatgcatcagtttgatgatgccgtcagtatcactgtggcaatacttatcgttgttacagttgcctttgttcaggaatatcgttcagaaaaatctcttgaagaattgagtaaacttgtgccaccagaatgccattgtgtgcgtgaaggaaaattggagcatacacttgcccgagacttggttccaggtgatacagtttgcctttctgttggggatagagttcctgctgacttacgcttgtttgaggctgtggatctttccattgatgagtccagcttgacaggtgagacaacgccttgttctaaggtgacagctcctcagccagctgcaactaatggagatcttgcatcgagaagtaacattgcctttatgggaacactggtcagatgtggcaaagcaaagggtgttgtcattggaacaggagaaaattctgaatttggggaggtttttaaaatgatgcaagcagaagaggcaccaaaaacccctctgcagaagagcatggacctcttaggaaaacaactttccttttactcctttggtataataggaatcatcatgttggttggctggttactgggaaaagatatcctggaaatgtttactattagtgtaagtttggctgtagcagcaattcctgaaggtctccccattgtggtcacagtgacgctagctcttggtgttatgagaatggtgaagaaaagggccattgtgaaaaagctgcctattgttgaaactctgggctgctgtaatgtgatttgttcagataaaactggaacactgacgaagaatgaaatgactgttactcacatatttacttcagatggtctgcatgctgaggttactggagttggctataatcaatttggggaagtgattgttgatggtgatgttgttcatggattctataacccagctgttagcagaattgttgaggcgggctgtgtgtgcaatgatgctgtaattagaaacaatactctaatggggaagccaacagaaggggccttaattgctcttgcaatgaagatgggtcttgatggacttcaacaagactacatcagaaaagctgaatacccttttagctctgagcaaaagtggatggctgttaagtgtgtacaccgaacacagcaggacagaccagagatttgttttatgaaaggtgcttacgaacaagtaattaagtactgtactacataccagagcaaagggcagaccttgacacttactcagcagcagagagatgtgtaccaacaagagaaggcacgcatgggctcagcgggactcagagttcttgctttggcttctggtcctgaactgggacagctgacatttcttggcttggtgggaatcattgatccacctagaactggtgtgaaagaagctgttacaacactcattgcctcaggagtatcaataaaaatgattactggagattcacaggagactgcagttgcaatcgccagtcgtctgggattgtattccaaaacttcccagtcagtctcaggagaagaaatagatgcaatggatgttcagcagctttcacaaatagtaccaaaggttgcagtattttacagagctagcccaaggcacaagatgaaaattattaagtcgctacagaagaacggttcagttgtagccatgacaggagatggagtaaatgatgcagttgctctgaaggctgcagacattggagttgcgatgggccagactggtacagatgtttgcaaagaggcagcagacatgatcctagtggatgatgattttcaaaccataatgtctgcaatcgaagagggtaaagggatttataataacattaaaaatttcgttagattccagctgagcacgagtatagcagcattaactttaatctcattggctacattaatgaactttcctaatcctctcaatgccatgcagattttgtggatcaatattattatggatggacccccagctcagagccttggagtagaaccagtggataaagatgtcattcgtaaacctcctcgcaactggaaagacagcattttgactaaaaacttgatacttaaaatacttgtttcatcaataatcattgtttgtgggactttgtttgtcttctggcgtgagctacgagacaatgtgattacacctcgagacacaacaatgaccttcacatgctttgtgttttttgacatgttcaatgcactaagttccagatcccagaccaagtctgtgtttgagattggactctgcagtaatagaatgttttgctatgcagttcttggatccatcatgggacaattactagttatttactttcctccgcttcagaaggtttttcagactgagagcctaagcatactggatctgttgtttcttttgggtctcacctcatcagtgtgcatagtggcagaaattataaagaaggttgaaaggagcagggaaaagatccagaagcatgttagttcgacatcatcatcttttcttgaagtctggctctgggagaggagtggacagcagctggttgagatacatccccatctggagacaggactgccactgacagaagatgtgagctgtgtctaagtccagtcttgtgcccagccgtgtctgcgccttcactctttggaactctgcatacaacatcttagcaccatcttcctgcagctcttccttacctaaataaagaaacagcccaagggcagtatttctaaaagcactgtaacagcttttcattttctccacatatactacaaattctataaagaaagaaattaatttaaaaaaactaagatgtttttctcttctggcttcataaatgccttgctgtataaattgaaatattgatactgaactgtctttttaatgatgacctaactttattcaacccatcggaatttactttttccctgaaataagatcttttccactggtctactacctgaccataaacatgtctgcatttgaattctctaaaccctaaatctgtgtctatgaaaaatacaaatgactattaaatatta

SEQ ID NO: 109734 - DNA, 3498 bp, Homo sapiens
  Payload ID: 1548
  Gene Symbol: ATP2C1
  Gene Name: ATPase, Ca++ transporting, type 2C, member 1
  Uniprot ID: P98194
  ENST ID: ENST00000504381
  CDS Start-End: 227-3061
attgcatttctggacgcttctagacagtgttcatacttggctgtctggtttcaccaggaactctacccaaaagaggaaacagcaaggagaacatttgctttgtttgtaggagggaagttgtcgagctacaaacaaatctttaggcatctgaggaattgctaagtttctaatttcatatggttgctgacaaggaggtgcagacaaggaccctcttgctttcctcactatggatagtctgttgcctccatctagattctcttatttcaaaaaatatcctctccatgcaattaggagatatttatcgacgctgagaaaccaaagagccgaagaacaggttgcacgttttcaaaaaatacctaatggtgaaaatgagacaatgattcctgtattgacatcaaaaaaagcaagtgaattaccagtcagtgaagttgcaagcattctccaatttaaaaatccccttattatgctgcttctggcttctgcagtcatcagtgttttaatgcatcagtttgatgatgccgtcagtatcactgtggcaatacttatcgttgttacagttgcctttgttcaggaatatcgttcagaaaaatctcttgaagaattgagtaaacttgtgccaccagaatgccattgtgtgcgtgaaggaaaattggagcatacacttgcccgagacttggttccaggtgatacagtttgcctttctgttggggatagagttcctgctgacttacgcttgtttgaggctgtggatctttccattgatgagtccagcttgacaggtgagacaacgccttgttctaaggtgacagctcctcagccagctgcaactaatggagatcttgcatcgagaagtaacattgcctttatgggaacactggtcagatgtggcaaagcaaagggtgttgtcattggaacaggagaaaattctgaatttggggaggtttttaaaatgatgcaagcagaagaggcaccaaaaacccctctgcagaagagcatggacctcttaggaaaacaactttccttttactcctttggtataataggaatcatcatgttggttggctggttactgggaaaagatatcctggaaatgtttactattagtgtaagtttggctgtagcagcaattcctgaaggtctccccattgtggtcacagtgacgctagctcttggtgttatgagaatggtgaagaaaagggccattgtgaaaaagctgcctattgttgaaactctgggctgctgtaatgtgatttgttcagataaaactggaacactgacgaagaatgaaatgactgttactcacatatttacttcagatggtctgcatgctgaggttactggagttggctataatcaatttggggaagtgattgttgatggtgatgttgttcatggattctataacccagctgttagcagaattgttgaggcgggctgtgtgtgcaatgatgctgtaattagaaacaatactctaatggggaagccaacagaaggggccttaattgctcttgcaatgaagatgggtcttgatggacttcaacaagactacatcagaaaagctgaatacccttttagctctgagcaaaagtggatggctgttaagtgtgtacaccgaacacagcaggacagaccagagatttgttttatgaaaggtgcttacgaacaagtaattaagtactgtactacataccagagcaaagggcagaccttgacacttactcagcagcagagagatgtgtaccaacaagagaaggcacgcatgggctcagcgggactcagagttcttgctttggcttctggtcctgaactgggacagctgacatttcttggcttggtgggaatcattgatccacctagaactggtgtgaaagaagctgttacaacactcattgcctcaggagtatcaataaaaatgattactggagattcacaggagactgcagttgcaatcgccagtcgtctgggattgtattccaaaacttcccagtcagtctcaggagaagaaatagatgcaatggatgttcagcagctttcacaaatagtaccaaaggttgcagtattttacagagctagcccaaggcacaagatgaaaattattaagtcgctacagaagaacggttcagttgtagccatgacaggagatggagtaaatgatgcagttgctctgaaggctgcagacattggagttgcgatgggccagactggtacagatgtttgcaaagaggcagcagacatgatcctagtggatgatgattttcaaaccataatgtctgcaatcgaagagggtaaagggatttataataacattaaaaatttcgttagattccagctgagcacgagtatagcagcattaactttaatctcattggctacattaatgaactttcctaatcctctcaatgccatgcagattttgtggatcaatattattatggatggacccccagctcagagccttggagtagaaccagtggataaagatgtcattcgtaaacctcctcgcaactggaaagacagcattttgactaaaaacttgatacttaaaatacttgtttcatcaataatcattgtttgtgggactttgtttgtcttctggcgtgagctacgagacaatgtgattacacctcgagacacaacaatgaccttcacatgctttgtgttttttgacatgttcaatgcactaagttccagatcccagaccaagtctgtgtttgagattggactctgcagtaatagaatgttttgctatgcagttcttggatccatcatgggacaattactagttatttactttcctccgcttcagaaggtttttcagactgagagcctaagcatactggatctgttgtttcttttgggtctcacctcatcagtgtgcatagtggcagaaattataaagaaggttgaaaggagcagggaaaagatccagaagcatgttagttcgacatcatcatcttttcttgaagtctggctctgggagaggagtggacagcagctggttgagatacatccccatctggagacaggactgccactgacagaagatgtgagctgtgtctaagtccagtcttgtgcccagccgtgtctgcgccttcactctttggaactctgcatacaacatcttagcaccatcttcctgcagctcttccttacctaaataaagaaacagcccaagggcagtatttctaaaagcactgtaacagcttttcattttctccacatatactacaaattctataaagaaagaaattaatttaaaaaaactaagatgtttttctcttctggcttcataaatgccttgctgtataaattgaaatattgatactgaactgtctttttaatgatgacctaactttattcaacccatcggaatttactttttccctgaaataagatcttttccactggtctactacctgaccataaacatgtctgcatttgaattctctaaaccctaaatctgtgtctatgaaaaatacaaatgactattaaatatta

SEQ ID NO: 109735 - DNA, 559 bp, Homo sapiens
  Payload ID: 1548
  Gene Symbol: ATP2C1
  Gene Name: ATPase, Ca++ transporting, type 2C, member 1
  ENST ID: ENST00000509662
  CDS Start-End: 253-559
aggttctgaaggaaggggaggttcgggtatcccctggatgggggggcatctctagggcgccgccccgctggcatgctgctgctaggggtggtgggagcagccgtgggacgcgtggccgggagcgggggtgacagcctgggattccgggggcttctcttccttgtcctcctcctctcctctctattcccagtgtggccgtggctgacactaaagactttgtagccatcaacccgagtgcagtttcgatggaaaatgaaggttgcacgttttcaaaaaatacctaatggtgaaaatgagacaatgattcctgtattgacatcaaaaaaagcaagtgaattaccagtcagtgaagttgcaagcattctccaagctgatcttcagaatggtctaaacaaatgtgaagttagtcataggcgagcctttcatggctggaatgagtttgatattagtgaagatgagccactgtggaagaagtatatttctcagtttaaaaatccccttattatgctgcttctggcttctgcagtcatcagtgttttaatgcatcagtttgatgatg

SEQ ID NO: 109736 - DNA, 651 bp, Homo sapiens
  Payload ID: 1548
  Gene Symbol: ATP2C1
  Gene Name: ATPase, Ca++ transporting, type 2C, member 1
  ENST ID: ENST00000507194
  CDS Start-End: 1-153
ctagtggatgatgattttcaaaccataatgtctgcaatcgaagagggtaaagggatttataataacattaaaaatttcgttagattccagctgagcacattttgtggatcaatattattatggatggacccccagctcagagccttggagtagaaccagtggataaagatgtcattcgtaaacctcctcgcaactggaaagacagcattttgactaaaaacttgatacttaaaatacttgtttcatcaataatcattgtttgtgggactttgtttgtcttctggcgtgagctacgagacaatgtgattacacctcgagacacaacaatgaccttcacatgctttgtgttttttgacatgttcaatgcactaagttccagatcccagaccaagtctgtgtttgagattggactctgcagtaatagaatgttttgctatgcagttcttggatccatcatgggacaattactagttatttactttcctccgcttcagaaggtttttcagactgagagcctaagcatactggatctgttgtttcttttgggtctcacctcatcagtgtgcatagtggcagaaattataaagaaggttgaaaggagcagggaaaagatccagaagcatgttagttcgacatcatcatcttttcttg

SEQ ID NO: 109737 - DNA, 5067 bp, Homo sapiens
  Payload ID: 1548
  Gene Symbol: ATP2C1
  Gene Name: ATPase, Ca++ transporting, type 2C, member 1
  Uniprot ID: P98194
  ENST ID: ENST00000510168
  CDS Start-End: 551-3310
tctctcagcggaagtaatagtgacaaagctgggttcgcggctggcccaggagtgcggggcgcgactgggcggccggcggcggggaggggcggagcgcaggagtcggaggcgggagcagaccagcacggcctcgcggagccggcccggcggaccgtgacgggtcccctcacctcctcttctctcccctccccgcccgccctctctccctcccttcctccctcccgctcgcttcttctcacgccgggagcaggctcccgcctcgcaccgctgccccgcgagcagctcctcttctcccgaggcgcgcggggcgcccccgcgagccccgcggctgagaccccgcagcctggaggagggctgtccggggctttggatgctgctgctaggggtggtgggagcagccgtgggacgcgtggccgggagcgggggtgacagcctgggattccgggggcttctcttccttgtcctcctcctctcctctctattcccagtgtggccgtggctgacactaaagactttgtagccatcaacccgagtgcagtttcgatggaaaatgaaggttgcacgttttcaaaaaatacctaatggtgaaaatgagacaatgattcctgtattgacatcaaaaaaagcaagtgaattaccagtcagtgaagttgcaagcattctccaagctgatcttcagaatggtctaaacaaatgtgaagttagtcataggcgagcctttcatggctggaatgagtttgatattagtgaagatgagccactgtggaagaagtatatttctcagtttaaaaatccccttattatgctgcttctggcttctgcagtcatcagtgttttaatgcatcagtttgatgatgccgtcagtatcactgtggcaatacttatcgttgttacagttgcctttgttcaggaatatcgttcagaaaaatctcttgaagaattgagtaaacttgtgccaccagaatgccattgtgtgcgtgaaggaaaattggagcatacacttgcccgagacttggttccaggtgatacagtttgcctttctgttggggatagagttcctgctgacttacgcttgtttgaggctgtggatctttccattgatgagtccagcttgacaggtgagacaacgccttgttctaaggtgacagctcctcagccagctgcaactaatggagatcttgcatcgagaagtaacattgcctttatgggaacactggtcagatgtggcaaagcaaagggtgttgtcattggaacaggagaaaattctgaatttggggaggtttttaaaatgatgcaagcagaagaggcaccaaaaacccctctgcagaagagcatggacctcttaggaaaacaactttccttttactcctttggtataataggaatcatcatgttggttggctggttactgggaaaagatatcctggaaatgtttactattagtgtaagtttggctgtagcagcaattcctgaaggtctccccattgtggtcacagtgacgctagctcttggtgttatgagaatggtgaagaaaagggccattgtgaaaaagctgcctattgttgaaactctgggctgctgtaatgtgatttgttcagataaaactggaacactgacgaagaatgaaatgactgttactcacatatttacttcagatggtctgcatgctgaggttactggagttggctataatcaatttggggaagtgattgttgatggtgatgttgttcatggattctataacccagctgttagcagaattgttgaggcgggctgtgtgtgcaatgatgctgtaattagaaacaatactctaatggggaagccaacagaaggggccttaattgctcttgcaatgaagatgggtcttgatggacttcaacaagactacatcagaaaagctgaatacccttttagctctgagcaaaagtggatggctgttaagtgtgtacaccgaacacagcaggacagaccagagatttgttttatgaaaggtgcttacgaacaagtaattaagtactgtactacataccagagcaaagggcagaccttgacacttactcagcagcagagagatgtgtaccaacaagagaaggcacgcatgggctcagcgggactcagagttcttgctttggcttctggtcctgaactgggacagctgacatttcttggcttggtgggaatcattgatccacctagaactggtgtgaaagaagctgttacaacactcattgcctcaggagtatcaataaaaatgattactggagattcacaggagactgcagttgcaatcgccagtcgtctgggattgtattccaaaacttcccagtcagtctcaggagaagaaatagatgcaatggatgttcagcagctttcacaaatagtaccaaaggttgcagtattttacagagctagcccaaggcacaagatgaaaattattaagtcgctacagaagaacggttcagttgtagccatgacaggagatggagtaaatgatgcagttgctctgaaggctgcagacattggagttgcgatgggccagactggtacagatgtttgcaaagaggcagcagacatgatcctagtggatgatgattttcaaaccataatgtctgcaatcgaagagggtaaagggatttataataacattaaaaatttcgttagattccagctgagcacgagtatagcagcattaactttaatctcattggctacattaatgaactttcctaatcctctcaatgccatgcagattttgtggatcaatattattatggatggacccccagctcagagccttggagtagaaccagtggataaagatgtcattcgtaaacctcctcgcaactggaaagacagcattttgactaaaaacttgatacttaaaatacttgtttcatcaataatcattgtttgtgggactttgtttgtcttctggcgtgagctacgagacaatgtgattacacctcgagacacaacaatgaccttcacatgctttgtgttttttgacatgttcaatgcactaagttccagatcccagaccaagtctgtgtttgagattggactctgcagtaatagaatgttttgctatgcagttcttggatccatcatgggacaattactagttatttactttcctccgcttcagaaggtttttcagactgagagcctaagcatactggatctgttgtttcttttgggtctcacctcatcagtgtgcatagtggcagaaattataaagaaggttgaaaggagcagggaaaagatccagaagcatgttagttcgacatcatcatcttttcttgaagtatgatgcatattgcattattttatttgcaaactaggaattgcagtctgaggatcatttagaagggcaagttcaagaggatatgaagatttgagaactttttaactattcattgactaaaaatgaacattaatgttaaagacttaagactttaacctgctggcagtcccaaatgaaattatgcaactttgatatcatattccttgatttaaattggcttttgtgattgagtgaaactttataaagcatatggtcagttatttaattaaaaaggcaaaacctgaaccaccttctgcacttaaagaagtctaacagtacaaatacactatctatcttagatagatatatttttttttatttttaaatattgtactatttatggtggtggggctttcttactaatacacaaataaatttaatcatttcaaaggcattctatttggtttagaagttgattcccaggagtgccatatttcagctactgtatttcctttttcttgtaatgtaagcagctcagataccatgtgctatcatttttgtatcaagttttttgcacaggatgtgaccactgtcagatcactgttcttttctttctttttgtgattgaaaagcctatactacaatttgaagtaaatttttgtttttcttagtaagtgtaaatggttgctttatttttattttaaaaaggtatgtctttggtttggcagaattcatgcagggctatcaagtggtgttctagggtaacagtgtccataattaacgcttagtcatagagtcaaaaacatttaagactgattgggttgaagtttataataaattatattaacatgtcttcctttttgaggtaaagatatatactttgtcaaatatcattttgtcatcctctaaatataaatccaaatacctcagctaagtaattctattttattatttttactgttatgtatgtttttaatcatatttcttaggaagtataggctactggacttagaataaaaagtccccaaacccaaacaaatggtttatgaaccagagtatatgtggaagattctttgctggtcttgctctgtgtgcatctgaagcttctttggcctagattttagcacaaacctgagtatatctcttctactttcatcatgtgttctgtaccttctttttgtttcattgggcatgctagggaaataggtggattttgtgtgtaatgccatcagtttttatgaaagcttgatgaggtataggtcatttgttttgagtatgtgggccagaaatttaaaattagaaatttgtttttctgttgagtatataaacaaaaattggtcccaattctaacaggtttaatccttcttgaagccaataagttttatcttttataatctgtcaggatgaaccactccttagcttttatccaatattaaactgcaagtgttagcactgaaatattgtcattgatagggaaaatatctattctttgagtcattgttactgaggcagttgagtgtaaggagctggctgcagtttattctacttaaccctttaaggctgaattgtcaaatgtacattgttccatgtcgttagatggaacatggaagccattgtctaatcaactctatcattagtgacttgatgtctcataccttaattttgtaatgatttttattctctgttacaaagacttgaaatacgtattaaatgcacgttaatgttttgctttgcattttaggttcagattatgacttgattgaaataaatgtgcctatacattc

SEQ ID NO: 109738 - DNA, 556 bp, Homo sapiens
  Payload ID: 1548
  Gene Symbol: ATP2C1
  Gene Name: ATPase, Ca++ transporting, type 2C, member 1
  ENST ID: ENST00000505072
  CDS Start-End: 196-556
ctccctcccgctcgcttcttctcacgccgggagcaggctcccgcctcgcaccgctgccccgcgagcagctcctcttctcccgaggcgcgcggggcgcccccgcgagccccgcggctgagaccccgcagcctggaggagggctgtccggggctttggactttgtagccatcaacccgagtgcagtttcgatggaaaatgaaggttgcacgttttcaaaaaatacctaatggtgaaaatgagacaatgattcctgtattgacatcaaaaaaagcaagtgaattaccagtcagtgaagttgcaagcattctccaagctgatcttcagaatggtctaaacaaatgtgaagttagtcataggcgagcctttcatggctggaatgagtttgatattagtgaagatgagccactgtggaagaagtatatttctcagtttaaaaatccccttattatgctgcttctggcttctgcagtcatcagtgttttaatgcatcagtttgatgatgccgtcagtatcactgtggcaatacttatcgttgttacagttgcctttgttcagg

SEQ ID NO: 109739 - DNA, 3690 bp, Homo sapiens
  Payload ID: 1548
  Gene Symbol: ATP2C1
  Gene Name: ATPase, Ca++ transporting, type 2C, member 1
  Uniprot ID: P98194
  ENST ID: ENST00000533801
  CDS Start-End: 504-3170
aggagtgcggggcgcgactgggcggccggcggcggggaggggcggagcgcaggagtcggaggcgggagcagaccagcacggcctcgcggagccggcccggcggaccgtgacgggtcccctcacctcctcttctctcccctccccgcccgccctctctccctcccttcctccctcccgctcgcttcttctcacgccgggagcaggctcccgcctcgcaccgctgccccgcgagcagctcctcttctcccgaggcgcgcggggcgcccccgcgagccccgcggctgagaccccgcagcctggaggagggctgtccggggctttggatgctgctgctaggggtggtgggagcagccgtgggacgcgtggccgggagcgggggtgacagcctgggattccgggggcttctcttccttgtcctcctcctctcctctctattcccagtgtggccgtggctgacactaaagactttgtagccatcaacccgagtgcagtttcgatggaaaatgaaggttgcacgttttcaaaaaatacctaatggtgaaaatgagacaatgattcctgtattgacatcaaaaaaagcaagtgaattaccagtcagtgaagttgcaagcattctccaagctgatcttcagaatggtctaaacaaatgtgaagttagtcataggcgagcctttcatggctggaatgagtttgatattagtgaagatgagccactgtggaagaagtatatttctcagtttaaaaatccccttattatgctgcttctggcttctgcagtcatcagtgttttaatgcatcagtttgatgatgccgtcagtatcactgtggcaatacttatcgttgttacagttgcctttgttcaggaatatcgttcagaaaaatctcttgaagaattgagtaaacttgtgccaccagaatgccattgtgtgcgtgaaggaaaattggagcatacacttgcccgagacttggttccaggtgatacagtttgcctttctgttggggatagagttcctgctgacttacgcttgtttgaggctgtggatctttccattgatgagtccagcttgacaggtgagacaacgccttgttctaaggtgacagctcctcagccagctgcaactaatggagatcttgcatcgagaagtaacattgcctttatgggaacactggtcagatgtggcaaagcaaagggtgttgtcattggaacaggagaaaattctgaatttggggaggtttttaaaatgatgcaagcagaagaggcaccaaaaacccctctgcagaagagcatggacctcttaggaaaacaactttccttttactcctttggtataataggaatcatcatgttggttggctggttactgggaaaagatatcctggaaatgtttactattagtgtaagtttggctgtagcagcaattcctgaaggtctccccattgtggtcacagtgacgctagctcttggtgttatgagaatggtgaagaaaagggccattgtgaaaaagctgcctattgttgaaactctgggctgctgtaatgtgatttgttcagataaaactggaacactgacgaagaatgaaatgactgttactcacatatttacttcagatggtctgcatgctgaggttactggagttggctataatcaatttggggaagtgattgttgatggtgatgttgttcatggattctataacccagctgttagcagaattgttgaggcgggctgtgtgtgcaatgatgctgtaattagaaacaatactctaatggggaagccaacagaaggggccttaattgctcttgcaatgaagatgggtcttgatggacttcaacaagactacatcagaaaagctgaatacccttttagctctgagcaaaagtggatggctgttaagtgtgtacaccgaacacagcaggacagaccagagatttgttttatgaaaggtgcttacgaacaagtaattaagtactgtactacataccagagcaaagggcagaccttgacacttactcagcagcagagagatgtgtaccaacaagagaaggcacgcatgggctcagcgggactcagagttcttgctttggcttctggtcctgaactgggacagctgacatttcttggcttggtgggaatcattgatccacctagaactggtgtgaaagaagctgttacaacactcattgcctcaggagtatcaataaaaatgattactggagattcacaggagactgcagttgcaatcgccagtcgtctgggattgtattccaaaacttcccagtcagtctcaggagaagaaatagatgcaatggatgttcagcagctttcacaaatagtaccaaaggttgcagtattttacagagctagcccaaggcacaagatgaaaattattaagtcgctacagaagaacggttcagttgtagccatgacaggagatggagtaaatgatgcagttgctctgaaggctgcagacattggagttgcgatgggccagactggtacagatgtttgcaaagaggcagcagacatgatcctagtggatgatgattttcaaaccataatgtctgcaatcgaagagggtaaagggatttataataacattaaaaatttcgttagattccagctgagcacgagtatagcagcattaactttaatctcattggctacattaatgaactttcctaatcctctcaatgccatgcagattttgtggatcaatattattatggatggacccccagctcagagccttggagtagaaccagtggataaagatgtcattcgtaaacctcctcgcaactggaaagacagcattttgactaaaaacttgatacttaaaatacttgtttcatcaataatcattgtttgtgggactttgtttgtcttctggcgtgagctacgagacaatgtgattacacctcgagacacaacaatgaccttcacatgctttgtgttttttgacatgttcaatgcactaagttccagatcccagaccaagtctgtgtttgagattggactctgcagtaatagaatgttttgctatgcagttcttggatccatcatgggacaattactagttatttactttcctccgcttcagaaggtttttcagactgagagcctaagcatactgggtctggctctgggagaggagtggacagcagctggttgagatacatccccatctggagacaggactgccactgacagaagatgtgagctgtgtctaagtccagtcttgtgcccagccgtgtctgcgccttcactctttggaactctgcatacaacatcttagcaccatcttcctgcagctcttccttacctaaataaagaaacagcccaagggcagtatttctaaaagcactgtaacagcttttcattttctccacatatactacaaattctataaagaaagaaattaatttaaaaaaactaagatgtttttctcttctggcttcataaatgccttgctgtataaattgaaatattgatactgaactgtctttttaatgatgacctaactttattcaacccatcggaatttactttttccctgaaataagatcttttccactggtctactacctgaccataaacatgtctgcatttgaattctctaaaccctaaatctgtgtctatgaaaaatacaaatgactattaaatattattctctttactgttctctttcaccg

SEQ ID NO: 109740 - DNA, 3376 bp, Homo sapiens
  Payload ID: 1549
  Gene Symbol: ATP2C2
  Gene Name: ATPase, Ca++ transporting, type 2C, member 2
  Uniprot ID: O75185
  ENST ID: ENST00000262429
  CDS Start-End: 90-2930
gggtccggcccaggaggcttgggcgcgcgcagccatcccgggcctcgccggggacctagggacgcaggcaacgcctgcgcccgctcaccatggtcgagggacgcgtctccgagttcctgaagaaactcggcttctcgggcgggggccgccagtaccaggcgctggagaaggacgaagaggaagccttgattgatgaacagagtgagctgaaagccatcgagaaagagaagaaggtgacagccctgccccccaaggaagcgtgcaaatgccagaaagaggatttggccagagcgttttgtgtggacttacacactgggctgtcggagttctcggtgacgcagcgccggctggcccatggctggaatgagtttgttgctgacaacagcgaacctgtgtggaagaaatacctggatcagtttaagaaccccctgatcctgctgctgctgggctctgccctggtgagtgtcctcaccaaggagtatgaggacgccgtcagcatcgccacggcagtgcttgtcgtggtcactgtcgccttcatccaggagtacaggtcggagaaatctctggaagagctgaccaagctggttcctccagaatgtaactgcctaagagaaggaaaactccagcacctgcttgctcgagaactggttcctggtgatgtcgtatctctctcgatcggagaccggatccctgcagacatccgactcactgaggtcacggacctcttggtggatgaatccagtttcaccggggaagccgagccatgtagtaaaacagacagccccttgacaggcggtggggacctcaccaccctcagcaacatcgtcttcatggggaccctggtgcagtatgggaggggccagggggtcgtgattggaacaggggaaagctctcagttcggagaagtgtttaagatgatgcaggctgaagagacacctaaaactcctttgcagaaaagcatggacaggctaggaaagcaactgacactcttctcctttggcataatcggtctcatcatgctcattggctggtcgcaagggaaacaactcctgagtatgttcacgatcggggtcagcctggctgtggcggccattccagagggtctgcccatcgtcgtcatggtgacgctggtcctgggagtgctgcggatggccaagaagcgggtcatcgtgaagaagttacccatcgtggagactttaggttgctgcagcgttctctgttctgacaagacggggactctgactgccaatgaaatgacagtgacccagcttgtaacgtcagatgggcttcgtgccgaggtcagcggagttgggtatgacggtcaagggactgtgtgtcttctaccatccaaggaagtcattaaggaattttccaatgtctcagtgggaaagttagtggaggcgggctgtgttgccaacaatgcggtcatcagaaagaacgccgtgatggggcagcccaccgagggtgcattgatggccctggcgatgaagatggacttaagtgatattaaaaattcatatataagaaaaaaagagattccattcagttcagagcagaagtggatggcggtgaaatgcagtctgaagactgaggatcaggaagacatttacttcatgaaaggggccttggaagaggtgatccgctactgcaccatgtacaacaacgggggcatccccctgccgctgacgccccagcagaggtcattctgcctgcaggaagagaagaggatggggtcgctcggtttgcgggtgctggccctggcttctgggcccgagctggggcggctgacgtttctcggtcttgtgggcatcattgaccccccgagagttggcgtgaaggaagcagtccaggttctctccgagtctggtgtgtctgtgaagatgataacgggggatgccctggagacggccttggccataggaagaaacatcggcctgtgcaacgggaagctgcaagccatgtccggggaggaggtggacagcgtggagaagggcgagctggccgaccgcgtggggaaggtgtccgtgttcttcaggaccagcccaaagcacaagctcaaaatcatcaaggctctgcaggagtcaggggcgatcgtggccatgactggggatggggtgaacgacgcagtggccctgaagtctgcagacattgggatcgccatggggcagacagggacggacgtcagcaaagaggccgccaacatgatcctggtggatgatgacttctcagccatcatgaatgcagtggaggaaggcaagggtattttttacaacatcaaaaactttgtccgattccagctgagcacgagcatctccgccctgagtctcatcactctgtccaccgtgttcaacctgcccagccccctcaacgccatgcagatcctatggatcaacatcatcatggatgggccaccggcgcagagcttgggggtagagcccgttgacaaagacgccttcaggcagccaccacggagtgtgcgggacaccatcctcagcagagccctcatcctgaagatcctcatgtccgcggccatcatcatcagcgggaccctctttatcttctggaaggagatgcctgaagacagagcaagcactccccgcaccacgacgatgacgttcacttgttttgtgtttttcgatctcttcaacgccttgacctgccgctctcagaccaagctgatatttgagatcggctttctcaggaaccacatgttcctctactccgtcctggggtccatcctggggcagctggcggtcatttacatccccccgctgcagagggtcttccagacggagaacctgggagcgcttgatttgctgtttttaactggattggcctcatccgtcttcattttgtcagagctcctcaaactatgtgaaaaatactgttgcagccccaagagagtccagatgcaccctgaagatgtgtagtggaccgcactccgcggcaccttccctaatcatctcgatctggttgtgactgtggcccctgccgtgtctcctcgtcaggggagacttttaggaggccgcagccttccatcaccggatcagtttttcctcttaggaaagctgcaggaacctcgtgggctccagggacccaggcccacatccatccagcgttcccgctggctgtgggacagacagggaggggcctgtacagaaacaccacactgtttattaaatcacaatgatttttattaaccatgtctaactacgtatctgtgccacagcttgcagtgaggcaggccactcgtggcagatacaaggggctcctgagaggcagtgggtaggatggtcacactctgcccattgccctcctggaggccccatttcctcatcataaaatgagggacttttaaataaagtgctatgccggg

SEQ ID NO: 109741 - DNA, 3472 bp, Homo sapiens
  Payload ID: 1549
  Gene Symbol: ATP2C2
  Gene Name: ATPase, Ca++ transporting, type 2C, member 2
  ENST ID: ENST00000416219
  CDS Start-End: 90-3017
gggtccggcccaggaggcttgggcgcgcgcagccatcccgggcctcgccggggacctagggacgcaggcaacgcctgcgcccgctcaccatggtcgagggacgcgtctccgagttcctgaagaaactcggcttctcgggcgggggccgccagtaccaggcgctggagaaggacgaagaggaagccttgattgatgaacagagtgagctgaaagccatcgagaaagagaagaaggtgacagccctgccccccaaggaagcgtgcaaatgccagaaagaggatttggccagagcgttttgtgtggacttacacactgggctgtcggagttctcggtgacgcagcgccggctggcccatggctggaatgagtttgttgctgacaacagcgaacctgtgtggaagaaatacctggatcagtttaagaaccccctgatcctgctgctgctgggctctgccctggtgagtgtcctcaccaaggagtatgaggacgccgtcagcatcgccacggcagtgcttgtcgtggtcactgtcgccttcatccaggagtacaggtcggagaaatctctggaagagctgaccaagctggttcctccagaatgtaactgcctaagagaaggaaaactccagcacctgcttgctcgagaactggttcctggtgatgtcgtatctctctcgatcggagaccggatccctgcagacatccgactcactgaggtcacggacctcttggtggatgaatccagtttcaccggggaagccgagccatgtagtaaaacagacagccccttgacaggcggtggggacctcaccaccctcagcaacatcgtcttcatggggaccctggtgcagtatgggaggggccagggggtcgtgattggaacaggggaaagctctcagttcggagaagtgtttaagatgatgcaggctgaagagacacctaaaactcctttgcagaaaagcatggacaggctaggaaagcaactgacactcttctcctttggcataatcggtctcatcatgctcattggctggtcgcaagggaaacaactcctgagtatgttcacgatcggggtcagcctggctgtggcggccattccagagggtctgcccatcgtcgtcatggtgacgctggtcctgggagtgctgcggatggccaagaagcgggtcatcgtgaagaagttacccatcgtggagactttaggttgctgcagcgttctctgttctgacaagacggggactctgactgccaatgaaatgacagtgacccagcttgtaacgtcagatgggcttcgtgccgaggtcagcggagttgggtatgacggtcaagggactgtgtgtcttctaccatccaaggaagtcattaaggaattttccaatgtctcagtgggaaagttagtggaggcgggctgtgttgccaacaatgcggtcatcagaaagaacgccgtgatggggcagcccaccgagggtgcattgatggccctggcgatgaagatggacttaagtgatattaaaaattcatatataagaaaaaaagagattccattcagttcagagcagaagtggatggcggtgaaatgcagtctgaagactgaggatcaggaagacatttacttcatgaaaggggccttggaagaggtgatccgctactgcaccatgtacaacaacgggggcatccccctgccgctgacgccccagcagaggtcattctgcctgcaggaagagaagaggatggggtcgctcggtttgcgggtgctggccctggcttctgggcccgagctggggcggctgacgtttctcggtcttgtgggcatcattgaccccccgagagttggcgtgaaggaagcagtccaggttctctccgagtctggtgtgtctgtgaagatgataacgggggatgccctggagacggccttggccataggaagaaacatcggcctgtgcaacgggaagctgcaagccatgtccggggaggaggtggacagcgtggagaagggcgagctggccgaccgcgtggggaaggtgtccgtgttcttcaggaccagcccaaagcacaagctcaaaatcatcaaggctctgcaggagtcaggggcgatcgtggccatgactggggatggggtgaacgacgcagtggccctgaagtctgcagacattgggatcgccatggggcagacagggacggacgtcagcaaagaggccgccaacatgatcctggtggatgatgacttctcagccatcatgaatgcagtggaggaaggcaagggtattttttacaacatcaaaaactttgtccgattccagctgagcacgagcatctccgccctgagtctcatcactctgtccaccgtgttcaacctgcccagccccctcaacgccatgcagatcctatggatcaacatcatcatggatgggccaccggcgcagaggagttcccagaaaactgaagtgtgttgcactgcagtgagactgggagtagaaggcagaggagaaagtacctgggccggcagagctggcttgggggtagagcccgttgacaaagacgccttcaggcagccaccacggagtgtgcgggacaccatcctcagcagagccctcatcctgaagatcctcatgtccgcggccatcatcatcagcgggaccctctttatcttctggaaggagatgcctgaagacagagcaagcactccccgcaccacgacgatgacgttcacttgttttgtgtttttcgatctcttcaacgccttgacctgccgctctcagaccaagctgatatttgagatcggctttctcaggaaccacatgttcctctactccgtcctggggtccatcctggggcagctggcggtcatttacatccccccgctgcagagggtcttccagacggagaacctgggagcgcttgatttgctgtttttaactggattggcctcatccgtcttcattttgtcagagctcctcaaactatgtgaaaaatactgttgcagccccaagagagtccagatgcaccctgaagatgtgtagtggaccgcactccgcggcaccttccctaatcatctcgatctggttgtgactgtggcccctgccgtgtctcctcgtcaggggagacttttaggaggccgcagccttccatcaccggatcagtttttcctcttaggaaagctgcaggaacctcgtgggctccagggacccaggcccacatccatccagcgttcccgctggctgtgggacagacagggaggggcctgtacagaaacaccacactgtttattaaatcacaatgatttttattaaccatgtctaactacgtatctgtgccacagcttgcagtgaggcaggccactcgtggcagatacaaggggctcctgagaggcagtgggtaggatggtcacactctgcccattgccctcctggaggccccatttcctcatcataaaatgagggacttttaaataaagtgctatgccgggggataatta

SEQ ID NO: 109742 - DNA, 355 bp, Homo sapiens
  Payload ID: 1549
  Gene Symbol: ATP2C2
  Gene Name: ATPase, Ca++ transporting, type 2C, member 2
  ENST ID: ENST00000569207
  CDS Start-End: 1-160
tgtgtggaagaaatacctggatcagtttaagaaccccctgatcctgctgctgctgggctctgccctggtgagtgtcctcaccaaggagtatgaggacgccgtcagcatcgccacggcagtgcttgtcgtggtcactgtcgccttcatccagcacatctgatgtgcttcctgccaggagtacaggtcggagaaatctctggaagagctgaccaagctggttcctccagaatgtaactgcctaagagaaggaaaactccagcacctgcttgctcgagaactggttcctggtgatgtcgtatctctctcgatcggagaccggatccctgcagacatccgactcactgaggtcacggac

SEQ ID NO: 109743 - DNA, 3274 bp, Homo sapiens
  Payload ID: 1550
  Gene Symbol: ATP2A3
  Gene Name: ATPase, Ca++ transporting, ubiquitous
  Uniprot ID: Q93084
  ENST ID: ENST00000352011
  CDS Start-End: 56-3187
ccggcggagaggcggcctcgacggtgcggacggcgcagacggccgggcgggcggcatggaggcggcgcatctgctcccggccgccgacgtgctgcgccacttctcggtgacagccgagggcggcctgagcccggcgcaggtgaccggcgcgcgggagcgctacggccccaacgagctcccgagtgaggaagggaagtccctgtgggagctggtgctggaacagtttgaggacctcctggtgcgcatcctgctgctggctgcccttgtctcctttgtcctggcctggttcgaggagggcgaggagaccacgaccgccttcgtggagcccctggtcatcatgctgatcctcgtggccaacgccattgtgggcgtgtggcaggaacgcaacgccgagagtgccatcgaggccctgaaggagtatgagcctgagatgggcaaggtgatccgctcggaccgcaagggcgtgcagaggatccgtgcccgggacatcgtcccaggggacattgtagaagtggcagtgggggacaaagtgcctgctgacctccgcctcatcgagatcaagtccaccacgctgcgagtggaccagtccatcctgacgggtgaatctgtgtccgtgaccaagcacacagaggccatcccagaccccagagctgtgaaccaggacaagaagaacatgctgttttctggcaccaatatcacatcgggcaaagcggtgggtgtggccgtggccaccggcctgcacacggagctgggcaagatccggagccagatggcggcagtcgagcccgagcggacgccgctgcagcgcaagctggacgagtttggacggcagctgtcccacgccatctctgtgatctgcgtggccgtgtgggtcatcaacatcggccacttcgccgacccggcccacggtggctcctggctgcgtggcgctgtctactacttcaagatcgccgtggccctggcggtggcggccatccccgagggcctcccggctgtcatcactacatgcctggcactgggcacgcggcgcatggcacgcaagaacgccatcgtgcgaagcctgccgtccgtggagaccctgggctgcacctcagtcatctgctccgacaagacgggcacgctcaccaccaatcagatgtctgtctgccggatgttcgtggtagccgaggccgatgcgggctcctgccttttgcacgagttcaccatctcgggtaccacgtatacccccgagggcgaagtgcggcagggggatcagcctgtgcgctgcggccagttcgacgggctggtggagctggcgaccatctgcgccctgtgcaacgactcggctctggactacaacgaggccaagggtgtgtatgagaaggtgggagaggccacggagacagctctgacttgcctggtggagaagatgaacgtgttcgacaccgacctgcaggctctgtcccgggtggagcgagctggcgcctgtaacacggtcatcaagcagctgatgcggaaggagttcaccctggagttctcccgagaccggaaatccatgtccgtgtactgcacgcccacccgccctcaccctactggccagggcagcaagatgtttgtgaagggggctcctgagagtgtgatcgagcgctgtagctcagtccgcgtggggagccgcacagcacccctgacccccacctccagggagcagatcctggcaaagatccgggattggggctcaggctcagacacgctgcgctgcctggcactggccacccgggacgcgcccccaaggaaggaggacatggagctggacgactgcagcaagtttgtgcagtacgagacggacctgaccttcgtgggctgcgtaggcatgctggacccgccgcgacctgaggtggctgcctgcatcacacgctgctaccaggcgggcatccgcgtggtcatgatcacgggggataacaaaggcactgccgtggccatctgccgcaggcttggcatctttggggacacggaagacgtggcgggcaaggcctacacgggccgcgagtttgatgacctcagccccgagcagcagcgccaggcctgccgcaccgcccgctgcttcgcccgcgtggagcccgcacacaagtcccgcatcgtggagaacctgcagtcctttaacgagatcactgctatgactggcgatggagtgaacgacgcaccagccctgaagaaagcagagatcggcatcgccatgggctcaggcacggccgtggccaagtcggcggcagagatggtgctgtcagatgacaactttgcctccatcgtggctgcggtggaggagggccgggccatctacagcaacatgaagcaattcatccgctacctcatctcctccaatgttggcgaggtcgtctgcatcttcctcacggcaattctgggcctgcccgaagccctgatccctgtgcagctgctctgggtgaacctggtgacagacggcctacctgccacggctctgggcttcaacccgccagacctggacatcatggagaagctgccccggagcccccgagaagccctcatcagtggctggctcttcttccgatacctggctatcggagtgtacgtaggcctggccacagtggctgccgccacctggtggtttgtgtatgacgccgagggacctcacatcaacttctaccagctgaggaacttcctgaagtgctccgaagacaacccgctctttgccggcatcgactgtgaggtgttcgagtcacgcttccccaccaccatggccttgtccgtgctcgtgaccattgaaatgtgcaatgccctcaacagcgtctcggagaaccagtcgctgctgcggatgccgccctggatgaacccctggctgctggtggctgtggccatgtccatggccctgcacttcctcatcctgctcgtgccgcccctgcctctcattttccaggtgaccccactgagcgggcgccagtgggtggtggtgctccagatatctctgcctgtcatcctgctggatgaggccctcaagtacctgtcccggaaccacatgcacgcctgtctttatccaggccttctcaggacagtctcgcaggcctggagtaggcagccgctgaccacctcttggaccccagaccacaccggaagaaatgagccagaagtgagcgctgggaacagagtggagtctccggtgtgtacctcagactgatggtgcccatgtgttcgcctccgccccccacccttgccaccacactcgcccacttgcccaccgggtcccgccggataaatgacaggc

SEQ ID NO: 109744 - DNA, 4826 bp, Homo sapiens
  Payload ID: 1550
  Gene Symbol: ATP2A3
  Gene Name: ATPase, Ca++ transporting, ubiquitous
  Uniprot ID: Q93084
  ENST ID: ENST00000309890
  CDS Start-End: 174-3263
atcctggcgcgggccggggccgccgccgccactgccgtcgggtaaggtcccagcacggacatggcctcgcgcggcgcccgcccgggcccgagtcccccgcgccccgctttgtagccccccggcggagaggcggcctcgacggtgcggacggcgcagacggccgggcgggcggcatggaggcggcgcatctgctcccggccgccgacgtgctgcgccacttctcggtgacagccgagggcggcctgagcccggcgcaggtgaccggcgcgcgggagcgctacggccccaacgagctcccgagtgaggaagggaagtccctgtgggagctggtgctggaacagtttgaggacctcctggtgcgcatcctgctgctggctgcccttgtctcctttgtcctggcctggttcgaggagggcgaggagaccacgaccgccttcgtggagcccctggtcatcatgctgatcctcgtggccaacgccattgtgggcgtgtggcaggaacgcaacgccgagagtgccatcgaggccctgaaggagtatgagcctgagatgggcaaggtgatccgctcggaccgcaagggcgtgcagaggatccgtgcccgggacatcgtcccaggggacattgtagaagtggcagtgggggacaaagtgcctgctgacctccgcctcatcgagatcaagtccaccacgctgcgagtggaccagtccatcctgacgggtgaatctgtgtccgtgaccaagcacacagaggccatcccagaccccagagctgtgaaccaggacaagaagaacatgctgttttctggcaccaatatcacatcgggcaaagcggtgggtgtggccgtggccaccggcctgcacacggagctgggcaagatccggagccagatggcggcagtcgagcccgagcggacgccgctgcagcgcaagctggacgagtttggacggcagctgtcccacgccatctctgtgatctgcgtggccgtgtgggtcatcaacatcggccacttcgccgacccggcccacggtggctcctggctgcgtggcgctgtctactacttcaagatcgccgtggccctggcggtggcggccatccccgagggcctcccggctgtcatcactacatgcctggcactgggcacgcggcgcatggcacgcaagaacgccatcgtgcgaagcctgccgtccgtggagaccctgggctgcacctcagtcatctgctccgacaagacgggcacgctcaccaccaatcagatgtctgtctgccggatgttcgtggtagccgaggccgatgcgggctcctgccttttgcacgagttcaccatctcgggtaccacgtatacccccgagggcgaagtgcggcagggggatcagcctgtgcgctgcggccagttcgacgggctggtggagctggcgaccatctgcgccctgtgcaacgactcggctctggactacaacgaggccaagggtgtgtatgagaaggtgggagaggccacggagacagctctgacttgcctggtggagaagatgaacgtgttcgacaccgacctgcaggctctgtcccgggtggagcgagctggcgcctgtaacacggtcatcaagcagctgatgcggaaggagttcaccctggagttctcccgagaccggaaatccatgtccgtgtactgcacgcccacccgccctcaccctactggccagggcagcaagatgtttgtgaagggggctcctgagagtgtgatcgagcgctgtagctcagtccgcgtggggagccgcacagcacccctgacccccacctccagggagcagatcctggcaaagatccgggattggggctcaggctcagacacgctgcgctgcctggcactggccacccgggacgcgcccccaaggaaggaggacatggagctggacgactgcagcaagtttgtgcagtacgagacggacctgaccttcgtgggctgcgtaggcatgctggacccgccgcgacctgaggtggctgcctgcatcacacgctgctaccaggcgggcatccgcgtggtcatgatcacgggggataacaaaggcactgccgtggccatctgccgcaggcttggcatctttggggacacggaagacgtggcgggcaaggcctacacgggccgcgagtttgatgacctcagccccgagcagcagcgccaggcctgccgcaccgcccgctgcttcgcccgcgtggagcccgcacacaagtcccgcatcgtggagaacctgcagtcctttaacgagatcactgctatgactggcgatggagtgaacgacgcaccagccctgaagaaagcagagatcggcatcgccatgggctcaggcacggccgtggccaagtcggcggcagagatggtgctgtcagatgacaactttgcctccatcgtggctgcggtggaggagggccgggccatctacagcaacatgaagcaattcatccgctacctcatctcctccaatgttggcgaggtcgtctgcatcttcctcacggcaattctgggcctgcccgaagccctgatccctgtgcagctgctctgggtgaacctggtgacagacggcctacctgccacggctctgggcttcaacccgccagacctggacatcatggagaagctgccccggagcccccgagaagccctcatcagtggctggctcttcttccgatacctggctatcggagtgtacgtaggcctggccacagtggctgccgccacctggtggtttgtgtatgacgccgagggacctcacatcaacttctaccagctgaggaacttcctgaagtgctccgaagacaacccgctctttgccggcatcgactgtgaggtgttcgagtcacgcttccccaccaccatggccttgtccgtgctcgtgaccattgaaatgtgcaatgccctcaacagcgtctcggagaaccagtcgctgctgcggatgccgccctggatgaacccctggctgctggtggctgtggccatgtccatggccctgcacttcctcatcctgctcgtgccgcccctgcctctcattttccaggtgaccccactgagcgggcgccagtgggtggtggtgctccagatatctctgcctgtcatcctgctggatgaggccctcaagtacctgtcccggaaccacatgcacgcctgtctttatccaggccttctcaggacagtctcgcaggcctggagtaggcagccgctgaccacctcttggaccccagaccacaccgggttggcctctttgaagaaatgagccagaagtgagcgctgggaacagagtggagtctccggtgtgtacctcagactgatggtgcccatgtgttcgcctccgccccccacccttgccaccacactcgcccacttgcccaccgggtcccgccggataaatgacaggcccgaggtcagaatggccatccccgggccccgtcctggggtctctgtccccacttccttctggcctgggaggtctgtaattcctgtctcctggactctcctgggaagttccctgctctgcagctctggcccaggagctgcaggctgggagggggcagccaagaagccggagctggcagcatacccagagatccggggcccccccacccccaaatcacgagtgcagctggagcttgctcccccttgttcggaagctggacgttcacttggtgactggtgcctctgcactgacggaggactctgggggtccttcttaccggctctgacctctctcttcgtgcctggtctgggactgggtcagccctgggggatcagaaggggccatctgggcccagctgtgtacagcgagggtgggcagccccctccactccactctgcttccacaaagtcggctcccgagagctcgaggctgcttctgtttatatgtgcagggcccgggcgggtgaagggtcagagagacggacacaaggagccggcaggagggcggagcgaggatgtcctttcccgggagacaagtcgggaaagcctggctggactgcctcagccccgcgcgcctcctggactcagggttccccgtcctgagctcgggagatgttcagagtcacactgccgcccggtctgccacgcagaggtccaacttgccacccgcgtccctggtacctgagaccaccgacatcctcaggttcctgaccgtggcgcccttctacccagcccagtgtgcggccgccgcgctgtctgcacagctgggggcctctgagcctggtgggcttcctggactcttggcctcactccttgccccctccccacgacacccatgagccgaaaggatgtcactaaggatggctgattccccaagggcacccgctctccctccctccctgctggaggaacacgtcatatcagatgagaggaagatggcctctgatggacagaatttttctcttaactcagcttttgctactttggcaaaaactagcgaggggtagcagaaacctgcaccaaggattgtccctatgtcttggccactcctagagcgtgtgcagactgatgattttatatgtaaatcaagactcacatccctttcctagtcccccacatccaaagcccctcagcctgccttgcagaccaatgggctccatgttctgtagccccctcccctacgcctcacccctcctccctctcacaggttctgggcggccagtgagagaaacgcagtgggggaggcagggagtctggtgcctgcagagattctctgcttctttcctggggggaggtggggaggtcttagcaggagcgggccctgtacccacctgctgacctgctgtttggtagagaaataaaggttgtgtgactgggggaacgg

SEQ ID NO: 109745 - DNA, 3290 bp, Homo sapiens
  Payload ID: 1550
  Gene Symbol: ATP2A3
  Gene Name: ATPase, Ca++ transporting, ubiquitous
  Uniprot ID: Q93084
  ENST ID: ENST00000359983
  CDS Start-End: 1-3159
atggaggcggcgcatctgctcccggccgccgacgtgctgcgccacttctcggtgacagccgagggcggcctgagcccggcgcaggtgaccggcgcgcgggagcgctacggccccaacgagctcccgagtgaggaagggaagtccctgtgggagctggtgctggaacagtttgaggacctcctggtgcgcatcctgctgctggctgcccttgtctcctttgtcctggcctggttcgaggagggcgaggagaccacgaccgccttcgtggagcccctggtcatcatgctgatcctcgtggccaacgccattgtgggcgtgtggcaggaacgcaacgccgagagtgccatcgaggccctgaaggagtatgagcctgagatgggcaaggtgatccgctcggaccgcaagggcgtgcagaggatccgtgcccgggacatcgtcccaggggacattgtagaagtggcagtgggggacaaagtgcctgctgacctccgcctcatcgagatcaagtccaccacgctgcgagtggaccagtccatcctgacgggtgaatctgtgtccgtgaccaagcacacagaggccatcccagaccccagagctgtgaaccaggacaagaagaacatgctgttttctggcaccaatatcacatcgggcaaagcggtgggtgtggccgtggccaccggcctgcacacggagctgggcaagatccggagccagatggcggcagtcgagcccgagcggacgccgctgcagcgcaagctggacgagtttggacggcagctgtcccacgccatctctgtgatctgcgtggccgtgtgggtcatcaacatcggccacttcgccgacccggcccacggtggctcctggctgcgtggcgctgtctactacttcaagatcgccgtggccctggcggtggcggccatccccgagggcctcccggctgtcatcactacatgcctggcactgggcacgcggcgcatggcacgcaagaacgccatcgtgcgaagcctgccgtccgtggagaccctgggctgcacctcagtcatctgctccgacaagacgggcacgctcaccaccaatcagatgtctgtctgccggatgttcgtggtagccgaggccgatgcgggctcctgccttttgcacgagttcaccatctcgggtaccacgtatacccccgagggcgaagtgcggcagggggatcagcctgtgcgctgcggccagttcgacgggctggtggagctggcgaccatctgcgccctgtgcaacgactcggctctggactacaacgaggccaagggtgtgtatgagaaggtgggagaggccacggagacagctctgacttgcctggtggagaagatgaacgtgttcgacaccgacctgcaggctctgtcccgggtggagcgagctggcgcctgtaacacggtcatcaagcagctgatgcggaaggagttcaccctggagttctcccgagaccggaaatccatgtccgtgtactgcacgcccacccgccctcaccctactggccagggcagcaagatgtttgtgaagggggctcctgagagtgtgatcgagcgctgtagctcagtccgcgtggggagccgcacagcacccctgacccccacctccagggagcagatcctggcaaagatccgggattggggctcaggctcagacacgctgcgctgcctggcactggccacccgggacgcgcccccaaggaaggaggacatggagctggacgactgcagcaagtttgtgcagtacgagacggacctgaccttcgtgggctgcgtaggcatgctggacccgccgcgacctgaggtggctgcctgcatcacacgctgctaccaggcgggcatccgcgtggtcatgatcacgggggataacaaaggcactgccgtggccatctgccgcaggcttggcatctttggggacacggaagacgtggcgggcaaggcctacacgggccgcgagtttgatgacctcagccccgagcagcagcgccaggcctgccgcaccgcccgctgcttcgcccgcgtggagcccgcacacaagtcccgcatcgtggagaacctgcagtcctttaacgagatcactgctatgactggcgatggagtgaacgacgcaccagccctgaagaaagcagagatcggcatcgccatgggctcaggcacggccgtggccaagtcggcggcagagatggtgctgtcagatgacaactttgcctccatcgtggctgcggtggaggagggccgggccatctacagcaacatgaagcaattcatccgctacctcatctcctccaatgttggcgaggtcgtctgcatcttcctcacggcaattctgggcctgcccgaagccctgatccctgtgcagctgctctgggtgaacctggtgacagacggcctacctgccacggctctgggcttcaacccgccagacctggacatcatggagaagctgccccggagcccccgagaagccctcatcagtggctggctcttcttccgatacctggctatcggagtgtacgtaggcctggccacagtggctgccgccacctggtggtttgtgtatgacgccgagggacctcacatcaacttctaccagctgaggaacttcctgaagtgctccgaagacaacccgctctttgccggcatcgactgtgaggtgttcgagtcacgcttccccaccaccatggccttgtccgtgctcgtgaccattgaaatgtgcaatgccctcaacagcgtctcggagaaccagtcgctgctgcggatgccgccctggatgaacccctggctgctggtggctgtggccatgtccatggccctgcacttcctcatcctgctcgtgccgcccctgcctctcattttccaggtgaccccactgagcgggcgccagtgggtggtggtgctccagatatctctgcctgtcatcctgctggatgaggccctcaagtacctgtcccggaaccacatgcacgcctgtctttatccaggccttctcaggacagtctcgcaggcctggagtaggcagccgctgaccacctcttggaccccagaccacaccgggttggcctctttgggccagggacacagcatcgtctcgctgtcagagctgctcagagagggaggaagcagggaagaaatgagccagaagtgagcgctgggaacagagtggagtctccggtgtgtacctcagactgatggtgcccatgtgttcgcctccgccccccacccttgccaccacactcgcccacttgcccaccgggtcccgccggataaatgacaggc

SEQ ID NO: 109746 - DNA, 4182 bp, Homo sapiens
  Payload ID: 1550
  Gene Symbol: ATP2A3
  Gene Name: ATPase, Ca++ transporting, ubiquitous
  Uniprot ID: Q93084
  ENST ID: ENST00000397035
  CDS Start-End: 129-3218
ggtcccagcacggacatggcctcgcgcggcgcccgcccgggcccgagtcccccgcgccccgctttgtagccccccggcggagaggcggcctcgacggtgcggacggcgcagacggccgggcgggcggcatggaggcggcgcatctgctcccggccgccgacgtgctgcgccacttctcggtgacagccgagggcggcctgagcccggcgcaggtgaccggcgcgcgggagcgctacggccccaacgagctcccgagtgaggaagggaagtccctgtgggagctggtgctggaacagtttgaggacctcctggtgcgcatcctgctgctggctgcccttgtctcctttgtcctggcctggttcgaggagggcgaggagaccacgaccgccttcgtggagcccctggtcatcatgctgatcctcgtggccaacgccattgtgggcgtgtggcaggaacgcaacgccgagagtgccatcgaggccctgaaggagtatgagcctgagatgggcaaggtgatccgctcggaccgcaagggcgtgcagaggatccgtgcccgggacatcgtcccaggggacattgtagaagtggcagtgggggacaaagtgcctgctgacctccgcctcatcgagatcaagtccaccacgctgcgagtggaccagtccatcctgacgggtgaatctgtgtccgtgaccaagcacacagaggccatcccagaccccagagctgtgaaccaggacaagaagaacatgctgttttctggcaccaatatcacatcgggcaaagcggtgggtgtggccgtggccaccggcctgcacacggagctgggcaagatccggagccagatggcggcagtcgagcccgagcggacgccgctgcagcgcaagctggacgagtttggacggcagctgtcccacgccatctctgtgatctgcgtggccgtgtgggtcatcaacatcggccacttcgccgacccggcccacggtggctcctggctgcgtggcgctgtctactacttcaagatcgccgtggccctggcggtggcggccatccccgagggcctcccggctgtcatcactacatgcctggcactgggcacgcggcgcatggcacgcaagaacgccatcgtgcgaagcctgccgtccgtggagaccctgggctgcacctcagtcatctgctccgacaagacgggcacgctcaccaccaatcagatgtctgtctgccggatgttcgtggtagccgaggccgatgcgggctcctgccttttgcacgagttcaccatctcgggtaccacgtatacccccgagggcgaagtgcggcagggggatcagcctgtgcgctgcggccagttcgacgggctggtggagctggcgaccatctgcgccctgtgcaacgactcggctctggactacaacgaggccaagggtgtgtatgagaaggtgggagaggccacggagacagctctgacttgcctggtggagaagatgaacgtgttcgacaccgacctgcaggctctgtcccgggtggagcgagctggcgcctgtaacacggtcatcaagcagctgatgcggaaggagttcaccctggagttctcccgagaccggaaatccatgtccgtgtactgcacgcccacccgccctcaccctactggccagggcagcaagatgtttgtgaagggggctcctgagagtgtgatcgagcgctgtagctcagtccgcgtggggagccgcacagcacccctgacccccacctccagggagcagatcctggcaaagatccgggattggggctcaggctcagacacgctgcgctgcctggcactggccacccgggacgcgcccccaaggaaggaggacatggagctggacgactgcagcaagtttgtgcagtacgagacggacctgaccttcgtgggctgcgtaggcatgctggacccgccgcgacctgaggtggctgcctgcatcacacgctgctaccaggcgggcatccgcgtggtcatgatcacgggggataacaaaggcactgccgtggccatctgccgcaggcttggcatctttggggacacggaagacgtggcgggcaaggcctacacgggccgcgagtttgatgacctcagccccgagcagcagcgccaggcctgccgcaccgcccgctgcttcgcccgcgtggagcccgcacacaagtcccgcatcgtggagaacctgcagtcctttaacgagatcactgctatgactggcgatggagtgaacgacgcaccagccctgaagaaagcagagatcggcatcgccatgggctcaggcacggccgtggccaagtcggcggcagagatggtgctgtcagatgacaactttgcctccatcgtggctgcggtggaggagggccgggccatctacagcaacatgaagcaattcatccgctacctcatctcctccaatgttggcgaggtcgtctgcatcttcctcacggcaattctgggcctgcccgaagccctgatccctgtgcagctgctctgggtgaacctggtgacagacggcctacctgccacggctctgggcttcaacccgccagacctggacatcatggagaagctgccccggagcccccgagaagccctcatcagtggctggctcttcttccgatacctggctatcggagtgtacgtaggcctggccacagtggctgccgccacctggtggtttgtgtatgacgccgagggacctcacatcaacttctaccagctgaggaacttcctgaagtgctccgaagacaacccgctctttgccggcatcgactgtgaggtgttcgagtcacgcttccccaccaccatggccttgtccgtgctcgtgaccattgaaatgtgcaatgccctcaacagcgtctcggagaaccagtcgctgctgcggatgccgccctggatgaacccctggctgctggtggctgtggccatgtccatggccctgcacttcctcatcctgctcgtgccgcccctgcctctcattttccaggtgaccccactgagcgggcgccagtgggtggtggtgctccagatatctctgcctgtcatcctgctggatgaggccctcaagtacctgtcccggaaccacatgcacgcctgtctttatccaggccttctcaggacagtctcgcaggcctggagtaggcagccgctgaccacctcttggaccccagaccacaccgggttggcctctttgaagaaatgagccagaagtgagcgctgggaacagagtggagtctccgggcccgggcgggtgaagggtcagagagacggacacaaggagccggcaggagggcggagcgaggatgtcctttcccgggagacaagtcgggaaagcctggctggactgcctcagccccgcgcgcctcctggactcagggttccccgtcctgagctcgggagatgttcagagtcacactgccgcccggtctgccacgcagaggtccaacttgccacccgcgtccctggtacctgagaccaccgacatcctcaggttcctgaccgtggcgcccttctacccagcccagtgtgcggccgccgcgctgtctgcacagctgggggcctctgagcctggtgggcttcctggactcttggcctcactccttgccccctccccacgacacccatgagccgaaaggatgtcactaaggatggctgattccccaagggcacccgctctccctccctccctgctggaggaacacgtcatatcagatgagaggaagatggcctctgatggacagaatttttctcttaactcagcttttgctactttggcaaaaactagcgaggggtagcagaaacctgcaccaaggattgtccctatgtcttggccactcctagagcgtgtgcagactgatgattttatatgtaaatcaagactcacatccctttcctagtcccccacatccaaagcccctcagcctgccttgcagaccaatgggctccatgttctgtagccccctcccctacgcctcacccctcctccctctcacaggttctgggcggccagtgagagaaacgcagtgggggaggcagggagtctggtgcctgcagagattctctgcttctttcctggggggaggtggggaggtcttagcaggagcgggccctgtacccacctgctgacctgctgtttggtagagaaataaaggttgtgtgactggggg

SEQ ID NO: 109747 - DNA, 4675 bp, Homo sapiens
  Payload ID: 1550
  Gene Symbol: ATP2A3
  Gene Name: ATPase, Ca++ transporting, ubiquitous
  Uniprot ID: Q93084
  ENST ID: ENST00000397041
  CDS Start-End: 129-3128
ggtcccagcacggacatggcctcgcgcggcgcccgcccgggcccgagtcccccgcgccccgctttgtagccccccggcggagaggcggcctcgacggtgcggacggcgcagacggccgggcgggcggcatggaggcggcgcatctgctcccggccgccgacgtgctgcgccacttctcggtgacagccgagggcggcctgagcccggcgcaggtgaccggcgcgcgggagcgctacggccccaacgagctcccgagtgaggaagggaagtccctgtgggagctggtgctggaacagtttgaggacctcctggtgcgcatcctgctgctggctgcccttgtctcctttgtcctggcctggttcgaggagggcgaggagaccacgaccgccttcgtggagcccctggtcatcatgctgatcctcgtggccaacgccattgtgggcgtgtggcaggaacgcaacgccgagagtgccatcgaggccctgaaggagtatgagcctgagatgggcaaggtgatccgctcggaccgcaagggcgtgcagaggatccgtgcccgggacatcgtcccaggggacattgtagaagtggcagtgggggacaaagtgcctgctgacctccgcctcatcgagatcaagtccaccacgctgcgagtggaccagtccatcctgacgggtgaatctgtgtccgtgaccaagcacacagaggccatcccagaccccagagctgtgaaccaggacaagaagaacatgctgttttctggcaccaatatcacatcgggcaaagcggtgggtgtggccgtggccaccggcctgcacacggagctgggcaagatccggagccagatggcggcagtcgagcccgagcggacgccgctgcagcgcaagctggacgagtttggacggcagctgtcccacgccatctctgtgatctgcgtggccgtgtgggtcatcaacatcggccacttcgccgacccggcccacggtggctcctggctgcgtggcgctgtctactacttcaagatcgccgtggccctggcggtggcggccatccccgagggcctcccggctgtcatcactacatgcctggcactgggcacgcggcgcatggcacgcaagaacgccatcgtgcgaagcctgccgtccgtggagaccctgggctgcacctcagtcatctgctccgacaagacgggcacgctcaccaccaatcagatgtctgtctgccggatgttcgtggtagccgaggccgatgcgggctcctgccttttgcacgagttcaccatctcgggtaccacgtatacccccgagggcgaagtgcggcagggggatcagcctgtgcgctgcggccagttcgacgggctggtggagctggcgaccatctgcgccctgtgcaacgactcggctctggactacaacgaggccaagggtgtgtatgagaaggtgggagaggccacggagacagctctgacttgcctggtggagaagatgaacgtgttcgacaccgacctgcaggctctgtcccgggtggagcgagctggcgcctgtaacacggtcatcaagcagctgatgcggaaggagttcaccctggagttctcccgagaccggaaatccatgtccgtgtactgcacgcccacccgccctcaccctactggccagggcagcaagatgtttgtgaagggggctcctgagagtgtgatcgagcgctgtagctcagtccgcgtggggagccgcacagcacccctgacccccacctccagggagcagatcctggcaaagatccgggattggggctcaggctcagacacgctgcgctgcctggcactggccacccgggacgcgcccccaaggaaggaggacatggagctggacgactgcagcaagtttgtgcagtacgagacggacctgaccttcgtgggctgcgtaggcatgctggacccgccgcgacctgaggtggctgcctgcatcacacgctgctaccaggcgggcatccgcgtggtcatgatcacgggggataacaaaggcactgccgtggccatctgccgcaggcttggcatctttggggacacggaagacgtggcgggcaaggcctacacgggccgcgagtttgatgacctcagccccgagcagcagcgccaggcctgccgcaccgcccgctgcttcgcccgcgtggagcccgcacacaagtcccgcatcgtggagaacctgcagtcctttaacgagatcactgctatgactggcgatggagtgaacgacgcaccagccctgaagaaagcagagatcggcatcgccatgggctcaggcacggccgtggccaagtcggcggcagagatggtgctgtcagatgacaactttgcctccatcgtggctgcggtggaggagggccgggccatctacagcaacatgaagcaattcatccgctacctcatctcctccaatgttggcgaggtcgtctgcatcttcctcacggcaattctgggcctgcccgaagccctgatccctgtgcagctgctctgggtgaacctggtgacagacggcctacctgccacggctctgggcttcaacccgccagacctggacatcatggagaagctgccccggagcccccgagaagccctcatcagtggctggctcttcttccgatacctggctatcggagtgtacgtaggcctggccacagtggctgccgccacctggtggtttgtgtatgacgccgagggacctcacatcaacttctaccagctgaggaacttcctgaagtgctccgaagacaacccgctctttgccggcatcgactgtgaggtgttcgagtcacgcttccccaccaccatggccttgtccgtgctcgtgaccattgaaatgtgcaatgccctcaacagcgtctcggagaaccagtcgctgctgcggatgccgccctggatgaacccctggctgctggtggctgtggccatgtccatggccctgcacttcctcatcctgctcgtgccgcccctgcctctcattttccaggtgaccccactgagcgggcgccagtgggtggtggtgctccagatatctctgcctgtcatcctgctggatgaggccctcaagtacctgtcccggaaccacatgcacgaagaaatgagccagaagtgagcgctgggaacagagtggagtctccggtgtgtacctcagactgatggtgcccatgtgttcgcctccgccccccacccttgccaccacactcgcccacttgcccaccgggtcccgccggataaatgacaggcccgaggtcagaatggccatccccgggccccgtcctggggtctctgtccccacttccttctggcctgggaggtctgtaattcctgtctcctggactctcctgggaagttccctgctctgcagctctggcccaggagctgcaggctgggagggggcagccaagaagccggagctggcagcatacccagagatccggggcccccccacccccaaatcacgagtgcagctggagcttgctcccccttgttcggaagctggacgttcacttggtgactggtgcctctgcactgacggaggactctgggggtccttcttaccggctctgacctctctcttcgtgcctggtctgggactgggtcagccctgggggatcagaaggggccatctgggcccagctgtgtacagcgagggtgggcagccccctccactccactctgcttccacaaagtcggctcccgagagctcgaggctgcttctgtttatatgtgcagggcccgggcgggtgaagggtcagagagacggacacaaggagccggcaggagggcggagcgaggatgtcctttcccgggagacaagtcgggaaagcctggctggactgcctcagccccgcgcgcctcctggactcagggttccccgtcctgagctcgggagatgttcagagtcacactgccgcccggtctgccacgcagaggtccaacttgccacccgcgtccctggtacctgagaccaccgacatcctcaggttcctgaccgtggcgcccttctacccagcccagtgtgcggccgccgcgctgtctgcacagctgggggcctctgagcctggtgggcttcctggactcttggcctcactccttgccccctccccacgacacccatgagccgaaaggatgtcactaaggatggctgattccccaagggcacccgctctccctccctccctgctggaggaacacgtcatatcagatgagaggaagatggcctctgatggacagaatttttctcttaactcagcttttgctactttggcaaaaactagcgaggggtagcagaaacctgcaccaaggattgtccctatgtcttggccactcctagagcgtgtgcagactgatgattttatatgtaaatcaagactcacatccctttcctagtcccccacatccaaagcccctcagcctgccttgcagaccaatgggctccatgttctgtagccccctcccctacgcctcacccctcctccctctcacaggttctgggcggccagtgagagaaacgcagtgggggaggcagggagtctggtgcctgcagagattctctgcttctttcctggggggaggtggggaggtcttagcaggagcgggccctgtacccacctgctgacctgctgtttggtagagaaataaaggttgtgtgactggggg

SEQ ID NO: 109748 - DNA, 3197 bp, Homo sapiens
  Payload ID: 1550
  Gene Symbol: ATP2A3
  Gene Name: ATPase, Ca++ transporting, ubiquitous
  Uniprot ID: Q93084
  ENST ID: ENST00000397043
  CDS Start-End: 125-3121
ccagcacggacatggcctcgcgcggcgcccgcccgggcccgagtcccccgcgccccgctttgtagccccccggcggagaggcggcctcgacggtgcggacggcgcagacggccgggcgggcggcatggaggcggcgcatctgctcccggccgccgacgtgctgcgccacttctcggtgacagccgagggcggcctgagcccggcgcaggtgaccggcgcgcgggagcgctacggccccaacgagctcccgagtgaggaagggaagtccctgtgggagctggtgctggaacagtttgaggacctcctggtgcgcatcctgctgctggctgcccttgtctcctttgtcctggcctggttcgaggagggcgaggagaccacgaccgccttcgtggagcccctggtcatcatgctgatcctcgtggccaacgccattgtgggcgtgtggcaggaacgcaacgccgagagtgccatcgaggccctgaaggagtatgagcctgagatgggcaaggtgatccgctcggaccgcaagggcgtgcagaggatccgtgcccgggacatcgtcccaggggacattgtagaagtggcagtgggggacaaagtgcctgctgacctccgcctcatcgagatcaagtccaccacgctgcgagtggaccagtccatcctgacgggtgaatctgtgtccgtgaccaagcacacagaggccatcccagaccccagagctgtgaaccaggacaagaagaacatgctgttttctggcaccaatatcacatcgggcaaagcggtgggtgtggccgtggccaccggcctgcacacggagctgggcaagatccggagccagatggcggcagtcgagcccgagcggacgccgctgcagcgcaagctggacgagtttggacggcagctgtcccacgccatctctgtgatctgcgtggccgtgtgggtcatcaacatcggccacttcgccgacccggcccacggtggctcctggctgcgtggcgctgtctactacttcaagatcgccgtggccctggcggtggcggccatccccgagggcctcccggctgtcatcactacatgcctggcactgggcacgcggcgcatggcacgcaagaacgccatcgtgcgaagcctgccgtccgtggagaccctgggctgcacctcagtcatctgctccgacaagacgggcacgctcaccaccaatcagatgtctgtctgccggatgttcgtggtagccgaggccgatgcgggctcctgccttttgcacgagttcaccatctcgggtaccacgtatacccccgagggcgaagtgcggcagggggatcagcctgtgcgctgcggccagttcgacgggctggtggagctggcgaccatctgcgccctgtgcaacgactcggctctggactacaacgaggccaagggtgtgtatgagaaggtgggagaggccacggagacagctctgacttgcctggtggagaagatgaacgtgttcgacaccgacctgcaggctctgtcccgggtggagcgagctggcgcctgtaacacggtcatcaagcagctgatgcggaaggagttcaccctggagttctcccgagaccggaaatccatgtccgtgtactgcacgcccacccgccctcaccctactggccagggcagcaagatgtttgtgaagggggctcctgagagtgtgatcgagcgctgtagctcagtccgcgtggggagccgcacagcacccctgacccccacctccagggagcagatcctggcaaagatccgggattggggctcaggctcagacacgctgcgctgcctggcactggccacccgggacgcgcccccaaggaaggaggacatggagctggacgactgcagcaagtttgtgcagtacgagacggacctgaccttcgtgggctgcgtaggcatgctggacccgccgcgacctgaggtggctgcctgcatcacacgctgctaccaggcgggcatccgcgtggtcatgatcacgggggataacaaaggcactgccgtggccatctgccgcaggcttggcatctttggggacacggaagacgtggcgggcaaggcctacacgggccgcgagtttgatgacctcagccccgagcagcagcgccaggcctgccgcaccgcccgctgcttcgcccgcgtggagcccgcacacaagtcccgcatcgtggagaacctgcagtcctttaacgagatcactgctatgactggcgatggagtgaacgacgcaccagccctgaagaaagcagagatcggcatcgccatgggctcaggcacggccgtggccaagtcggcggcagagatggtgctgtcagatgacaactttgcctccatcgtggctgcggtggaggagggccgggccatctacagcaacatgaagcaattcatccgctacctcatctcctccaatgttggcgaggtcgtctgcatcttcctcacggcaattctgggcctgcccgaagccctgatccctgtgcagctgctctgggtgaacctggtgacagacggcctacctgccacggctctgggcttcaacccgccagacctggacatcatggagaagctgccccggagcccccgagaagccctcatcagtggctggctcttcttccgatacctggctatcggagtgtacgtaggcctggccacagtggctgccgccacctggtggtttgtgtatgacgccgagggacctcacatcaacttctaccagctgaggaacttcctgaagtgctccgaagacaacccgctctttgccggcatcgactgtgaggtgttcgagtcacgcttccccaccaccatggccttgtccgtgctcgtgaccattgaaatgtgcaatgccctcaacagcgtctcggagaaccagtcgctgctgcggatgccgccctggatgaacccctggctgctggtggctgtggccatgtccatggccctgcacttcctcatcctgctcgtgccgcccctgcctctcattttccaggtgaccccactgagcgggcgccagtgggtggtggtgctccagatatctctgcctgtcatcctgctggatgaggccctcaagtacctgtcccggaaccacatgcacgaaatgagccagaagtgagcgctgggaacagagtggagtctccggtgtgtacctcagactgatggtgcccatgtgttcgcctccgccccccacc

SEQ ID NO: 109749 - DNA, 429 bp, Homo sapiens
  Payload ID: 1550
  Gene Symbol: ATP2A3
  Gene Name: ATPase, Ca++ transporting, ubiquitous
  ENST ID: ENST00000572116
  CDS Start-End: 1-429
gagtcacgcttccccaccaccatggccttgtccgtgctcgtgaccattgaaatgtgcaatgccctcaacagcgtctcggagaaccagtcgctgctgcggatgccgccctggatgaacccctggctgctggtggctgtggccatgtccatggccctgcacttcctcatcctgctcgtgccgcccctgcctctcattttccaggtgaccccactgagcgggcgccagtgggtggtggtgctccagatatctctgcctgtcatcctgctggatgaggccctcaagtacctgtcccggaaccacatgcacgggccagggacacagcatcgtctcgctgtcagagctgctcagagagggaggaagcagggaagaaatgagccagaagtgagcgctgggaacagagtggagtctccggtgtgtacctcagactga

SEQ ID NO: 109750 - DNA, 604 bp, Homo sapiens
  Payload ID: 1550
  Gene Symbol: ATP2A3
  Gene Name: ATPase, Ca++ transporting, ubiquitous
  ENST ID: ENST00000570845
  CDS Start-End: 1-462
gagtcacgcttccccaccaccatggccttgtccgtgctcgtgaccattgaaatgtgcaatgccctcaacagcgtctcggagaaccagtcgctgctgcggatgccgccctggatgaacccctggctgctggtggctgtggccatgtccatggccctgcacttcctcatcctgctcgtgccgcccctgcctctcattttccaggtgaccccactgagcgggcgccagtgggtggtggtgctccagatatctctgcctgtcatcctgctggatgaggccctcaagtacctgtcccggaaccacatgcacgcctgtctttatccaggccttctcaggacagtctcgcaggcctggagtaggcagccgctgaccacctcttggaccccagaccacaccggggccagggacacagcatcgtctcgctgtcagagctgctcagagagggaggaagcagggaagaaatgagccagaagtgagcgctgggaacagagtggagtctccggtgtgtacctcagactgatggtgcccatgtgttcgcctccgccccccacccttgccaccacactcgcccacttgcccaccgggtcccgccggataaatgacaggc

SEQ ID NO: 109751 - DNA, 5676 bp, Homo sapiens
  Payload ID: 1551
  Gene Symbol: ATP8B4
  Gene Name: ATPase, class I, type 8B, member 4
  Uniprot ID: Q8TF62
  ENST ID: ENST00000284509
  CDS Start-End: 143-3721
gcttttctccttggcatggtcacggaatggatacctgtttgatcttcctgcactgctgagaaatcttccttttgggggagaggattaagtctgggttgaggtaggccacctgttgagacctggtgaaagatcaggtataataatgttctgcagtgaaaagaaattgcgtgaagtggaacggatagtgaaagccaatgaccgtgaatataatgaaaagttccagtatgcggataatcgtatccacacatcgaaatataatattctcaccttcttgccaattaatttatttgaacagttccaaagagtggcaaatgcctattttctttgccttctgattttacagctaattccagaaatttcctccttgacctggtttaccaccattgtgcctttggtcctggtgataactatgacagctgtcaaagatgccacagatgactattttcgccacaagagtgataatcaagtgaataatcggcagtctgaagtgctcatcaacagcaaactgcagaatgaaaaatggatgaatgtcaaagtgggagacatcattaaattagaaaataaccaatttgttgctgctgatttacttctcctatcaagtagtgagccacatggtctctgttatgttgaaactgctgagcttgatggggaaacgaacctaaaagtccgccatgcactatcagttacttcagaacttggagcagatatcagcagacttgcagggtttgatgggattgttgtctgtgaggtgcctaacaacaagttagataaattcatgggaatcctttcttggaaagacagcaagcattccctcaacaatgagaagataatcctgagaggctgcatcctgagaaataccagctggtgttttggaatggttatttttgcaggtcctgacactaaactaatgcagaatagtggtaagacaaagtttaaaaggacaagcattgatagattgatgaatactctagtactatggatttttgggtttctgatatgcttgggaattattcttgcaataggaaattcaatctgggagagtcaaactggggaccaattcagaactttcctcttttggaatgaaggagagaagagctctgtgttctccggattcttaacattctggtcatatattattattctcaatacagttgtacccatttccttatatgtgagtgtggaagtaattcgtctaggacacagttattttataaactgggaccggaagatgtattattctcgaaaagcaatacctgcagtggctcgaacgaccacgctcaatgaggaactggggcagattgagtacattttctccgacaaaacgggtaccctcactcaaaacatcatgacctttaaaagatgttccattaatgggagaatctatggtgaagtacatgatgacctggatcagaagacagaaataactcaggaaaaagagcctgtggatttctcagtcaaatctcaagcggatagagaatttcagttctttgaccaccatctgatggaatccattaaaatgggtgatcccaaagttcatgaattccttaggttacttgctctctgccacactgtaatgtcagaagagaatagcgcaggagagctgatttaccaagttcagtcacctgatgaaggggctctagtgactgccgctagaaattttgggttcatttttaaatcccggaccccagagaccataacaatagaagaattgggaacactagttacttatcaattacttgcctttttggatttcaacaacaccagaaaaaggatgtctgtcatagttcgaaacccagaaggacagataaagctttattccaaaggagcagatactattctgtttgaaaaacttcatccttccaatgaagtccttttgtctttgacgtcagaccacctcagtgaatttgcaggggaaggccttcggaccttggccatcgcatacagagacctggatgacaagtactttaaagagtggcataagatgcttgaagatgcgaatgctgccacagaagagagggatgaacgaatagctgggctatatgaagaaattgaaagagatttgatgctactaggtgccactgctgtagaagataagttacaggagggtgttattgaaacagttacaagtttatcactagccaatattaagatctgggtcctaacaggagacaaacaagaaactgccatcaacatcggttatgcctgcaacatgctgactgacgacatgaatgatgtgtttgtgatagcagggaataatgctgtggaagtgagagaagaactcaggaaagcaaaacaaaatttgtttggacaaaacagaaatttttccaatggccatgtagtttgtgaaaaaaagcagcagctggagttggattctattgtagaagaaaccataacaggagattatgccttaatcataaatggccacagtttggctcatgccctagaaagtgatgtcaagaatgatctcctagaacttgcttgcatgtgtaagactgtaatttgctgcagggtcactccactccagaaagcccaagtggtagagctggtgaagaagtacagaaatgctgttactttggccattggtgatggagccaatgatgtcagcatgattaaaagtgctcacattggtgttggcatcagcggccaggaaggattgcaagcagtcttagccagcgactattcatttgcacagtttagatatctccaaaggcttctccttgttcatggaaggtggtcttatttccgaatgtgcaaattcttatgctatttcttctataagaattttgcatttacacttgtgcatttctggtttggtttcttctgtggtttctcagcccagactgtttatgaccagtggttcatcaccctttttaacattgtttacacatcactgcctgttttagccatggggatttttgaccaggatgtgagtgaccagaacagcgtggactgtccccagctctacaaaccaggacagctgaatctgctttttaacaagcgtaaatttttcatttgcgtgttgcatggaatctacacctcattagtccttttcttcatcccctatggggccttttacaacgtggctggagaagatgggcaacatattgctgactaccagtcctttgcagttaccatggccacatctttggtcattgtggtcagtgtgcagatagccttggataccagttactggactttcattaatcacgtcttcatctgggggagcattgccatttatttctccattttatttacaatgcacagtaatggcatctttggcatcttcccaaaccagtttccatttgttggtaatgcacgacattccctgacccagaagtgcatctggcttgtaattctcttaacaacagtggcttcagttatgccagtggtggcattcagatttttgaaggtggatttatacccaaccctgagtgatcagatccgccggtggcagaaggctcaaaagaaggcaaggcctccaagtagccgaaggcctcggacccgcaggtcaagctcaagaaggtctggatatgcttttgctcaccaagaaggctatggagagcttatcacatctggaaaaaatatgcgagctaaaaatccacccccaacatcagggctggaaaagacacattataatagcactagctggattgaaaatttatgtaagaaaaccacagacaccgtgagcagctttagccaggataaaacagtgaaactgtgagtcaatatgaatttaaaccacgtagttatcttttcacttcaggtggagctgaaattctgctggctccagagtttgagatttgaggcaagaggtggggcaggcagattgcctcacttaacttaaatctgcggcagacaactgccagtgcccatcaaacaggagtgtgcgctatggaaaaccaggccagagggtcactgtctggtttgtgatttggtggacaaaacactcgctgttacaagtacagattttttttttttttaaatcaacctagataccaattgacctgaactttagaatcttatttatggagaaaaacttgtaaagctgcatattcactgaatggatcctcaggcggataaaagggtgcattttaaaggtatatatccaagctgaaaagcatgcctattgacagataaacatgtatctgtaagatcagcctttcccaaggtatacttttaaaatttaaagcgtgtactgtgttgctttcagactgagttgcatgtcactctttagtcttgatatctacctgtctgttcagccaggacaacaaatggcttccaagcctgaagaatacaaaagtgtgcttgtgtttctcatttttataccagtctagggacaaaggagactgaacatctttgcagcaggataggctggtaatttgatcaaatttattcaaaaagctctcagtctgtgtcatgtaaggacatgcttatgaaatgtgagagaggctcgccactaagtattctaaatacttttcaatggcttttctaacaacctcagtagtaatttgctgagcatcatccagaccattaatagaatcagcaaagcactggaatttcacactttaatgataatattccacatagtctatgggcaaatattttcaacatttccaatttttaaagcttcagaattgaagccaaacaaattaataaataattgttttaattactatttaaaaactcaggtttagattgtttaaaattagttgcttttgatactcagctgtcatgtttataattcaaacatgtagtaaacatatgtaggtaaggttgtttttttggagatgttgcagctcaaatttcagtccacatatgaatcatcagtgtattttccataaagtgattcgggcatatttgtgtgaaaacctcagttctgtcacttcttacctctataaacttggacgataatgtgccttctctgagactcagtttcttcctctgtaaaatgaggacatactacctacctcatgtggttggttgatgattgtctgtcaaagcacaaactctgaaattattaaaaacataattatttcataaacagatgagttaagttccagttaactcaacatcagtataacagagcaattggaagagaatatgaaaaaactggaatctaaatagtcagtgaggaaggctttgataaaatgaaattgccagaaagatataaaactggttagggtcctacagggaaataaaattataaccgtggaggtacatttctctaccagaaagcaaaaataaagcatcatgtcttaatggttttctacaaatcaacttctaattctacagagtccttaatctggtccctattaaattcttggtcagacaaagttacatttcccaagagagtcaggtgacacttgagtgagtttgatggataatgagctaatgtgatatctataggtcacaattttttaaaaccaaaattttcaagtctgggataatctttcctaaatgggatcaaatgaaataatatgtgtaaaagagtcaaatgcagtcctttaccatagtaactgcctatggacgttgtctttcccttacatgcctgcctacacttaaccagatgttggttttcaatgtctaatttgtcattagtttcaccacatttgctcactttttgtaacatttttgcaagatttgaaaactttcagtaaatgttttggcactattggt

SEQ ID NO: 109752 - DNA, 4179 bp, Homo sapiens
  Payload ID: 1551
  Gene Symbol: ATP8B4
  Gene Name: ATPase, class I, type 8B, member 4
  ENST ID: ENST00000558906
  CDS Start-End: 147-515
ccttgcttttctccttggcatggtcacggaatggatacctgtttgatcttcctgcactgctgagaaatcttccttttgggggagaggattaagtctgggttgaggtaggccacctgttgagacctggtgaaagatcaggtataataatgttctgcagtgaaaagaaattgcgtgaagtggaacggatagtgaaagccaatgaccgtgaatataatgaaaagttccagtatgcggataatcgtatccacacatcgaaatataatattctcaccttcttgccaattaatttatttgaacagttccaaagagtggcaaatgcctattttctttgccttctgattttacagctaattccagaaatttcctccttgacctggtttaccaccattgtgcctttggtcctggtgataactatgacagctgtcaaagatgccacagatgactattttcgccacaagagtgataatcaagtgaataatcggcagtctgaagtgctcatcaacagcaagtgctgaaggtacaaagctgagggtttaatgacaggaagtactctggtaattgtaaggaagaagatttatcctggtcctgagaaaaatactgcagaatgaaaaatggatgaatgtcaaagtgggagacatcattaaattagaaaataaccaatttgttgctgctgatttacttctcctatcaagtagtgagccacatggtctctgttatgttgaaactgctgagcttgatggggaaacgaacctaaaagtccgccatgcactatcagttacttcagaacttggagcagatatcagcagacttgcagggtttgatgggattgttgtctgtgaggtgcctaacaacaagttagataaattcatgggaatcctttcttggaaagacagcaagcattccctcaacaatgagaagataatcctgagaggctgcatcctgagaaataccagctggtgttttggaatggttatttttgcaggtcctgacactaaactaatgcagaatagtggtaagacaaagtttaaaaggacaagcattgatagattgatgaatactctagtactatggatttttgggtttctgatatgcttgggaattattcttgcaataggaaattcaatctgggagagtcaaactggggaccaattcagaactttcctcttttggaatgaaggagagaagagctctgtgttctccggattcttaacattctggtcatatattattattctcaatacagttgtacccatttccttatatgtgagtgtggaagtaattcgtctaggacacagttattttataaactgggaccggaagatgtattattctcgaaaagcaatacctgcagtggctcgaacgaccacgctcaatgaggaactggggcagattgagtacattttctccgacaaaacgggtaccctcactcaaaacatcatgacctttaaaagatgttccattaatgggagaatctatggtgaagtacatgatgacctggatcagaagacagaaataactcaggaaaaagagcctgtggatttctcagtcaaatctcaagcggatagagaatttcagttctttgaccaccatctgatggaatccattaaaatgggtgatcccaaagttcatgaattccttaggttacttgctctctgccacactgtaatgtcagaagagaatagcgcagttcgaaacccagaaggacagataaagctttattccaaaggagcagatactattctgtttgaaaaacttcatccttccaatgaagtccttttgtctttgacgtcagaccacctcagtgaatttgcaggggaaggccttcggaccttggccatcgcatacagagacctggatgacaagtactttaaagagtggcataagatgcttgaagatgcgaatgctgccacagaagagagggatgaacgaatagctgggctatatgaagaaattgaaagagatttgatgctactaggtgccactgctgtagaagataagttacaggagggtgttattgaaacagttacaagtttatcactagccaatattaagatctgggtcctaacaggagacaaacaagaaactgccatcaacatcggttatgcctgcaacatgctgactgacgacatgaatgatgtgtttgtgatagcagggaataatgctgtggaagtgagagaagaactcaggaaagcaaaacaaaatttgtttggacaaaacagaaatttttccaatggccatgtagtttgtgaaaaaaagcagcagctggagttggattctattgtagaagaaaccataacaggagattatgccttaatcataaatggccacagtttggctcatgccctagaaagtgatgtcaagaatgatctcctagaacttgcttgcatgtgtaagactgtaatttgctgcagggtcactccactccagaaagcccaagtggtagagctggtgaagaagtacagaaatgctgttactttggccattggtgatggagccaatgatgtcagcatgattaaaagtgctcacattggtgttggcatcagcggccaggaaggattgcaagcagtcttagccagcgactattcatttgcacagtttagatatctccaaaggcttctccttgttcatggaaggtggtcttatttccgaatgtgcaaattcttatgctatttcttctataagaattttgcatttacacttgtgcatttctggtttggtttcttctgtggtttctcagcccagactgtttatgaccagtggttcatcaccctttttaacattgtttacacatcactgcctgttttagccatggggatttttgaccaggatgtgagtgaccagaacagcgtggactgtccccagctctacaaaccaggacagctgaatctgctttttaacaagcgtaaatttttcatttgcgtgttgcatggaatctacacctcattagtccttttcttcatcccctatggggccttttacaacgtggctggagaagatgggcaacatattgctgactaccagtcctttgcagttaccatggccacatctttggtcattgtggtcagtgtgcagatagccttggataccagttactggactttcattaatcacgtcttcatctgggggagcattgccatttatttctccattttatttacaatgcacagtaatggcatctttggcatcttcccaaaccagtttccatttgttggtaatgcacgacattccctgacccagaagtgcatctggcttgtaattctcttaacaacagtggcttcagttatgccagtggtggcattcagatttttgaaggtggatttatacccaaccctgagtgatcagatccgccggtggcagaaggctcaaaagaaggcaaggcctccaagtagccgaaggcctcggacccgcaggtcaagctcaagaaggtctggatatgcttttgctcaccaagaaggctatggagagcttatcacatctggaaaaaatatgcgagctaaaaatccacccccaacatcagggctggaaaagacacattataatagcactagctggattgaaaatttatgtaagaaaaccacagacaccgtgagcagctttagccaggataaaacagtgaaactgtgagtcaatatgaatttaaaccacgtagttatcttttcacttcaggtggagctgaaattctgctggctccagagtttgagatttgaggcaagaggtggggcaggcagattgcctcacttaacttaaatctgcggcagacaactgccagtgcccatcaaacaggagtgtgcgctatggaaaaccaggccagagggtcactgtctggtttgtgatttggtggacaaaacactcgctgttacaagtacagattttttttttttttaaatcaacctagataccaattgacctgaactttagaatcttatttatggagaaaaacttgtaaagctgcatattcactgaatggatcctcaggcggataaaagggtgcattttaaaggtatatatccaagctgaaaagcatgcctattgacagataaacatgtatctgtaagatcagcctttcccaaggtatacttttaaaatttaaagcgtgtactgtgttgctttcagactgagttgcatgtcactctttagtcttgatatctacctgtctgttcagccaggacaacaaatggc

SEQ ID NO: 109753 - DNA, 676 bp, Homo sapiens
  Payload ID: 1551
  Gene Symbol: ATP8B4
  Gene Name: ATPase, class I, type 8B, member 4
  ENST ID: ENST00000558024
  CDS Start-End: 1-286
ggcaaatgcctattttctttgccttctgattttacagctaattccagaaatttcctccttgacctggtttaccaccattgtgcctttggtcctggtgataactatgacagctgtcaaagatgccacagatgactattttcgccacaagagtgataatcaagtgaataatcggcagtctgaagtgctcatcaacagcaaactgcagaatgaaaaatggatgaatgtcaaagtgggagacatcattaaattagaaaataaccaatttgttgctctcattaaagattaggaataataccctggaaggtggtgtctgttagaacatactctgtgcgtggaatcaaggtagctccagtgtaagggcactagatggggaactgggagagaactgagactttgcttcattctttcagtgacagtaaagactttatcttctttgtctttggtttgtccatgtgtcaaataagatgctagaccactacaggatctcaaaaatccgttccatgctgtgattctcttctaagctgacactagactatacgattcttgcaggcaaagcacctattgatttgcctgttctccaacacttggtgccatgttccatcaacaggggcatttggtaaatgttagctgaataattaagtgttgatctttgtaagaaagaagacaggaaaaaaaa

SEQ ID NO: 109754 - DNA, 4894 bp, Homo sapiens
  Payload ID: 1551
  Gene Symbol: ATP8B4
  Gene Name: ATPase, class I, type 8B, member 4
  Uniprot ID: Q8TF62
  ENST ID: ENST00000559829
  CDS Start-End: 122-3700
aaaatgagaaagagaccagcaagagcagactaggaaaggaagagaagggaaggagaaaaggaaactagaatgcatttctgtaggccacctgttgagacctggtgaaagatcaggtataataatgttctgcagtgaaaagaaattgcgtgaagtggaacggatagtgaaagccaatgaccgtgaatataatgaaaagttccagtatgcggataatcgtatccacacatcgaaatataatattctcaccttcttgccaattaatttatttgaacagttccaaagagtggcaaatgcctattttctttgccttctgattttacagctaattccagaaatttcctccttgacctggtttaccaccattgtgcctttggtcctggtgataactatgacagctgtcaaagatgccacagatgactattttcgccacaagagtgataatcaagtgaataatcggcagtctgaagtgctcatcaacagcaaactgcagaatgaaaaatggatgaatgtcaaagtgggagacatcattaaattagaaaataaccaatttgttgctgctgatttacttctcctatcaagtagtgagccacatggtctctgttatgttgaaactgctgagcttgatggggaaacgaacctaaaagtccgccatgcactatcagttacttcagaacttggagcagatatcagcagacttgcagggtttgatgggattgttgtctgtgaggtgcctaacaacaagttagataaattcatgggaatcctttcttggaaagacagcaagcattccctcaacaatgagaagataatcctgagaggctgcatcctgagaaataccagctggtgttttggaatggttatttttgcaggtcctgacactaaactaatgcagaatagtggtaagacaaagtttaaaaggacaagcattgatagattgatgaatactctagtactatggatttttgggtttctgatatgcttgggaattattcttgcaataggaaattcaatctgggagagtcaaactggggaccaattcagaactttcctcttttggaatgaaggagagaagagctctgtgttctccggattcttaacattctggtcatatattattattctcaatacagttgtacccatttccttatatgtgagtgtggaagtaattcgtctaggacacagttattttataaactgggaccggaagatgtattattctcgaaaagcaatacctgcagtggctcgaacgaccacgctcaatgaggaactggggcagattgagtacattttctccgacaaaacgggtaccctcactcaaaacatcatgacctttaaaagatgttccattaatgggagaatctatggtgaagtacatgatgacctggatcagaagacagaaataactcaggaaaaagagcctgtggatttctcagtcaaatctcaagcggatagagaatttcagttctttgaccaccatctgatggaatccattaaaatgggtgatcccaaagttcatgaattccttaggttacttgctctctgccacactgtaatgtcagaagagaatagcgcaggagagctgatttaccaagttcagtcacctgatgaaggggctctagtgactgccgctagaaattttgggttcatttttaaatcccggaccccagagaccataacaatagaagaattgggaacactagttacttatcaattacttgcctttttggatttcaacaacaccagaaaaaggatgtctgtcatagttcgaaacccagaaggacagataaagctttattccaaaggagcagatactattctgtttgaaaaacttcatccttccaatgaagtccttttgtctttgacgtcagaccacctcagtgaatttgcaggggaaggccttcggaccttggccatcgcatacagagacctggatgacaagtactttaaagagtggcataagatgcttgaagatgcgaatgctgccacagaagagagggatgaacgaatagctgggctatatgaagaaattgaaagagatttgatgctactaggtgccactgctgtagaagataagttacaggagggtgttattgaaacagttacaagtttatcactagccaatattaagatctgggtcctaacaggagacaaacaagaaactgccatcaacatcggttatgcctgcaacatgctgactgacgacatgaatgatgtgtttgtgatagcagggaataatgctgtggaagtgagagaagaactcaggaaagcaaaacaaaatttgtttggacaaaacagaaatttttccaatggccatgtagtttgtgaaaaaaagcagcagctggagttggattctattgtagaagaaaccataacaggagattatgccttaatcataaatggccacagtttggctcatgccctagaaagtgatgtcaagaatgatctcctagaacttgcttgcatgtgtaagactgtaatttgctgcagggtcactccactccagaaagcccaagtggtagagctggtgaagaagtacagaaatgctgttactttggccattggtgatggagccaatgatgtcagcatgattaaaagtgctcacattggtgttggcatcagcggccaggaaggattgcaagcagtcttagccagcgactattcatttgcacagtttagatatctccaaaggcttctccttgttcatggaaggtggtcttatttccgaatgtgcaaattcttatgctatttcttctataagaattttgcatttacacttgtgcatttctggtttggtttcttctgtggtttctcagcccagactgtttatgaccagtggttcatcaccctttttaacattgtttacacatcactgcctgttttagccatggggatttttgaccaggatgtgagtgaccagaacagcgtggactgtccccagctctacaaaccaggacagctgaatctgctttttaacaagcgtaaatttttcatttgcgtgttgcatggaatctacacctcattagtccttttcttcatcccctatggggccttttacaacgtggctggagaagatgggcaacatattgctgactaccagtcctttgcagttaccatggccacatctttggtcattgtggtcagtgtgcagatagccttggataccagttactggactttcattaatcacgtcttcatctgggggagcattgccatttatttctccattttatttacaatgcacagtaatggcatctttggcatcttcccaaaccagtttccatttgttggtaatgcacgacattccctgacccagaagtgcatctggcttgtaattctcttaacaacagtggcttcagttatgccagtggtggcattcagatttttgaaggtggatttatacccaaccctgagtgatcagatccgccggtggcagaaggctcaaaagaaggcaaggcctccaagtagccgaaggcctcggacccgcaggtcaagctcaagaaggtctggatatgcttttgctcaccaagaaggctatggagagcttatcacatctggaaaaaatatgcgagctaaaaatccacccccaacatcagggctggaaaagacacattataatagcactagctggattgaaaatttatgtaagaaaaccacagacaccgtgagcagctttagccaggataaaacagtgaaactgtgagtcaatatgaatttaaaccacgtagttatcttttcacttcaggtggagctgaaattctgctggctccagagtttgagatttgaggcaagaggtggggcaggcagattgcctcacttaacttaaatctgcggcagacaactgccagtgcccatcaaacaggagtgtgcgctatggaaaaccaggccagagggtcactgtctggtttgtgatttggtggacaaaacactcgctgttacaagtacagattttttttttttttaaatcaacctagataccaattgacctgaactttagaatcttatttatggagaaaaacttgtaaagctgcatattcactgaatggatcctcaggcggataaaagggtgcattttaaaggtatatatccaagctgaaaagcatgcctattgacagataaacatgtatctgtaagatcagcctttcccaaggtatacttttaaaatttaaagcgtgtactgtgttgctttcagactgagttgcatgtcactctttagtcttgatatctacctgtctgttcagccaggacaacaaatggcttccaagcctgaagaatacaaaagtgtgcttgtgtttctcatttttataccagtctagggacaaaggagactgaacatctttgcagcaggataggctggtaatttgatcaaatttattcaaaaagctctcagtctgtgtcatgtaaggacatgcttatgaaatgtgagagaggctcgccactaagtattctaaatacttttcaatggcttttctaacaacctcagtagtaatttgctgagcatcatccagaccattaatagaatcagcaaagcactggaatttcacactttaatgataatattccacatagtctatgggcaaatattttcaacatttccaatttttaaagcttcagaattgaagccaaacaaattaataaataattgttttaattactatttaaaaactcaggtttagattgtttaaaattagttgcttttgatactcagctgtcatgtttataattcaaacatgtagtaaacatatgtaggtaaggttgtttttttggagatgttgcagctcaaatttcagtccacatatgaatcatcagtgtattttccataaagtgattcgggcatatttgtgtgaaaacctcagttctgtcacttcttacctctataaacttggacgataatgtg

SEQ ID NO: 109755 - DNA, 5783 bp, Homo sapiens
  Payload ID: 1551
  Gene Symbol: ATP8B4
  Gene Name: ATPase, class I, type 8B, member 4
  ENST ID: ENST00000559726
  CDS Start-End: 162-530
cagctcccaaggctgagattactctgcttcatctggatcgcccatctctggggtctcatggctgagtttcagttccccaatcctacctgctcctcagggggccagcactggggctgcaggtaggccacctgttgagacctggtgaaagatcaggtataataatgttctgcagtgaaaagaaattgcgtgaagtggaacggatagtgaaagccaatgaccgtgaatataatgaaaagttccagtatgcggataatcgtatccacacatcgaaatataatattctcaccttcttgccaattaatttatttgaacagttccaaagagtggcaaatgcctattttctttgccttctgattttacagctaattccagaaatttcctccttgacctggtttaccaccattgtgcctttggtcctggtgataactatgacagctgtcaaagatgccacagatgactattttcgccacaagagtgataatcaagtgaataatcggcagtctgaagtgctcatcaacagcaagtgctgaaggtacaaagctgagggtttaatgacaggaagtactctggtaattgtaaggaagaagatttatcctggtcctgagaaaaatactgcagaatgaaaaatggatgaatgtcaaagtgggagacatcattaaattagaaaataaccaatttgttgctgctgatttacttctcctatcaagtagtgagccacatggtctctgttatgttgaaactgctgagcttgatggggaaacgaacctaaaagtccgccatgcactatcagttacttcagaacttggagcagatatcagcagacttgcagggtttgatgggattgttgtctgtgaggtgcctaacaacaagttagataaattcatgggaatcctttcttggaaagacagcaagcattccctcaacaatgagaagataatcctgagaggctgcatcctgagaaataccagctggtgttttggaatggttatttttgcaggtcctgacactaaactaatgcagaatagtggtaagacaaagtttaaaaggacaagcattgatagattgatgaatactctagtactatggatttttgggtttctgatatgcttgggaattattcttgcaataggaaattcaatctgggagagtcaaactggggaccaattcagaactttcctcttttggaatgaaggagagaagagctctgtgttctccggattcttaacattctggtcatatattattattctcaatacagttgtacccatttccttatatgtgagtgtggaagtaattcgtctaggacacagttattttataaactgggaccggaagatgtattattctcgaaaagcaatacctgcagtggctcgaacgaccacgctcaatgaggaactggggcagattgagtacattttctccgacaaaacgggtaccctcactcaaaacatcatgacctttaaaagatgttccattaatgggagaatctatggtgaagtacatgatgacctggatcagaagacagaaataactcaggaaaaagagcctgtggatttctcagtcaaatctcaagcggatagagaatttcagttctttgaccaccatctgatggaatccattaaaatgggtgatcccaaagttcatgaattccttaggttacttgctctctgccacactgtaatgtcagaagagaatagcgcaggagagctgatttaccaagttcagtcacctgatgaaggggctctagtgactgccgctagaaattttgggttcatttttaaatcccggaccccagagaccataacaatagaagaattgggaacactagttacttatcaattacttgcctttttggatttcaacaacaccagaaaaaggatgtctgtcatagttcgaaacccagaaggacagataaagctttattccaaaggagcagatactattctgtttgaaaaacttcatccttccaatgaagtccttttgtctttgacgtcagaccacctcagtgaatttgcaggggaaggccttcggaccttggccatcgcatacagagacctggatgacaagtactttaaagagtggcataagatgcttgaagatgcgaatgctgccacagaagagagggatgaacgaatagctgggctatatgaagaaattgaaagagatttgatgctactaggtgccactgctgtagaagataagttacaggagggtgttattgaaacagttacaagtttatcactagccaatattaagatctgggtcctaacaggagacaaacaagaaactgccatcaacatcggttatgcctgcaacatgctgactgacgacatgaatgatgtgtttgtgatagcagggaataatgctgtggaagtgagagaagaactcaggaaagcaaaacaaaatttgtttggacaaaacagaaatttttccaatggccatgtagtttgtgaaaaaaagcagcagctggagttggattctattgtagaagaaaccataacaggagattatgccttaatcataaatggccacagtttggctcatgccctagaaagtgatgtcaagaatgatctcctagaacttgcttgcatgtgtaagactgtaatttgctgcagggtcactccactccagaaagcccaagtggtagagctggtgaagaagtacagaaatgctgttactttggccattggtgatggagccaatgatgtcagcatgattaaaagtgctcacattggtgttggcatcagcggccaggaaggattgcaagcagtcttagccagcgactattcatttgcacagtttagatatctccaaaggcttctccttgttcatggaaggtggtcttatttccgaatgtgcaaattcttatgctatttcttctataagaattttgcatttacacttgtgcatttctggtttggtttcttctgtggtttctcagcccagactgtttatgaccagtggttcatcaccctttttaacattgtttacacatcactgcctgttttagccatggggatttttgaccaggatgtgagtgaccagaacagcgtggactgtccccagctctacaaaccaggacagctgaatctgctttttaacaagcgtaaatttttcatttgcgtgttgcatggaatctacacctcattagtccttttcttcatcccctatggggccttttacaacgtggctggagaagatgggcaacatattgctgactaccagtcctttgcagttaccatggccacatctttggtcattgtggtcagtgtgcagatagccttggataccagttactggactttcattaatcacgtcttcatctgggggagcattgccatttatttctccattttatttacaatgcacagtaatggcatctttggcatcttcccaaaccagtttccatttgttggtaatgcacgacattccctgacccagaagtgcatctggcttgtaattctcttaacaacagtggcttcagttatgccagtggtggcattcagatttttgaaggtggatttatacccaaccctgagtgatcagatccgccggtggcagaaggctcaaaagaaggcaaggcctccaagtagccgaaggcctcggacccgcaggtcaagctcaagaaggtctggatatgcttttgctcaccaagaaggctatggagagcttatcacatctggaaaaaatatgcgagctaaaaatccacccccaacatcagggctggaaaagacacattataatagcactagctggattgaaaatttatgtaagaaaaccacagacaccgtgagcagctttagccaggataaaacagtgaaactgtgagtcaatatgaatttaaaccacgtagttatcttttcacttcaggtggagctgaaattctgctggctccagagtttgagatttgaggcaagaggtggggcaggcagattgcctcacttaacttaaatctgcggcagacaactgccagtgcccatcaaacaggagtgtgcgctatggaaaaccaggccagagggtcactgtctggtttgtgatttggtggacaaaacactcgctgttacaagtacagattttttttttttttaaatcaacctagataccaattgacctgaactttagaatcttatttatggagaaaaacttgtaaagctgcatattcactgaatggatcctcaggcggataaaagggtgcattttaaaggtatatatccaagctgaaaagcatgcctattgacagataaacatgtatctgtaagatcagcctttcccaaggtatacttttaaaatttaaagcgtgtactgtgttgctttcagactgagttgcatgtcactctttagtcttgatatctacctgtctgttcagccaggacaacaaatggcttccaagcctgaagaatacaaaagtgtgcttgtgtttctcatttttataccagtctagggacaaaggagactgaacatctttgcagcaggataggctggtaatttgatcaaatttattcaaaaagctctcagtctgtgtcatgtaaggacatgcttatgaaatgtgagagaggctcgccactaagtattctaaatacttttcaatggcttttctaacaacctcagtagtaatttgctgagcatcatccagaccattaatagaatcagcaaagcactggaatttcacactttaatgataatattccacatagtctatgggcaaatattttcaacatttccaatttttaaagcttcagaattgaagccaaacaaattaataaataattgttttaattactatttaaaaactcaggtttagattgtttaaaattagttgcttttgatactcagctgtcatgtttataattcaaacatgtagtaaacatatgtaggtaaggttgtttttttggagatgttgcagctcaaatttcagtccacatatgaatcatcagtgtattttccataaagtgattcgggcatatttgtgtgaaaacctcagttctgtcacttcttacctctataaacttggacgataatgtgccttctctgagactcagtttcttcctctgtaaaatgaggacatactacctacctcatgtggttggttgatgattgtctgtcaaagcacaaactctgaaattattaaaaacataattatttcataaacagatgagttaagttccagttaactcaacatcagtataacagagcaattggaagagaatatgaaaaaactggaatctaaatagtcagtgaggaaggctttgataaaatgaaattgccagaaagatataaaactggttagggtcctacagggaaataaaattataaccgtggaggtacatttctctaccagaaagcaaaaataaagcatcatgtcttaatggttttctacaaatcaacttctaattctacagagtccttaatctggtccctattaaattcttggtcagacaaagttacatttcccaagagagtcaggtgacacttgagtgagtttgatggataatgagctaatgtgatatctataggtcacaattttttaaaaccaaaattttcaagtctgggataatctttcctaaatgggatcaaatgaaataatatgtgtaaaagagtcaaatgcagtcctttaccatagtaactgcctatggacgttgtctttcccttacatgcctgcctacacttaaccagatgttggttttcaatgtctaatttgtcattagtttcaccacatttgctcactttttgtaacatttttgcaagatttgaaaactttcagtaaatgttttggcactattggt

SEQ ID NO: 109756 - DNA, 551 bp, Homo sapiens
  Payload ID: 1551
  Gene Symbol: ATP8B4
  Gene Name: ATPase, class I, type 8B, member 4
  ENST ID: ENST00000558458
  CDS Start-End: 1-253
ttttaaatcccggaccccagagaccataacaatagaagaattgggaacactagttacttatcaattacttgcctttttggatttcaacaacaccagaaaaaggatgtctgtcatagttcgaaacccagaaggacagataaagctttattccaaaggagcagatactattctgtttgaaaaacttcatccttccaatgaagtccttttgtctttgacgtcagaccacctcagtgaggccagcatggtcttttaaattttttttaatgaacacaacactggaatcataagtgtctgacttattgccgttactcaaacaccaaggccctggtttttcatacattctcctttaatactaaactataggaaacctaatttggtctttttacatttctctgcaaaataattttttttcaggaatttgcaggggaaggccttcggaccttggccatcgcatacagagacctggatgacaagtactttaaagagtggcataagatgcttgaagatgcgaatgctgccacagaagagagggatgaacgaatagctgggct

SEQ ID NO: 109757 - DNA, 759 bp, Homo sapiens
  Payload ID: 1551
  Gene Symbol: ATP8B4
  Gene Name: ATPase, class I, type 8B, member 4
  ENST ID: ENST00000558829
  CDS Start-End: 600-759
ggcacagcccagcttcaccagccccagccacagccacacgtaggccggctcgttacccataaggagcgccacgcagtctccctggcgcaggccgaggtggtcgtgcagcgcccgggccacttgattgctgcgccggtccacctgcgcgtaggtgagagtctcgtcgcggaagagcagaaaaggcttgtgtggcgtctggcgcgctttctccaggaacgcccgcaggatggtgcgcgccggccgccgcttcccgtagctgcgcaccctccggcccacggcggccaccttcaagaagtagcctatgtcctggaagaagtatgggcagcagaggttcaccaggagcggcaggaacagcagtcccgccaggactgtgtagatggcggaaagcatgacggctgcggggccctctgtcccagcgagggcagagggttcaccccgggcgtgcagcgcggcgactgggcgggctccgggcggactggcgggctgcgccggggcgcacgcggcgggacgccgggctcgcgtgagatgaaggggaagacagagctcctccgctgcaggtaggccacctgttgagacctggtgaaagatcaggtataataatgttctgcagtgaaaagaaattgcgtgaagtggaacggatagtgaaagccaatgaccgtgaatataatgaaaagttccagtatgcggataatcgtatccacacatcgaaatataatattctcaccttcttgccaattaatttatttgaacagttccaaa

SEQ ID NO: 109758 - DNA, 4124 bp, Homo sapiens
  Payload ID: 1551
  Gene Symbol: ATP8B4
  Gene Name: ATPase, class I, type 8B, member 4
  ENST ID: ENST00000557955
  CDS Start-End: 139-2292
ttctccttggcatggtcacggaatggatacctgtttgatcttcctgcactgctgagaaatcttccttttgggggagaggattaagtctgggttgaggtaggccacctgttgagacctggtgaaagatcaggtataataatgttctgcagtgaaaagaaattgcgtgaagtggaacggatagtgaaagccaatgaccgtgaatataatgaaaagttccagtatgcggataatcgtatccacacatcgaaatataatattctcaccttcttgccaattaatttatttgaacagttccaaagagtggcaaatgcctattttctttgccttctgattttacagctaattccagaaatttcctccttgacctggtttaccaccattgtgcctttggtcctggtgataactatgacagctgtcaaagatgccacagatgactattttcgccacaagagtgataatcaagtgaataatcggcagtctgaagtgctcatcaacagcaaactgcagaatgaaaaatggatgaatgtcaaagtgggagacatcattaaattagaaaataaccaatttgttgctgctgatttacttctcctatcaagtagtgagccacatggtctctgttatgttgaaactgctgagcttgatggggaaacgaacctaaaagtccgccatgcactatcagttacttcagaacttggagcagatatcagcagacttgcagggtttgatgggattgttgtctgtgaggtgcctaacaacaagttagataaattcatgggaatcctttcttggaaagacagcaagcattccctcaacaatgagaagataatcctgagaggctgcatcctgagaaataccagctggtgttttggaatggttatttttgcaggtcctgacactaaactaatgcagaatagtggtaagacaaagtttaaaaggacaagcattgatagattgatgaatactctagtactatggatttttgggtttctgatatgcttgggaattattcttgcaataggaaattcaatctgggagagtcaaactggggaccaattcagaactttcctcttttggaatgaaggagagaagagctctgtgttctccggattcttaacattctggtcatatattattattctcaatacagttgtacccatttccttatatgtgagtgtggaagtaattcgtctaggacacagttattttataaactgggaccggaagatgtattattctcgaaaagcaatacctgcagtggctcgaacgaccacgctcaatgaggaactggggcagattgagtacattttctccgacaaaacgggtaccctcactcaaaacatcatgacctttaaaagatgttccattaatgggagaatctatggtgaagtacatgatgacctggatcagaagacagaaataactcaggaaaaagagcctgtggatttctcagtcaaatctcaagcggatagagaatttcagttctttgaccaccatctgatggaatccattaaaatgggtgatcccaaagttcatgaattccttaggttacttgctctctgccacactgtaatgtcagaagagaatagcgcaggagagctgatttaccaagttcagtcacctgatgaaggggctctagtgactgccgctagaaattttgggttcatttttaaatcccggaccccagagaccataacaatagaagaattgggaacactagttacttatcaattacttgcctttttggatttcaacaacaccagaaaaaggatgtctgtcatagttcgaaacccagaaggacagataaagctttattccaaaggagcagatactattctgtttgaaaaacttcatccttccaatgaagtccttttgtctttgacgtcagaccacctcagtgaatttgcaggggaaggccttcggaccttggccatcgcatacagagacctggatgacaagtactttaaagagtggcataagatgcttgaagatgcgaatgctgccacagaagagagggatgaacgaatagctgggctatatgaagaaattgaaagagatttgatgctactaggtgccactgctgtagaagataagttacaggagggtgttattgaaacagttacaagtttatcactagccaatattaagatctgggtcctaacaggagacaaacaagaaactgccatcaacatcggttatgcctgcaacatgctgactgacgacatgaatgatgtgtttgtgatagcagggaataatgctgtggaagtgagagaagaactcaggctcatgccctagaaagtgatgtcaagaatgatctcctagaacttgcttgcatgtgtaagactgtaatttgctgcagggtcactccactccagaaagcccaagtggtagagctggtgaagaagtacagaaatgctgttactttggccattggtgatggagccaatgatgtcagcatgattaaaagtgctcacattggtgttggcatcagcggccaggaaggattgcaagcagtcttagccagcgactattcatttgcacagtttagatatctccaaaggcttctccttgttcatggaaggtggtcttatttccgaatgtgcaaattcttatgctatttcttctataagaattttgcatttacacttgtgcatttctggtttggtttcttctgtggtttctcagcccagactgtttatgaccagtggttcatcaccctttttaacattgtttacacatcactgcctgttttagccatggggatttttgaccaggatgtgagtgaccagaacagcgtggactgtccccagctctacaaaccaggacagctgaatctgctttttaacaagcgtaaatttttcatttgcgtgttgcatggaatctacacctcattagtccttttcttcatcccctatggggccttttacaacgtggctggagaagatgggcaacatattgctgactaccagtcctttgcagttaccatggccacatctttggtcattgtggtcagtgtgcagatagccttggataccagttactggactttcattaatcacgtcttcatctgggggagcattgccatttatttctccattttatttacaatgcacagtaatggcatctttggcatcttcccaaaccagtttccatttgttggtaatgcacgacattccctgacccagaagtgcatctggcttgtaattctcttaacaacagtggcttcagttatgccagtggtggcattcagatttttgaaggtggatttatacccaaccctgagtgatcagatccgccggtggcagaaggctcaaaagaaggcaaggcctccaagtagccgaaggcctcggacccgcaggtcaagctcaagaaggtctggatatgcttttgctcaccaagaaggctatggagagcttatcacatctggaaaaaatatgcgagctaaaaatccacccccaacatcagggctggaaaagacacattataatagcactagctggattgaaaatttatgtaagaaaaccacagacaccgtgagcagctttagccaggataaaacagtgaaactgtgagtcaatatgaatttaaaccacgtagttatcttttcacttcaggtggagctgaaattctgctggctccagagtttgagatttgaggcaagaggtggggcaggcagattgcctcacttaacttaaatctgcggcagacaactgccagtgcccatcaaacaggagtgtgcgctatggaaaaccaggccagagggtcactgtctggtttgtgatttggtggacaaaacactcgctgttacaagtacagattttttttttttttaaatcaacctagataccaattgacctgaactttagaatcttatttatggagaaaaacttgtaaagctgcatattcactgaatggatcctcaggcggataaaagggtgcattttaaaggtatatatccaagctgaaaagcatgcctattgacagataaacatgtatctgtaagatcagcctttcccaaggtatacttttaaaatttaaagcgtgtactgtgttgctttcagactgagttgcatgtcactctttagtcttgatatctacctgtctgttcagccaggacaacaaatggc

SEQ ID NO: 109759 - DNA, 7437 bp, Homo sapiens
  Payload ID: 1552
  Gene Symbol: ATP9A
  Gene Name: ATPase, class II, type 9A
  ENST ID: ENST00000311637
  CDS Start-End: 5-2740
gcggatggacagcaggccccgcgccgggtgctgcgagtggctgagatgctgcggtggaggggaggccaggccccgcactgtctggctggggcaccccgagaagagagaccagaggtatcctcggaatgtcatcaacaatcagaagtacaatttcttcacctttcttcctggggtgctgttcaaccagttcaaatactttttcaacctctatttcttacttcttgcctgctctcagtttgttcccgaaatgagacttggtgcactctatacctactgggttcccctgggcttcgtgctggccgtcactgtcatccgtgaggcggtggaggagatccgatgctacgtgcgggacaaggaagtcaactcccaggtctacagccggctcacagcacgaggtactgttgtgggtgttgttctttacactggcagagaactccggagtgtcatgaatacctcaaatccccgaagtaagatcggcctgttcgacttggaagtgaactgcctcaccaagatcctctttggtgccctggtggtggtctcgctggtcatggttgcccttcagcactttgcaggccgttggtacctgcagatcatccgcttcctcctcttgttttccaacatcatccccattagtttgcgtgtgaacctggacatgggcaagatcgtgtacagctgggtgattcgaagggactcgaaaatccccgggaccgtggttcgctccagcacgattcctgagcagctgggcaggatttcgtacttactcacagacaagacaggcactcttacccagaacgagatgattttcaaacggctccatctcggaacagtagcctacggcctcgactcaatggacgaagtacaaagccacattttcagcatttacacccagcaatcccaggacccaccggctcagaagggcccaacgctcaccactaaggtccggcggaccatgagcagccgcgtgcacgaagccgtgaaggccatcgcgctctgccacaacgtgactcccgtgtatgagtccaacggtgtgactgatcaggctgaggccgagaagcagtacgaagactcctgccgcgtataccaggcatccagccccgatgaggtggccctggtacagtggacggaaagtgtgggcttaaccctggtgggccgagaccagtcttccatgcagctgaggacccctggcgaccagatcctgaacttcaccatcctacagatcttccctttcacctatgaaagcaaacgtatgggcatcatcgtgcgggatgaatcaactggagaaattacgttttacatgaagggagcagatgtggtcatggctggcattgtgcagtacaatgactggttggaggaagagtgtggcaacatggcccgagaagggctgcgggtgctcgtggtggcaaagaagtctcttgcagaggagcagtatcaggactttgaagcccgctacgtccaggccaagctgagtgtgcacgaccgctccctcaaagtggccacggtgatcgagagcctggagatggagatggaactgctgtgcctgacgggcgtggaggaccagctgcaggcagatgtgcggcccacgctggagaccctgaggaatgctggcatcaaggtttggatgctgacaggggacaagctggagacagctacgtgcacagcgaagaatgcacatctggtgaccagaaaccaagacatccacgtttttcggctggtgaccaaccgcggggaggctcacctcgagctgaacgccttccgcaggaagcatgattgtgccctggtcatctcgggagactccctggaggtttgcctcaagtactatgagtacgagttcatggagctggcctgccagtgcccggccgtagtctgctgccgatgtgcccccacccagaaggcccagatcgtgcgcctgcttcaggagcgcacgggcaagctcacctgtgcagtaggggacggaggcaatgacgtcagcatgattcaggaatctgactgcggcgtgggagtggaaggaaaggaaggaaaacaggcttcgttggctgcagacttctccatcactcaatttaagcatcttggccggttgcttatggtgcatggccggaacagctacaagcggtcagccgccctcagccagttcgtgattcacaggagcctctgtatcagcaccatgcaggctgtcttttcctccgtgttttactttgcctccgtccctctctatcaaggattcctcatcattgggtactccacaatttacaccatgtttcctgtgttttctctggtcctggacaaagatgtcaaatcggaagttgccatgctgtatcctgagctctacaaggatcttctcaagggacggccgttgtcctacaagacattcttaatatgggttttgattagcatctatcaagggagcaccatcatgtacggggcgctgctgctgtttgagtcggagttcgtgcacatcgtggccatctccttcacctcgctgatcctcaccgagctgctcatggtggcgctgaccatccagacctggcactggctcatgacagtggcggagctgctcagcctggcctgctacatcgcctccctggtgttcttacacgagttcatcgatgtgtacttcatcgccaccttgtcattcttgtggaaagtctccgtcatcactctggtcagctgcctccccctctatgtcctcaagtacctgcgaagacggttctctccccccagctactcaaagctcacatcataggccgtgcgttcgctggagggggccctggtcttggcgcttccctgatggacagagctcaagttccatttatattaaccgccacctgtggattttgcagtaattgctaacacatgcagttttaatgggaagtggctctgcgcctaaacggagtcctaacgctgcatcaacgggagggagggtcctgaaagagacccatctgggcctgtctgaacccctcgttcttcatgtttaggtgaatatgaatatgttaaagctggtggctcagctgggagatttatatgggtcactgtgcgagcttccttatgacttgaattttgttgtcacatgataaaagtttctgtgtagctgaaggttgtagaaggcttgtgtgtgtgtgtgtgtgtgtgtgtgtgtgtgtgtgtgtttttaaagagtcctaatgtgtatgtactctttatgtctttcttgctcttacaaagaggtgtcagaaaaatagaaagctcttggtgtcggtttgggaggaaaagacagtgacatttggtaaaaagttatccacacaataatctccattcggaaatgctcagtatcgtctccagccagccctgcttatccaggttacactggattcctgggatcgtaaccagtaaatgagaggagagggagagagagtgtcctaagtccaatctgttatccttgatctgattcagcatccatagtgtgtgagttaacttcacctgccacctcgtaaaagaatttcagaggtgtgatcccgctttattgggacctggtaacaatcacaaagccagtggctgtttgagaaggacctcagacattttcagcagagttgttttagcaggaaacgtgccactgaatggcccctaaatgtgtcgacagtgtgataagagactcaactaattctttaggcaacatggcagatgtgactcagatcctccaagaccaaagcggaaaggtcagggggctgggactcttctcttccatagaagcctgtttcctgttaggaggcataatggaagatgaccccacaaaggcagaggcatctttcggaacaacactggtggcagctttcagaacaaggaacccctggtgggaggacgcccaagctacagcgttgggatctgggatctgttccactgccggcagatttcaaggggaacttgctgaaaggcagccagtggtgaagatttctcccctcccaggatggactacatgccggcatgtttcttataaagctgtggctgcttgtttcagaggaagggagtttgcagtcgcgggacgtggtagagcaaggcattcttgggttttcaagttgcttcttgcagaagccacatatgcatgccataagggttaagttggtggatctttaagagccaagtgtggttgagatcttggatttgcgtttacttcttgatgaatacatatccttcaaaccctctgcctggcgctacttctgtgtgcttcagagatgtacatcacagcctggtttctgatgcctactaactcctgctcttggagagctggagacacgaggatcagatagtcccttgcctttggagcactcttgataagcttttgtattttgtgttgtccttttaaaatgttctagaatgactttacgttgcaggtactggttaattggctgttgacaccacatctattttgtcttatgattctgcagttttgcagtacttttctctatctgattcagccatttctgccagagggaaaaggtcggcagaaaagatgtattgagtgaatagttaaggataggatctttgtccaaaaatttcagaaagattgagcaaatctgacgtattcattgagtgagtttctgtgttttcaaaggtggaggagaaatttgtgctggaagtttttaagcctccgttttcttggaaatcagtctgtaacactggcaagtcttaagatagtcccatttagactttgcagatgctgaacctggctctgtaacgctgggaagtcttaagatagtcctgtttagactttgcaaaccctgtacctggctttgctcggagattcgggatgctggctcctgcaggcagggcgtgtgggagcctcgtcagaaagttttagaggtttccagcagaagcagaatgaagatggtctccctggccttttccttaattctcaattttgattgaggtgcacaagttgacttttaaagccaacgcttaagatactgattgacatcttcaagggagaatgctcccaggaggggctgaagaagccatagttggaagtggaaggtactcgtcagtgttctccacaaacctttttactctgttgtctcagccgcactggggcggaggcggtcaagggtgagaagtaccgacactcaagtgcaaactgccacgtcgttggcccatcccatcagtgggcagctggctgacgccattcactggacggtccctgaacacctaggaatgcacacaccgtgcttctcagacactggagacgcaaaggcaggaggatgcagtccggtgagaggacacgatctttacctgcacaatcagactgtaagcccagcagagaaccccaggggcgcctgggtacttctcggaggtcatcttagttgtggtggggaagacaaagaaataagcaaacaagaaactagagttactatacaagaaactctcctgagtttgtaaaccttaagcataaggattcagttgacctttttcttggttcatcaatctggaaagaacttacataaagcgccattgacactgtcacctgggagctccatgggccgtaagtctttgacagccaatttaatttgaggtcagagggccttgaggtacacagtcagcactgtttgaacacttttcctgaaagcaaaactcacagctccctgcgccctctgacaacactagctatttctgccagagtaagaacttctattactattttattattgttcatatgtcttttgatgatggttgtgtgacagggggaagcaggatctatttggtttcttcccctccccccaccccttcctttttgtctctctttttttttctctaagaaaatcaccagactagtttttccatcttgagtaatttcttatgtgggacagttttgatcctcattttgaaagcatgcgtgtgcacatgtgtgttgcctgtggtgccaggtgagacaggtggcactaactccagctgcttggaaggcatcccaagggcgcatcttaaagttggagcagacctcccttttccagcccctggggccattagaccacgtgctggaactagcattgtaaaattcccatcccagttccactcccctgaagtgaaacccttttttttttgtgacagtaaatcttaaaaatcattgtctctttatgaacatttcctcagtttcttctctgctgaaaatgtaagccatgctactttttaatgtattttgaattttgtgctcattggaaattgatatgctaatgcctcccccaccccccgccagacttttctttttatactttgtcttgtttttactggggtaggctgggcatgcgtgcgtgcctttagggcagcattttaaacctttgccaaaattgcaaatgggacatgtacattcttctgctccatcctacttaaacacctatcagctatttttatctttaaccttttctgtatgtttgaagtgtgtggggggtgtgtgtgtgtgtgaaagagcgagagaatgatgtcatctaaagttttttgaagaattatttggttttcattgcattaaaattctatcactcccagctttgttttcatttaaaaaaatatacaaagagctttgtaaatacaacacattttatttctcccccttcttttaatgtacagcttttttgccacttatatatacttaaaatattcccatgaattatgtccagttcttcttggaaaaaaatttggttttgaatgaacctgcaaagcatcctgcagcgtgagcagctcctccacctggagctccgaagcatcttctcaggccaaagcggcattacccgtgaatctgtcttctccgccacagcatggtttgaggcgcagtctgttaatatagctgggccatgtcagtgactgttgtgtttgtggggtcaggtggggggcatggtatttgcaaaaaaaacaaattatggctaatttattattttgttgcagtggggttaactgtaaactcatgtaagagtctgtgatttcctcattggttgatctctctctctgtaatcctcattgcaaattttcaccaggacagcgttttttgattagaggggagctctggcacagtatgctttaatttagcaggaacttccagatgatttaaattctcgatgctgtgatgacacacatatgatctttcgtgtttctgagcgactctactttcattgtttgccagcgtggctcgttgctgttgcccaataaagcttgtgtacgttctgccttgggggattattttaatttgtacagaaacatgaattctggtatcaaaatgaggactttttattataacgctcctattttttctttatttcatggtacatgaaatgtaaagaaaactctttccagttcagaaaattattttgattttggcaaaaaaaaccccaaatcaatgcatgttatttattattttgtactattgtccatcccagacgtgtcagaatttcaaaaggtgatagatataaatggaaaataagatgaaaa

SEQ ID NO: 109760 - DNA, 8106 bp, Homo sapiens
  Payload ID: 1552
  Gene Symbol: ATP9A
  Gene Name: ATPase, class II, type 9A
  Uniprot ID: O75110
  ENST ID: ENST00000338821
  CDS Start-End: 266-3409
gcgcggcgcggcgcggagcgagcgggcgcagcgcggagctcgggcccatggtgcgcccgtgtccgtcggtcgggccgcgcgggcgctccgcgcgtggcccggcgctcgcgagctcgccccctcgctgcgggcccggcccgcccgctgccgccgcctcctcccccggggcggcgcggcgccggcgggcggcggcgcggaggccggaccgggcggcggcccaggcggcgcggggggcgcggcggccaaggcgggcggcgccgccgacatgacggacaacatcccgctgcagccggtgcgccagaagaagcggatggacagcaggccccgcgccgggtgctgcgagtggctgagatgctgcggtggaggggaggccaggccccgcactgtctggctggggcaccccgagaagagagaccagaggtatcctcggaatgtcatcaacaatcagaagtacaatttcttcacctttcttcctggggtgctgttcaaccagttcaaatactttttcaacctctatttcttacttcttgcctgctctcagtttgttcccgaaatgagacttggtgcactctatacctactgggttcccctgggcttcgtgctggccgtcactgtcatccgtgaggcggtggaggagatccgatgctacgtgcgggacaaggaagtcaactcccaggtctacagccggctcacagcacgaggcacagtgaaggtgaagagttctaacatccaagttggagaccttatcatcgttgaaaagaaccagcgggtccctgccgacatgatcttcctgaggacatcagaaaaaaacgggtcatgcttcttgcggacggatcagctggatggggagacggactggaagctgcggcttcccgtggcctgcacgcagaggctccccacggccgccgaccttcttcagattcgatcgtatgtgtacgcagaagagccaaatattgacattcacaacttcgtgggaacttttacccgagaagacagcgaccccccgatcagcgagagcctgagcatagagaacacgctgtgggctggcactgtggtcgcatcaggtactgttgtgggtgttgttctttacactggcagagaactccggagtgtcatgaatacctcaaatccccgaagtaagatcggcctgttcgacttggaagtgaactgcctcaccaagatcctctttggtgccctggtggtggtctcgctggtcatggttgcccttcagcactttgcaggccgttggtacctgcagatcatccgcttcctcctcttgttttccaacatcatccccattagtttgcgtgtgaacctggacatgggcaagatcgtgtacagctgggtgattcgaagggactcgaaaatccccgggaccgtggttcgctccagcacgattcctgagcagctgggcaggatttcgtacttactcacagacaagacaggcactcttacccagaacgagatgattttcaaacggctccatctcggaacagtagcctacggcctcgactcaatggacgaagtacaaagccacattttcagcatttacacccagcaatcccaggacccaccggctcagaagggcccaacgctcaccactaaggtccggcggaccatgagcagccgcgtgcacgaagccgtgaaggccatcgcgctctgccacaacgtgactcccgtgtatgagtccaacggtgtgactgatcaggctgaggccgagaagcagtacgaagactcctgccgcgtataccaggcatccagccccgatgaggtggccctggtacagtggacggaaagtgtgggcttaaccctggtgggccgagaccagtcttccatgcagctgaggacccctggcgaccagatcctgaacttcaccatcctacagatcttccctttcacctatgaaagcaaacgtatgggcatcatcgtgcgggatgaatcaactggagaaattacgttttacatgaagggagcagatgtggtcatggctggcattgtgcagtacaatgactggttggaggaagagtgtggcaacatggcccgagaagggctgcgggtgctcgtggtggcaaagaagtctcttgcagaggagcagtatcaggactttgaagcccgctacgtccaggccaagctgagtgtgcacgaccgctccctcaaagtggccacggtgatcgagagcctggagatggagatggaactgctgtgcctgacgggcgtggaggaccagctgcaggcagatgtgcggcccacgctggagaccctgaggaatgctggcatcaaggtttggatgctgacaggggacaagctggagacagctacgtgcacagcgaagaatgcacatctggtgaccagaaaccaagacatccacgtttttcggctggtgaccaaccgcggggaggctcacctcgagctgaacgccttccgcaggaagcatgattgtgccctggtcatctcgggagactccctggaggtttgcctcaagtactatgagtacgagttcatggagctggcctgccagtgcccggccgtagtctgctgccgatgtgcccccacccagaaggcccagatcgtgcgcctgcttcaggagcgcacgggcaagctcacctgtgcagtaggggacggaggcaatgacgtcagcatgattcaggaatctgactgcggcgtgggagtggaaggaaaggaaggaaaacaggcttcgttggctgcagacttctccatcactcaatttaagcatcttggccggttgcttatggtgcatggccggaacagctacaagcggtcagccgccctcagccagttcgtgattcacaggagcctctgtatcagcaccatgcaggctgtcttttcctccgtgttttactttgcctccgtccctctctatcaaggattcctcatcattgggtactccacaatttacaccatgtttcctgtgttttctctggtcctggacaaagatgtcaaatcggaagttgccatgctgtatcctgagctctacaaggatcttctcaagggacggccgttgtcctacaagacattcttaatatgggttttgattagcatctatcaagggagcaccatcatgtacggggcgctgctgctgtttgagtcggagttcgtgcacatcgtggccatctccttcacctcgctgatcctcaccgagctgctcatggtggcgctgaccatccagacctggcactggctcatgacagtggcggagctgctcagcctggcctgctacatcgcctccctggtgttcttacacgagttcatcgatgtgtacttcatcgccaccttgtcattcttgtggaaagtctccgtcatcactctggtcagctgcctccccctctatgtcctcaagtacctgcgaagacggttctctccccccagctactcaaagctcacatcataggccgtgcgttcgctggagggggccctggtcttggcgcttccctgatggacagagctcaagttccatttatattaaccgccacctgtggattttgcagtaattgctaacacatgcagttttaatgggaagtggctctgcgcctaaacggagtcctaacgctgcatcaacgggagggagggtcctgaaagagacccatctgggcctgtctgaacccctcgttcttcatgtttaggtgaatatgaatatgttaaagctggtggctcagctgggagatttatatgggtcactgtgcgagcttccttatgacttgaattttgttgtcacatgataaaagtttctgtgtagctgaaggttgtagaaggcttgtgtgtgtgtgtgtgtgtgtgtgtgtgtgtgtgtgtgtttttaaagagtcctaatgtgtatgtactctttatgtctttcttgctcttacaaagaggtgtcagaaaaatagaaagctcttggtgtcggtttgggaggaaaagacagtgacatttggtaaaaagttatccacacaataatctccattcggaaatgctcagtatcgtctccagccagccctgcttatccaggttacactggattcctgggatcgtaaccagtaaatgagaggagagggagagagagtgtcctaagtccaatctgttatccttgatctgattcagcatccatagtgtgtgagttaacttcacctgccacctcgtaaaagaatttcagaggtgtgatcccgctttattgggacctggtaacaatcacaaagccagtggctgtttgagaaggacctcagacattttcagcagagttgttttagcaggaaacgtgccactgaatggcccctaaatgtgtcgacagtgtgataagagactcaactaattctttaggcaacatggcagatgtgactcagatcctccaagaccaaagcggaaaggtcagggggctgggactcttctcttccatagaagcctgtttcctgttaggaggcataatggaagatgaccccacaaaggcagaggcatctttcggaacaacactggtggcagctttcagaacaaggaacccctggtgggaggacgcccaagctacagcgttgggatctgggatctgttccactgccggcagatttcaaggggaacttgctgaaaggcagccagtggtgaagatttctcccctcccaggatggactacatgccggcatgtttcttataaagctgtggctgcttgtttcagaggaagggagtttgcagtcgcgggacgtggtagagcaaggcattcttgggttttcaagttgcttcttgcagaagccacatatgcatgccataagggttaagttggtggatctttaagagccaagtgtggttgagatcttggatttgcgtttacttcttgatgaatacatatccttcaaaccctctgcctggcgctacttctgtgtgcttcagagatgtacatcacagcctggtttctgatgcctactaactcctgctcttggagagctggagacacgaggatcagatagtcccttgcctttggagcactcttgataagcttttgtattttgtgttgtccttttaaaatgttctagaatgactttacgttgcaggtactggttaattggctgttgacaccacatctattttgtcttatgattctgcagttttgcagtacttttctctatctgattcagccatttctgccagagggaaaaggtcggcagaaaagatgtattgagtgaatagttaaggataggatctttgtccaaaaatttcagaaagattgagcaaatctgacgtattcattgagtgagtttctgtgttttcaaaggtggaggagaaatttgtgctggaagtttttaagcctccgttttcttggaaatcagtctgtaacactggcaagtcttaagatagtcccatttagactttgcagatgctgaacctggctctgtaacgctgggaagtcttaagatagtcctgtttagactttgcaaaccctgtacctggctttgctcggagattcgggatgctggctcctgcaggcagggcgtgtgggagcctcgtcagaaagttttagaggtttccagcagaagcagaatgaagatggtctccctggccttttccttaattctcaattttgattgaggtgcacaagttgacttttaaagccaacgcttaagatactgattgacatcttcaagggagaatgctcccaggaggggctgaagaagccatagttggaagtggaaggtactcgtcagtgttctccacaaacctttttactctgttgtctcagccgcactggggcggaggcggtcaagggtgagaagtaccgacactcaagtgcaaactgccacgtcgttggcccatcccatcagtgggcagctggctgacgccattcactggacggtccctgaacacctaggaatgcacacaccgtgcttctcagacactggagacgcaaaggcaggaggatgcagtccggtgagaggacacgatctttacctgcacaatcagactgtaagcccagcagagaaccccaggggcgcctgggtacttctcggaggtcatcttagttgtggtggggaagacaaagaaataagcaaacaagaaactagagttactatacaagaaactctcctgagtttgtaaaccttaagcataaggattcagttgacctttttcttggttcatcaatctggaaagaacttacataaagcgccattgacactgtcacctgggagctccatgggccgtaagtctttgacagccaatttaatttgaggtcagagggccttgaggtacacagtcagcactgtttgaacacttttcctgaaagcaaaactcacagctccctgcgccctctgacaacactagctatttctgccagagtaagaacttctattactattttattattgttcatatgtcttttgatgatggttgtgtgacagggggaagcaggatctatttggtttcttcccctccccccaccccttcctttttgtctctctttttttttctctaagaaaatcaccagactagtttttccatcttgagtaatttcttatgtgggacagttttgatcctcattttgaaagcatgcgtgtgcacatgtgtgttgcctgtggtgccaggtgagacaggtggcactaactccagctgcttggaaggcatcccaagggcgcatcttaaagttggagcagacctcccttttccagcccctggggccattagaccacgtgctggaactagcattgtaaaattcccatcccagttccactcccctgaagtgaaacccttttttttttgtgacagtaaatcttaaaaatcattgtctctttatgaacatttcctcagtttcttctctgctgaaaatgtaagccatgctactttttaatgtattttgaattttgtgctcattggaaattgatatgctaatgcctcccccaccccccgccagacttttctttttatactttgtcttgtttttactggggtaggctgggcatgcgtgcgtgcctttagggcagcattttaaacctttgccaaaattgcaaatgggacatgtacattcttctgctccatcctacttaaacacctatcagctatttttatctttaaccttttctgtatgtttgaagtgtgtggggggtgtgtgtgtgtgtgaaagagcgagagaatgatgtcatctaaagttttttgaagaattatttggttttcattgcattaaaattctatcactcccagctttgttttcatttaaaaaaatatacaaagagctttgtaaatacaacacattttatttctcccccttcttttaatgtacagcttttttgccacttatatatacttaaaatattcccatgaattatgtccagttcttcttggaaaaaaatttggttttgaatgaacctgcaaagcatcctgcagcgtgagcagctcctccacctggagctccgaagcatcttctcaggccaaagcggcattacccgtgaatctgtcttctccgccacagcatggtttgaggcgcagtctgttaatatagctgggccatgtcagtgactgttgtgtttgtggggtcaggtggggggcatggtatttgcaaaaaaaacaaattatggctaatttattattttgttgcagtggggttaactgtaaactcatgtaagagtctgtgatttcctcattggttgatctctctctctgtaatcctcattgcaaattttcaccaggacagcgttttttgattagaggggagctctggcacagtatgctttaatttagcaggaacttccagatgatttaaattctcgatgctgtgatgacacacatatgatctttcgtgtttctgagcgactctactttcattgtttgccagcgtggctcgttgctgttgcccaataaagcttgtgtacgttctgccttgggggattattttaatttgtacagaaacatgaattctggtatcaaaatgaggactttttattataacgctcctattttttctttatttcatggtacatgaaatgtaaagaaaactctttccagttcagaaaattattttgattttggcaaaaaaaaccccaaatcaatgcatgttatttattattttgtactattgtccatcccagacgtgtcagaatttcaaaaggtgatagatataaatggaaaataagatgaaaa

SEQ ID NO: 109761 - DNA, 3533 bp, Homo sapiens
  Payload ID: 1553
  Gene Symbol: ATP9B
  Gene Name: ATPase, class II, type 9B
  Uniprot ID: O43861
  ENST ID: ENST00000307671
  CDS Start-End: 15-3425
ggggcggtcggaacatggcggaccagatcccgctttacccggtgcgtagcgcagcggcggccgcagccaaccgcaaacgcgcggcctactacagcgccgcggggcccaggccgggagccgaccggcacagcaggtaccagctggaggatgagtctgcgcatttggatgaaatgccactaatgatgtctgaagaaggctttgagaatgaggaaagtgattaccacaccttaccacgagccaggataatgcaaaggaaaagaggactggagtggtttgtctgtgatggctggaagttcctctgtaccagttgctgtggttggctgataaatatttgtcgaagaaagaaagagctgaaagctcgcacagtatggcttggatgtcctgaaaagtgtgaagaaaaacatcccaggaattctataaaaaatcaaaaatacaatgtgtttacctttatacctggggttttgtatgaacaattcaagtttttcttgaatctctattttctagtaatatcctgctcacagtttgtaccagcattgaaaataggctatctctacacctactgggctcctctgggatttgtcttggctgttactatgacacgggaagcaattgatgaatttcggcgttttcagcgtgacaaggaagtgaattcacaactatatagcaagcttacagtaagaggtaaagtgcaagttaagagttcagacatacaagttggagacctcatcatagtggaaaagaatcaaagaattccatcggacatggtgtttcttaggacttcagaaaaagcaggttcgtgttttattcgaactgatcaactagatggtgaaactgactggaagctgaaggtggcagtgagctgcacgcaacagctgccggctctgggggaccttttttctatcagtgcttatgtttatgctcagaaaccacaaatggacattcacagtttcgaaggcacatttaccagggaagacagtgacccgcccattcatgaaagtctcagcatagaaaatacattgtgggcaagcaccattgttgcatcaggtactgtaataggtgttgtcatttataccggaaaagagactcgaagtgtaatgaacacatccaatccaaaaaataaggttggtttgttggaccttgaactcaatcggctgacgaaagcgctatttttggctttagttgctctttccattgttatggtaaccttacaaggatttgtgggtccatggtaccgcaatctttttcggttccttctcctcttttcttacatcattcccataagtttgcgtgtgaacttggacatgggcaaagcggtgtatggatggatgatgatgaaagatgagaacatccctggcacggtcgttcggaccagcactatcccagaggaacttgggcgcctggtgtatttattgacagacaaaacaggaaccctcacccagaatgaaatgatatttaagcggctgcacctgggcaccgtgtcctatggcgccgacacgatggatgagatccagagccatgtcagggactcctactcacagatgcagtctcaagctggtggaaacaatactggttcaactccactaagaaaagcccaatcttcagctcccaaagttaggaaaagtgtcagtagtcgaatccatgaagccgtgaaagccatcgtgctgtgtcacaacgtgacccccgtgtatgagtctcgggccggcgttactgaggagactgagttcgcagaggctgaccaagacttcagtgatgagaatcgcacctaccaggcttccagcccggatgaggtcgctctggtgcagtggacagagagtgtgggcctcacgctggtcagcagggacctcacctccatgcagctgaagacccccagtggccaggtcctcagcttctgcattctgcagctgtttcccttcacctccgagagcaagcggatgggcgtcatcgtcagggatgaatccacggcagaaatcacattctacatgaagggcgctgacgtggccatgtctcctatcgtgcagtataatgactggctggaagaggagtgcggaaacatggctcgcgaaggactgcggaccctcgtggttgcaaagaaggcgttgacagaggagcagtaccaggactttgagagccgatacactcaagccaagctgagcatgcacgacaggtccctcaaggtggccgcggtagtcgagagcctggagagggagatggaactgctgtgcctcaccggcgtggaggaccagctgcaggcagacgtgcggcccacgctggagatgctgcgcaacgccgggatcaagatatggatgctaacaggcgataaactcgagacagctacctgcattgccaaaagttcacatctcgtgtctagaacacaagatattcatattttcagacaggtaaccagtcggggagaggcacatttggagctgaatgcatttcgaaggaagcatgattgtgcactagtcatatctggggactctctggaggtttgtctaaagtactacgagcatgaatttgtggagctggcctgccagtgccctgccgtggtttgctgccgctgctcacccacccagaaggcccgcattgtgacactgctgcagcagcacacagggagacgcacctgcgccatcggtgatggaggaaatgatgtcagcatgattcaggcagcagactgtgggattgggattgagggaaaggagggtaaacaggcctcgctggcggccgacttctccatcacgcagttccggcacataggcaggctgctcatggtgcacgggcggaacagctacaagaggtcggcggcactcggccagttcgtcatgcacaggggccttatcatctccaccatgcaggctgtgttttcctcagtcttctacttcgcatccgtccctttgtatcagggcttcctcatggtggggtatgccaccatatacaccatgttcccagtgttctccttagtgctggaccaggacgtgaagccagagatggcgatgctctacccggagctgtacaaggacctcaccaagggaagatccttgtccttcaaaaccttcctcatctgggttttaataagtatttaccaaggcggcatcctcatgtatggggccctggtgctcttcgagtctgagttcgtccacgtggtggccatctccttcaccgcactgatcctgaccgagctgctgatggtggcgctgaccgtccgcacgtggcactggctgatggtggtggccgagttcctcagcttaggctgctacgtgtcctcactcgcttttctcaatgaatattttgatgttgcctttatcaccaccgtgaccttcctgtggaaagtgtcggcgatcaccgtggtcagctgcctcccgctgtatgtcctcaagtacctgaggcgcaagctctctcctcccagctactgcaagctggcctcctaaggggctgtgcacccccagcgggctggccccagcaccttctgcccttcccagcaccttgtgcccttgccagtgaacgcagggtttgccattgctaccaagcaagcacca

SEQ ID NO: 109762 - DNA, 4361 bp, Homo sapiens
  Payload ID: 1553
  Gene Symbol: ATP9B
  Gene Name: ATPase, class II, type 9B
  Uniprot ID: O43861
  ENST ID: ENST00000426216
  CDS Start-End: 18-3461
aaaggggcggtcggaacatggcggaccagatcccgctttacccggtgcgtagcgcagcggcggccgcagccaaccgcaaacgcgcggcctactacagcgccgcggggcccaggccgggagccgaccggcacagcaggtaccagctggaggatgagtctgcgcatttggatgaaatgccactaatgatgtctgaagaaggctttgagaatgaggaaagtgattaccacaccttaccacgagccaggataatgcaaaggaaaagaggactggagtggtttgtctgtgatggctggaagttcctctgtaccagttgctgtggttggctgataaatatttgtcgaagaaagaaagagctgaaagctcgcacagtatggcttggatgtcctgaaaagtgtgaagaaaaacatcccaggaattctataaaaaatcaaaaatacaatgtgtttacctttatacctggggttttgtatgaacaattcaagtttttcttgaatctctattttctagtaatatcctgctcacagtttgtaccagcattgaaaataggctatctctacacctactgggctcctctgggatttgtcttggctgttactatgacacgggaagcaattgatgaatttcggcgttttcagcgtgacaaggaagtgaattcacaactatatagcaagcttacagtaagaggtaaagtgcaagttaagagttcagacatacaagttggagacctcatcatagtggaaaagaatcaaagaattccatcggacatggtgtttcttaggacttcagaaaaagcaggttcgtgttttattcgaactgatcaactagatggtgaaactgactggaagctgaaggtggcagtgagctgcacgcaacagctgccggctctgggggaccttttttctatcagtgcttatgtttatgctcagaaaccacaaatggacattcacagtttcgaaggcacatttaccagggaagacagtgacccgcccattcatgaaagtctcagcatagaaaatacattgtgggcaagcaccattgttgcatcaggtactgtaataggtgttgtcatttataccggaaaagagactcgaagtgtaatgaacacatccaatccaaaaaataaggttggtttgttggaccttgaactcaatcggctgacgaaagcgctatttttggctttagttgctctttccattgttatggtaaccttacaaggatttgtgggtccatggtaccgcaatctttttcggttccttctcctcttttcttacatcattcccataagtttgcgtgtgaacttggacatgggcaaagcggtgtatggatggatgatgatgaaagatgagaacatccctggcacggtcgttcggaccagcactatcccagaggaacttgggcgcctggtgtatttattgacagacaaaacaggaaccctcacccagaatgaaatgatatttaagcggctgcacctgggcaccgtgtcctatggcgccgacacgatggatgagatccagagccatgtcagggactcctactcacagatgcagtctcaagctggtggaaacaatactggttcaactccactaagaaaagcccaatcttcagctcccaaagttaggaaaagtgtcagtagtcgaatccatgaagccgtgaaagccatcgtgctgtgtcacaacgtgacccccgtgtatgagtctcgggccggcgttactgaggagactgagttcgcagaggctgaccaagacttcagtgatgagaatcgcacctaccaggcttccagcccggatgaggtcgctctggtgcagtggacagagagtgtgggcctcacgctggtcagcagggacctcacctccatgcagctgaagacccccagtggccaggtcctcagcttctgcattctgcagctgtttcccttcacctccgagagcaagcggatgggcgtcatcgtcagggatgaatccacggcagaaatcacattctacatgaagggcgctgacgtggccatgtctcctatcgtgcagtataatgactggctggaagaggagtgcggaaacatggctcgcgaaggactgcggaccctcgtggttgcaaagaaggcgttgacagaggagcagtaccaggactttgagagccgatacactcaagccaagctgagcatgcacgacaggtccctcaaggtggccgcggtagtcgagagcctggagagggagatggaactgctgtgcctcaccggcgtggaggaccagctgcaggcagacgtgcggcccacgctggagatgctgcgcaacgccgggatcaagatatggatgctaacaggcgataaactcgagacagctacctgcattgccaaaagttcacatctcgtgtctagaacacaagatattcatattttcagacaggtaaccagtcggggagaggcacatttggagctgaatgcatttcgaaggaagcatgattgtgcactagtcatatctggggactctctggaggtttgtctaaagtactacgagcatgaatttgtggagctggcctgccagtgccctgccgtggtttgctgccgctgctcacccacccagaaggcccgcattgtgacactgctgcagcagcacacagggagacgcacctgcgccatcggtgatggaggaaatgatgtcagcatgattcaggcagcagactgtgggattgggattgagggaaaggagggtaaacaggcctcgctggcggccgacttctccatcacgcagttccggcacataggcaggctgctcatggtgcacgggcggaacagctacaagaggtcggcggcactcggccagttcgtcatgcacaggggccttatcatctccaccatgcaggctgtgttttcctcagtcttctacttcgcatccgtccctttgtatcagggcttcctcatggtggggtatgccaccatatacaccatgttcccagtgttctccttagtgctggaccaggacgtgaagccagagatggcgatgctctacccggagctgtacaaggacctcaccaagggaagatccttgtccttcaaaaccttcctcatctgggttttaataagtatttaccaaggcggcatcctcatgtatggggccctggtgctcttcgagtctgagttcgtccacgtggtggccatctccttcaccgcactgatcctgaccgagctgctgatggtggcgctgaccgtccgcacgtggcactggctgatggtggtggccgagttcctcagcttaggctgctacgtgtcctcactcgcttttctcaatgaatattttggtataggcagagtgtcttttggagctttcttagatgttgcctttatcaccaccgtgaccttcctgtggaaagtgtcggcgatcaccgtggtcagctgcctcccgctgtatgtcctcaagtacctgaggcgcaagctctctcctcccagctactgcaagctggcctcctaaggggctgtgcacccccagcgggctggccccagcaccttctgcccttcccagcaccttgtgcccttgccagtgaacgcagggtttgccattgctaccaagcaagcaccacaagaaagggagggtacgccaggcgagcccagggcacagatgctgagacagcctctccttctcagtgcagggacgtcacccctgccaggcaagcccagggcacagatgccaggatggcttctccctctcagtgcgaggcttcacccctgccaggcaagcccagggcatagatgctgagacagcctctccctctcagtgcagggacgtcacccctgccaggcaagcccagggcacagaggccgggacggcctctccctctcagtgtgaggcttcacccatgctaggcaagcccagggcacagatgccgggatggcccctccctctcagtgcgggaacgtcacccctgccaggcaagcccagggcacagatgctgcgatggcctcttcctcttaagtgtggggcctcacccctgcttttctttctttttttgtattgtcaaaattgtatttccatattgaagcagcttgagtttctactgaaaatgagcccgaattatttcactattactgtaaagggttcatcttactctggcattctgagaattagactgaaagtttaatttctgcagttccctcatattcagattctttctttgatgttataacacaaagtcattcctactcaaatgtaataaaattgaggctccacggaggcccgtgtccacatcagctgcagctcccactcagacagacggcctgccccacagcctgccctttgctgaagataccctcgctttatacttgcatttcgcttttcagtaaaaacagtcaagttactgagttctcacataaa

SEQ ID NO: 109763 - DNA, 1507 bp, Homo sapiens
  Payload ID: 1553
  Gene Symbol: ATP9B
  Gene Name: ATPase, class II, type 9B
  ENST ID: ENST00000458297
  CDS Start-End: 1-1416
atgccactaatgatgtctgaagaaggctttgagaatgaggaaagtgattaccacaccttaccacgagccaggataatgcaaaggaaaagaggactggagtggtttgtctgtgatggctggaagttcctctgtaccagttgctgtggttggctgataaatatttgtcgaagaaagaaagagctgaaagctcgcacagtatggcttggatgtcctgaaaagtgtgaagaaaaacatcccaggaattctataaaaaatcaaaaatacaatgtgtttacctttatacctggggttttgtatgaacaattcaagtttttcttgaatctctattttctagtaatatcctgctcacagtttgtaccagcattgaaaataggctatctctacacctactgggctcctctgggatttgtcttggctgttactatgacacgggaagcaattgatgaatttcggcgttttcagcgtgacaaggaagtgaattcacaactatatagcaagcttacagtaagaggtaaagtgcaagttaagagttcagacatacaagttggagacctcatcatagtggaaaagaatcaaagaattccatcggacatggtgtttcttaggacttcagaaaaagcaggttcgtgttttattcgaactgatcaactagatggtgaaactgactggaagctgaaggtggcagtgagctgcacgcaacagctgccggctctgggggaccttttttctatcagtgcttatgtttatgctcagaaaccacaaatggacattcacagtttcgaaggcacatttaccagggaagacagtgacccgcccattcatgaaagtctcagcatagaaaatacattgtgggcaagcaccattgttgcatcaggtactgtaataggtgttgtcatttataccggaaaagagactcgaagtgtaatgaacacatccaatccaaaaaataaggttggtttgttggaccttgaactcaatcggctgacgaaagcgctatttttggctttagttgctctttccattgttatggtaaccttacaaggatttgtgggtccatggtaccgcaatctttttcggttccttctcctcttttcttacatcattcccataagtttgcgtgtgaacttggacatgggcaaagcggtgtatggatggatgatgatgaaagatgagaacatccctggcacggtcgttcggaccagcactatcccagaggaacttgggcgcctggtgtatttattgacagacaaaacaggggcctcacccctgcttttctttctttttttgtattgtcaaaattgtatttccatattgaagcagcttgagtttctactgaaaatgagcccgaattatttcactattactgtaaagggttcatcttactctggcattctgagaattagactgaaagtttaatttctgcagttccctcatattcagattctttctttgatgttataacacaaagtcattcctactcaaatgtaataaaattgaggctccacgg

SEQ ID NO: 109764 - DNA, 549 bp, Homo sapiens
  Payload ID: 1553
  Gene Symbol: ATP9B
  Gene Name: ATPase, class II, type 9B
  ENST ID: ENST00000589326
  CDS Start-End: 1-438
tgtcacaacgtgacccccgtgtatgagtctcgggccggcgttactgaggagactgagttcgcagaggctgaccaagacttcagtgatgagaatcgcacctaccaggcttccagcccggatgaggtcgctctggtgcagtggacagagagtgtgggcctcacgctggtcagcagggacctcacctccatgcagctgaagacccccagtggccaggtcctcagcttctgcattctgcagctgtttcccttcacctccgagagcaagcggatgggcgtcatcgtcagggatgaatccacggcagaaatcacattctacatgaagggcgctgacgtggccatgtctcctatcgtgcagtataatgactggctggaagaggagaggtcactattccaattcctaaacaggagacgggaagagacacagctgttggatgcataaagaagggtgctagacccacgcctctcctccagcccttcctgccatccctgcagcctccagtccaacgtcaaatacaatcaactggatgaattaaaaagaaattgcaaataa

SEQ ID NO: 109765 - DNA, 427 bp, Homo sapiens
  Payload ID: 1553
  Gene Symbol: ATP9B
  Gene Name: ATPase, class II, type 9B
  ENST ID: ENST00000588600
  CDS Start-End: 127-427
gcttggcggaggcggggaaggcccgcaggcggcgcctcagccggggttggcgctgaggggagagggcggggaaaaggtggcgaattgaggggaaagtgggaggggcgggaaaggggcggtcggaacatggcggaccagatcccgctttacccggtgcgtagcgcagcggcggccgcagccaaccgcaaacgcgcggcctactacagcgccgcggggcccaggccgggagccgaccggcacagcaggaacgagcatccggcacccttgtgcatgtaccctacaatgactgccaggcttggatggatgtccccactcctgacttggtctgccctgacaccacctgggcaatggggagagtgtcttcctacggctggggcgtgtgggagtccaggcttcacgcactctttgctgttcaatgtaggtacca

SEQ ID NO: 109766 - DNA, 1511 bp, Homo sapiens
  Payload ID: 1553
  Gene Symbol: ATP9B
  Gene Name: ATPase, class II, type 9B
  ENST ID: ENST00000588921
  CDS Start-End: 1-421
tatcatctccaccatgcaggctgtgttttcctcagtcttctacttcgcatccgtccctttgtatcagggcttcctcatggtggggtatgccaccatatacaccatgttcccagtgttctccttagtgctggaccaggacgtgaagccagagatggcgatgctctacccggagctgtacaaggacctcaccaagagccaacaagacggcaggtcaaacagaagacaacatgaacgtctaacctcaggcaccagtggacacgtgtgggacccaggcagcttcttcaggattcgggtgtcaggaaaaggcgcccgaaatgctgggaagatccttgtccttcaaaaccttcctcatctgggttttaataagtatttaccaaggcggcatcctcatgtatggggccctggtgctcttcgagtctgagttcgtccacgtggtggccatctccttcaccgcactgatcctgaccgagctgctgatggtggcgctgaccgtccgcacgtggcactggctgatggtggtggccgagttcctcagcttaggctgctacgtgtcctcactcgcttttctcaatgaatattttggtataggcagagtgtcttttggagctttcttagatgttgcctttatcaccaccgtgaccttcctgtggaaagtgtcggcgatcaccgtggtcagctgcctcccgctgtatgtcctcaagtacctgaggcgcaagctctctcctcccagctactgcaagctggcctcctaaggggctgtgcacccccagcgggctggccccagcaccttctgcccttcccagcaccttgtgcccttgccagtgaacgcagggtttgccattgctaccaagcaagcaccacaagaaagggagggtacgccaggcgagcccagggcacagatgctgagacagcctctccttctcagtgcagggacgtcacccctgccaggcaagcccagggcacagatgccaggatggcttctccctctcagtgcgaggcttcacccctgccaggcaagcccagggcatagatgctgagacagcctctccctctcagtgcagggacgtcacccctgccaggcaagcccagggcacagaggccgggacggcctctccctctcagtgtgaggcttcacccatgctaggcaagcccagggcacagatgccgggatggcccctccctctcagtgcgggaacgtcacccctgccaggcaagcccagggcacagatgctgcgatggcctcttcctcttaagtgtggggcctcacccctgcttttctttctttttttgtattgtcaaaattgtatttccatattgaagcagcttgagtttctactgaaaatgagcccgaattatttcactattactgtaaagggttcatcttactctggcattctgagaattagactgaaagtttaatttctgcagttccctcatattcagattctttctttgatgttataacacaaagtcattcctactcaaatgtaataaaattgaggctccacgga

SEQ ID NO: 109767 - DNA, 344 bp, Homo sapiens
  Payload ID: 1553
  Gene Symbol: ATP9B
  Gene Name: ATPase, class II, type 9B
  ENST ID: ENST00000587878
  CDS Start-End: 1-56
aaaatacattgtgggcaagcaccattgttgcatcaggttggtttgttggaccttgaactcaatcggctgacgaaagcgctatttttggctttagttgctctttccattgttatggtaaccttacaaggatttgtgggtccatggtaccgcaatctttttcggttccttctcctcttttcttacatcattcccataagtttgcgtgtgaacttggacatgggcaaagcggtgtatggatggatgatgatgaaagatgagaacatccctggcacggtcgttcggaccagcactatcccagaggaacttgggcgcctggtgtatttattgacagacaaaacaggtac

SEQ ID NO: 109768 - DNA, 467 bp, Homo sapiens
  Payload ID: 1553
  Gene Symbol: ATP9B
  Gene Name: ATPase, class II, type 9B
  ENST ID: ENST00000588895
  CDS Start-End: 1-242
agtgcggaaacatggctcgcgaaggactgcggaccctcgtggttgcaaagaaggcgttgacagaggagcagtaccaggactttgaggtccctcaaggtggccgcggtagtcgagagcctggagagggagatggaactgctgtgcctcaccggcgtggaggaccagctgcaggcagacgtgcggcccacgctggagatgctgcgcaacgccgggatcaagatatggatgctaacaggcgataaactcgagacagctacctgcattgccaaaagttcacatctcgtgtctagaacacaagatattcatattttcagacaggtaaccagtcggggagaggcacatttggagctgaatgcatttcgaaggaagcatgattgtgcactagtcatatctggggactctctggaggtttgtctaaagtactacgagcatgaatttgtggagctggcctgccagtgccctgccgt

SEQ ID NO: 109769 - DNA, 1650 bp, Homo sapiens
  Payload ID: 1553
  Gene Symbol: ATP9B
  Gene Name: ATPase, class II, type 9B
  ENST ID: ENST00000586722
  CDS Start-End: 4-570
aacatggcggaccagatcccgctttacccggtgcgtagcgcagcggcggccgcagccaaccgcaaacgcgcggcctactacagcgccgcggggcccaggccgggagccgaccggcacagcaggtaccagctggaggatgagtctgcgcatttggatgaaatgccactaatgatgtctgaagaaggctttgagaatgaggaaagtgattaccacaccttaccacgagccaggataatgcaaaggaaaagaggactggagtggtttgtctgtgatggctggaagttcctctgtaccagttgctgtggttggctgataaatatttgtcgaagaaagaaagagctgaaagctcgcacagtatggcttggatgtcctgaaaagtgtgaagaaaaacatcccaggaattctataaaaaatcaaaaatacaatgtgtttacctttatacctggggttttgtatgaacaattcaagtttttcttgaatctctattttctagtaatatcctgctcacagtttgtaccagcattgaaaataggctatctctacacctactgggctcctctgatgacatgattgtttatctagaaaaccccatcgtctcagcccaaaatctccttaagctgataagcaacttcagcaaagtctcaggatacaaaatcaatgtacaaaaatcacaagcattcttatacaccaacaacagacaaacagagagccaaatcatgaatgaactcccattcacaattgcttcaaagagaataaaatacctaggaatccaacttacaagggatgtgaaggacctcttcaaggagaactacaaaccactgctcaaggaaataaaagaggacacaaacaaatggaagaacattccatgctcatgggtaggaagaatcaatatcgtgaaaatggccatactgcccaaggtaatttacagattcaatgccatccccatcaagctaccaatgactttcttcacagaattggaaaaaactactttacagttcatatggaaccaaaaaagagtctgcatcgccaaatcaatcctaagccaaaagaacaaagctggaggcatcacactacctgacttcaaactatactacaaggctacagtaaccaaaacagcatggtactggtaccaaaacagagatatagatcaatggaacagaagagagccctcagaaataatgccgcatatctacaactatctgatctttgacaaacctgagaaaaacaagcaatggggaaaggattccctatttaataaatggtgctgggaaaactggctagccatatgtagaaagctgaaactggatcccttccttacaccttatacaaaaatcaattcaagatggattaaagatttaaacgttagacctaaaaccataaaaaccctagaagaaaacctaggcaataccattcaggacataggcatgggcaaggacttcatgtccaaaacaccaaaagcaatggcaacaaaagccaaaattgacaaatgggatctaattaaactcaagagcttctgcacagcaaaagaaactaccatcagagtgaacaggcaacctacaacatgggagaaaattttcgcaacctactcatctgacaaagggctaatatccagaatctacaatgaactcaaacaaatttacaagaaaaaaa

SEQ ID NO: 109770 - DNA, 2845 bp, Homo sapiens
  Payload ID: 1553
  Gene Symbol: ATP9B
  Gene Name: ATPase, class II, type 9B
  ENST ID: ENST00000586366
  CDS Start-End: 20-889
ggaaaggggcggtcggaacatggcggaccagatcccgctttacccggtgcgtagcgcagcggcggccgcagccaaccgcaaacgcgcggcctactacagcgccgcggggcccaggccgggagccgaccggcacagcaggtaccagctggaggatgagtctgcgcatttggatgaaatgccactaatgatgtctgaagaaggctttgagaatgaggaaagtgattaccacaccttaccacgagccaggataatgcaaaggaaaagaggactggagtggtttgtctgtgatggctggaagttcctctgtaccagttgctgtggttggctgataaatatttgtcgaagaaagaaagagctgaaagctcgcacagtatggcttggatgtcctgaaaagtgtgaagaaaaacatcccaggaattctataaaaaatcaaaaatacaatgtgtttacctttatacctggggttttgtatgaacaattcaagtttttcttgaatctctattttctagtaatatcctgctcacagtttgtaccagcattgaaaataggctatctctacacctactgggctcctctgggatttgtcttggctgttactatgacacgggaagcaattgatgaatttcggcgttttcagcgtgacaaggaagtgaattcacaactatatagcaagcttacagtaagaggtaaagtgcaagttaagagttcagacatacaagttggagacctcatcatagtggaaaagaatcaaagaattccatcggacatggtgtttcttaggacttcagaaaaagcaggaccttttttctatcagtgcttatgtttatgctcagaaaccacaaatggacattcacagtttcgaaggcacatttaccagggaagacagtgacccgcccattcatgaaagtctcagcatagaaaatacattgtgggcaagcaccattgttgcatcaggttggtttgttggaccttgaactcaatcggctgacgaaagcgctatttttggctttagttgctctttccattgttatggtaaccttacaaggatttgtgggtccatggtaccgcaatctttttcggttccttctcctcttttcttacatcattcccataaggtaagtttaaaaatgaaaataaaacaaatgtctggtttcattgagtatgattttattgaatttatctttctcagtatgaaagaaattacccaaacaaagctagagaagtaggagccagaagttctgaggaatcttgaggaattcttctgtggaaatgttgttgggggagacgtcatcagtgccggtagaatgatctagaggtgccatactttcctgatagtgaatgtgttgatggtgtcttcttcaacaatcagaagatatttcctgatgaaacataaaccagaatttcacaaaattagttttgttttttgctgatagacttttaaatgtccagtgccctttgatctgtgtggaatcactggcattttaaagttctgtttaatatatctaatatctgtcaagttagataaaatattaaggctgtgttttagtagggactatcatttcagaatgttaacctatattataactacagattggaatataaatagttcatattagatgcctatttaatgtaaagactaatattttaccatataaacataaatccattttaaactattttctaaaatattttaagaaagatattcttaatatatatgatttaaaattttcataggaatgagcaactgaaacctaatgatggataaagtatgaatctagaatatctaccttttgtaacagagaatggactaaaacggtatagaatgcttaggctcaaggatgtagccactttgaagagaaagatatctctatttctaaaccagctttctccaaaatttgctctaaaaggtgatgtctcttccatttacttacgtcataaagtcagagctataatctgttcttgggatgtgtacacactgcactgccctcacaggcagtcaccaggaatgaatccagttgctctcacccagtctgttcgagaggtaggaaatcagcctcctttctgcccgtcacagtacagattcctgtggatgctgccttccatggtgttgctggttcacgggtggccaggcctgtgcagagagcacgcagcaaatagcaacttctcattgcggctgtgtaacttgctgctgacatagattttctgcactccataaagctgactgcagagatggctgttccagcctggcttgtggattaaacctaataaggcccagcttccccgctctcctctcccaccacactgcagctatccccatgtgccagctgcttcccaccctagctgtgtcctctgcttcagtgctcctctacctcatcattccatggctgggcttgtcttgtcactcggctcttaccctaaatacctttcctcagagaggctgcgtttgtctgctcagtacagaccaagaaacagccagccacttgctatcatagcagcctattgaattctgtgtagatctctatgacattcatcttgtttgttgcctgtttctctcttctcactaagccctgtgagaatagaggccttgtatgtcccgtttgttgttgtgtcctagttaggacctagaacggagcacgcttgggatgtggtagggcctctgtaagtatttgttgaatggacccattacaaaggccccatcctgctcagaggacccgagcgcagattgtcacagttcttgtgccggcatgtattgagtgccacaggtggactctggagacacaatctttgtcctcaaaataccccccgcccactggctaagtggcaataaacaaactataaccagaaa

SEQ ID NO: 109771 - DNA, 509 bp, Homo sapiens
  Payload ID: 1553
  Gene Symbol: ATP9B
  Gene Name: ATPase, class II, type 9B
  ENST ID: ENST00000587919
  CDS Start-End: 1-112
gctggaccaggacgtgaagccagagatggcgatgctctacccggagctgtacaaggacctcaccaagttcgccaaggtagcacagactgcagcactctgcgttgttgtctgatgatcggggcagctggagactggatgtgccaacgcagtttatccacaccggtcagtgtcagtggacaccaagtccccagtccgtcggctcaagctcctgcgatgtaggacaacatagccctgctctcaacaagtctgtattctagtcaggatgagaaagcagtgaatcagtggcatagagcaacagcataaagggccgcggcctgcagtggaagatccttgtccttcaaaaccttcctcatctgggttttaataagtatttaccaaggcggcatcctcatgtatggggccctggtgctcttcgagtctgagttcgtccacgtggtggccatctccttcaccgcactgatcctgaccgagctgctgatggtggcgctgaccgtccgcacgtggcactg

SEQ ID NO: 109772 - DNA, 1784 bp, Homo sapiens
  Payload ID: 1553
  Gene Symbol: ATP9B
  Gene Name: ATPase, class II, type 9B
  ENST ID: ENST00000590477
  CDS Start-End: 1-603
ctagtcatatctggggactctctggaggtttgtctaaagtactacgagcatgaatttgtggagctggcctgccagtgccctgccgtggtttgctgccgctgctcacccacccagaaggcccgcattgtgacactgctgcagcagcacacagggagacgcacctgcgccatcggtgatggaggaaatgatgtcagcatgattcaggcagcagactgtgggattgggattgagggaaaggagggtaaacaggcctcgctggcggccgacttctccatcacgcagttccggcacataggcaggctgctcatggtgcacgggcggaacagctacaagaggtcggcggcactcggccagttcgtcatgcacaggggccttatcatctccaccatgcaggtatgccaccatatacaccatgttcccagtgttctccttagtgctggaccaggacgtgaagccagagatggcgatgctctacccggagctgtacaaggacctcaccaagggaagatccttgtccttcaaaaccttcctcatctgggttttaataagtatttaccaaggcggcatcctcatgtatggggccctggtgctcttcgagtctgagttcgtccacgtggtggccatctccttcaccgcactgatcctgaccgagctgctgatggtggcgctgaccgtccgcacgtggcactggctgatggtggtggccgagttcctcagcttaggctgctacgtgtcctcactcgcttttctcaatgaatattttgatgttgcctttatcaccaccgtgaccttcctgtggaaagtgtcggcgatcaccgtggtcagctgcctcccgctgtatgtcctcaagtacctgaggcgcaagctctctcctcccagctactgcaagctggcctcctaaggggctgtgcacccccagcgggctggccccagcaccttctgcccttcccagcaccttgtgcccttgccagtgaacgcagggtttgccattgctaccaagcaagcaccacaagaaagggagggtacgccaggcgagcccagggcacagatgctgagacagcctctccttctcagtgcagggacgtcacccctgccaggcaagcccagggcacagatgccaggatggcttctccctctcagtgcgaggcttcacccctgccaggcaagcccagggcatagatgctgagacagcctctccctctcagtgcagggacgtcacccctgccaggcaagcccagggcacagaggccgggacggcctctccctctcagtgtgaggcttcacccatgctaggcaagcccagggcacagatgccgggatggcccctccctctcagtgcgggaacgtcacccctgccaggcaagcccagggcacagatgctgcgatggcctcttcctcttaagtgtggggcctcacccctgcttttctttctttttttgtattgtcaaaattgtatttccatattgaagcagcttgagtttctactgaaaatgagcccgaattatttcactattactgtaaagggttcatcttactctggcattctgagaattagactgaaagtttaatttctgcagttccctcatattcagattctttctttgatgttataacacaaagtcattcctactcaaatgtaataaaattgaggctccacggaggcccgtgtccacatcagctgcagctcccactcagacagacggcctgccccacagcctgccctttgctgaagataccctcgctttatacttgcatttcgcttttcagtaaaaacagtcaagtta

SEQ ID NO: 109773 - DNA, 583 bp, Homo sapiens
  Payload ID: 1553
  Gene Symbol: ATP9B
  Gene Name: ATPase, class II, type 9B
  ENST ID: ENST00000586672
  CDS Start-End: 6-583
ggaacatggcggaccagatcccgctttacccggtgcgtagcgcagcggcggccgcagccaaccgcaaacgcgcggcctactacagcgccgcggggcccaggccgggagccgaccggcacagcagttgctgtggttggctgataaatatttgtcgaagaaagaaagagctgaaagctcgcacagtatggcttggatgtcctgaaaagtgtgaagaaaaacatcccaggaattctataaaaaatcaaaaatacaatgtgtttacctttatacctggggttttgtatgaacaattcaagtttttcttgaatctctattttctagtaatatcctgctcacagtttgtaccagcattgaaaataggctatctctacacctactgggctcctctgggatttgtcttggctgttactatgacacgggaagcaattgatgaatttcggcgttttcagcgtgacaaggaagtgaattcacaactatatagcaagcttacagtaagaggtaaagtgcaagttaagagttcagacatacaagttggagacctcatcatagtggaaaagaatcaaagaattccatcggacatggt

SEQ ID NO: 109774 - DNA, 447 bp, Homo sapiens
  Payload ID: 1553
  Gene Symbol: ATP9B
  Gene Name: ATPase, class II, type 9B
  ENST ID: ENST00000589732
  CDS Start-End: 1-423
ttcagtgatgagaatcgcacctaccaggcttccagcccggatgaggtcgctctggtgcagtggacagagagtgtgggcctcacgctggtcagcagggacctcacctccatgcagctgaagacccccagtggccaggtcctcagcttctgcattctgcagctgtttcccttcacctccgagagcaagcggatgggcgtcatcgtcagggatgaatccacggcagaaatcacattctacatgaagggcgctgacgtggccatgtctcctatcgtgcagtataatgactggctggaagaggaggagacgggaagagacacagctgttggatgcataaagaagggtgctagacccacgcctctcctccagcccttcctgccatccctgcagcctccagtccaacgtcaaatacaatcaactggatgaattaaaaagaaattgcaaataata

SEQ ID NO: 109775 - DNA, 128 bp, Homo sapiens
  Payload ID: 1553
  Gene Symbol: ATP9B
  Gene Name: ATPase, class II, type 9B
  ENST ID: ENST00000619535
  CDS Start-End: 10-128
ggtcggaacatggcggaccagatcccgctttacccggtgcgtagcgcagcggcggccgcagccaaccgcaaacgcgcggcctactacagcgccgcggggcccaggccgggagccgaccggcacagcag

SEQ ID NO: 109776 - DNA, 138 bp, Homo sapiens
  Payload ID: 1553
  Gene Symbol: ATP9B
  Gene Name: ATPase, class II, type 9B
  ENST ID: ENST00000633900
  CDS Start-End: 20-138
ggaaaggggcggtcggaacatggcggaccagatcccgctttacccggtgcgtagcgcagcggcggccgcagccaaccgcaaacgcgcggcctactacagcgccgcggggcccaggccgggagccgaccggcacagcag

SEQ ID NO: 109777 - DNA, 124 bp, Homo sapiens
  Payload ID: 1553
  Gene Symbol: ATP9B
  Gene Name: ATPase, class II, type 9B
  ENST ID: ENST00000633276
  CDS Start-End: 6-124
ggaacatggcggaccagatcccgctttacccggtgcgtagcgcagcggcggccgcagccaaccgcaaacgcgcggcctactacagcgccgcggggcccaggccgggagccgaccggcacagcag

SEQ ID NO: 109778 - DNA, 122 bp, Homo sapiens
  Payload ID: 1553
  Gene Symbol: ATP9B
  Gene Name: ATPase, class II, type 9B
  ENST ID: ENST00000633385
  CDS Start-End: 4-122
aacatggcggaccagatcccgctttacccggtgcgtagcgcagcggcggccgcagccaaccgcaaacgcgcggcctactacagcgccgcggggcccaggccgggagccgaccggcacagcag

SEQ ID NO: 109779 - DNA, 133 bp, Homo sapiens
  Payload ID: 1553
  Gene Symbol: ATP9B
  Gene Name: ATPase, class II, type 9B
  ENST ID: ENST00000632485
  CDS Start-End: 15-133
ggggcggtcggaacatggcggaccagatcccgctttacccggtgcgtagcgcagcggcggccgcagccaaccgcaaacgcgcggcctactacagcgccgcggggcccaggccgggagccgaccggcacagcag

SEQ ID NO: 109780 - DNA, 421 bp, Homo sapiens
  Payload ID: 1553
  Gene Symbol: ATP9B
  Gene Name: ATPase, class II, type 9B
  ENST ID: ENST00000633932
  CDS Start-End: 127-421
gcttggcggaggcggggaaggcccgcaggcggcgcctcagccggggttggcgctgaggggagagggcggggaaaaggtggcgaattgaggggaaagtgggaggggcgggaaaggggcggtcggaacatggcggaccagatcccgctttacccggtgcgtagcgcagcggcggccgcagccaaccgcaaacgcgcggcctactacagcgccgcggggcccaggccgggagccgaccggcacagcaggaacgagcatccggcacccttgtgcatgtaccctacaatgactgccaggcttggatggatgtccccactcctgacttggtctgccctgacaccacctgggcaatggggagagtgtcttcctacggctggggcgtgtgggagtccaggcttcacgcactctttgctgttcaatgtag

SEQ ID NO: 109781 - DNA, 136 bp, Homo sapiens
  Payload ID: 1553
  Gene Symbol: ATP9B
  Gene Name: ATPase, class II, type 9B
  ENST ID: ENST00000633480
  CDS Start-End: 18-136
aaaggggcggtcggaacatggcggaccagatcccgctttacccggtgcgtagcgcagcggcggccgcagccaaccgcaaacgcgcggcctactacagcgccgcggggcccaggccgggagccgaccggcacagcag

SEQ ID NO: 109782 - DNA, 6680 bp, Homo sapiens
  Payload ID: 1554
  Gene Symbol: ATP10A
  Gene Name: ATPase, class V, type 10A
  Uniprot ID: O60312
  ENST ID: ENST00000356865
  CDS Start-End: 113-4612
ccgcaggcggggagctcgcaccgccgcgcccgggccgcgagtgatgataacctaagaggccggcgcgggcgggcgtgagcggcggaggagccgggcgcggcgacacgcggccatggagcgggagccggcggggaccgaggagcccgggcctccgggacggcggaggcgccgagagggcaggacgcgcacggtgcgctccaacctgctgccgcccccgggcgccgaggaccctgcggctggcgcggccaagggcgagcggcgacggcggcgcgggtgtgcccagcacctggccgacaaccggctcaagactaccaagtacacgctgctgtccttcctgcccaagaacctgttcgagcagttccaccgcccggccaacgtgtactttgtcttcatcgcgctgctcaacttcgtgccggcggtgaacgccttccagcccggcctggcactggcgccggtgctcttcatcctggccatcacggccttcagggacctgtgggaggactacagccgccaccgctccgaccacaagatcaaccacctgggctgcctggtcttcagcagggaagaaaagaaatacgtgaaccgattctggaaagaaatccacgtgggagactttgtgcgtcttcgctgcaacgaaatcttccctgcggacattctgctgctctcctccagtgaccccgacgggctatgccacatcgagaccgccaacctggatggagagaccaacctgaagcggcggcaggtggtccgcggcttctcggagcttgtctccgaattcaatcctttgacgttcaccagcgtgatcgaatgcgagaagccaaacaacgacctgagtaggtttcgcggctgcatcatacatgacaacgggaaaaaggccgggctgtataaagaaaacctgctgctgaggggctgcacccttaggaacacggacgcagtcgtcggcattgtcatctacgcaggacatgaaaccaaggctctgctgaacaacagtgggccccgctacaagcgcagcaagctggagaggcagatgaactgcgacgtgctctggtgtgtcctgctccttgtttgcatgtctctgttttcagcagtcggacatggactgtggatatggcggtatcaagagaagaagtcattattttatgtccccaagtctgatggaagctccttatccccagtcacagctgcagtttactcatttttaacaatgataatagttctgcaggttttgatcccaatttccttatacgtttccattgaaattgttaaagcatgccaagtgtacttcattaaccaggacatgcagttgtatgacgaagaaacagactcgcagctgcagtgccgagctctgaacatcacggaagacttaggacagatacagtacattttctcagataaaactggcactttgacagagaataagatggttttccgaagatgcactgtgtctggtgtagaatattctcatgatgcaaatgcgcagcgtctggccaggtaccaagaggcagactcggaggaggaggaggtggtgcccagagggggctcggtgtcccagcgcggcagcatcggcagccaccagagtgtccgggtggtgcacagaacccagagcaccaagtcccaccggcgcacgggcagccgggccgaggccaagagggccagcatgctgtccaagcacacggccttcagcagccccatggagaaggatatcacgcccgacccaaagctgctggagaaggtgagtgagtgtgacaagagcctagccgtggcgaggcatcaggagcacctgctggcccacctctcgcctgagctgtctgacgtctttgatttcttcatcgcactcaccatctgcaacacagtcgtcgtcacgtccccggatcagccacgaacaaaggtgagggtgaggtttgagctgaagtccccggtgaagacgatagaagacttcctgcggaggttcacacccagctgcctgacctcaggctgcagcagcatcgggagcctggccgccaacaagtccagccacaagttgggctccagcttcccgtccaccccgtccagcgacggcatgcttctcaggctggaggagaggctgggccagcccacctcggccatcgccagcaacggctacagcagccaggcggacaactgggcctcggagcttgctcaggagcaggagtcagagcgcgagctgcggtacgaggcggagagcccggatgaggccgcactggtgtatgcggccagagcctacaactgcgtgcttgtggagcggctgcacgaccaagtgtcagtggagctgccccacctgggcaggctcaccttcgagctcctgcacacactgggtttcgattccgtccgcaagaggatgtcagtggtgatccggcacccgcttaccgatgagatcaacgtctacaccaagggggccgactcagtggtcatggatctcctgcagccctgctcttcagttgacgccagagggaggcatcaaaaaaagattcggagcaaaactcagaattacctcaacgtgtatgcggcggaaggcctgcgcaccttgtgcatcgccaagagagttctgagtaaagaagagtatgcctgctggttgcaaagccacctagaagccgaatcctccctggaaaacagcgaggagctcctcttccagtctgccattcgcctggagaccaacctgcacttgttaggtgccactgggattgaagaccgcctgcaggacggagtccctgaaactatttctaaattgcgtcaagcgggcctgcagatttgggttctcactggtgacaaacaagaaacagctgtcaacattgcatatgcctgcaaactgctggaccacgacgaggaggtcatcaccctgaatgccacctcccaggaggcgtgtgcagccctgctagaccagtgcctatgctacgtgcagtccagaggcctccagagagcccctgagaagaccaagggcaaagtgagcatgaggttctcctctctctgcccaccctccacgtccactgcctctggccgcagacccagcctcgtgatcgatgggagaagcctggcctacgctctcgagaaaaacctggaggacaaattcctcttccttgccaagcagtgccgctccgtcctctgctgtcggtcgacgcctctgcagaagagcatggtggtgaagctggtgcggagcaagctcaaggccatgaccctggccataggtgatggagccaatgatgtcagcatgatccaggtggcagatgtgggtgtgggaatctccggccaggagggtatgcaggcagtgatggccagcgactttgcagtgccgaaattccgatacctggagaggctcttgattcttcacgggcattggtgctactcccgacttgccaacatggtgctgtacttcttctacaaaaacacaatgttcgtgggcctcctgttttggttccagtttttctgtggcttctctgcatctaccatgattgaccagtggtatctaatcttctttaatctgctcttctcgtcacttcccccgctcgtgactggggtgctggacagggatgtgccagccaatgtgctgctgaccaacccgcagctctacaagagtggccagaacatggaggaataccggccacgaacgttctggtttaacatggccgacgccgccttccagagcctggtttgcttttccattccttacctggcctactatgactcgaacgtggacctgtttacctgggggacccctattgtgacaatcgcgctgctcactttcctgctccacctgggcattgaaaccaaaacctggacctggctcaactggataacgtgtggcttcagtgtccttttgtttttcaccgtggctttgatttacaatgcgtcttgtgccacgtgctatcctccgtccaacccttactggactatgcaagccttactgggtgacccagtgttttacttgacttgcctgatgacgcctgtcgctgcactgctgcccagattgtttttcagatccctccaggggagggttttccccacacaacttcagctggcacgtcagttgaccaggaagtcccccaggagatgcagtgctcccaaagagacctttgctcagggacgcctcccgaaggactcgggaaccgagcactcatcagggaggacagtcaagacctctgtgcccctgtcccagccttcttggcacacacagcagccggtctgctccctggaggccagcggggagcccagcacagtggacatgagcatgccagtgagggagcacaccctgctggaggggctgagcgcaccggcccccatgtcctctgcgccaggggaggctgtcctgaggagtccaggagggtgtcctgaggagtccaaggtgagagctgccagcaccggcagggtgacccccctgtcttccctcttcagcctgcctaccttcagcttactcaactggatttcctcctggtcgctggtcagcaggctggggagtgtcttacagttctcccggacggagcagcttgcagatggacaagcgggacgtggacttcctgtccagccccactcaggccgatcaggacttcaagggccagaccacagactacttataggagcatcttcaaggcggtcacagtgaaaaccttgaaatggccttttttaatatatataaataaatgttaatattatttatgtttattatttgcacagaagagttctagggagatgtatttctaaatgtttcccaggctaatacaggaaacaagaggtaccaaaaaagaaagtttattttttaaaattctaagtagagtatattgaaaagaaaaagaagagccttaacatatataaaagtttaaagaagagtaacacttgaaaagtgtgtttagatttattttttcatctcatttttaagaacaagcagtacgatttgttttcttcaacatgtgtgactgcgcactgagtacaaatgtgtgactgctcatggttaatgcaggcaggtgtgaacatgggggaacaatgagcagagatggcagagggcagagcacatggcccccagaggcttccagtctcactgacacaggagggctgggctccacttcatccagatgaaggaaaggaagacctcaagaaaaattcacagttgagtgcatcccagcattctgttccgggcaggcatttcaggaagaccgccttgtaggtattacatccctggtgtcgtattttgcctgttaaatcgtaacaagcaataaacaactttcactttgcaaagacagtgtgtccagttaccactggtgtatgaaatgattaatacctgacctcacagagtatgatctcagggcacttccgtaaggcaagtccttttagaggctatgaagaaaacagctgcatggcacataccaaagctgctgcacagctggccaccatggcaccctgcaccaggccatcagcaccacgtgccaaggagctcagcggtcttcaggcatttttgtaatgagccattagttctgtccctctaaaactagaaaaggaagggcaggaaatgataacaacccaaggcaatgatatggcatgtcatcttccgagcccttctttctactttgtcaaacagttcttagttgctggctctgctcggcaccgggactgtgaagggtgtactccctgctgtgtgggagggacctagggcctctttggatgctgtcttcgaggacagcaatgcagagagggcataggatctgaggacaaggaaattcctcagcatggcgtatcaggaaagcatggctcattctgcaatgagccatgagtgtgggccatcgcaagtcacagaaaatgcacctcattccagtcaagcagaaaaacaggcacaggctcagtgtaggtcccaagagagggtgcctggactcagcaactcagacctgggcttttctcccagctttcagggacagctttgtcctgagtctgcctctgttcacggggatgcttggctggagtcacccccaggacttatccatgcatcactattcagaagacacagagggcccctctctccacattccaaacagagtcctggtttcctcagcctcaccctgcatagcttgcacaacatcctcagaaccattcactggcaaatggaggggaacgtgctgactgggactcccagctggagctgggaggagaggtccacttcccttagaacacctgagctgctgcatgagtggacgtcagaagaatctctatgccctgttaaatggggagacaaaggggtggtgggggcttcagccagtgatttcggaccgaaggtgacagccgtcccaaccctgcccagcctgatgccacctcctctgttcttggaacaacgcataggaaaagaatctcctttggaaggtgacactgctccctgaattaaggtaatggttgcgagcaccaagtacaaggactagacgcatatttacctgcgtatctgagagttccagattcccagcttccagatgatccttgcacagacaacctaccttctttccagaggatgtctttctcctctggagagtagatgcttgctcttgggaaacggaatgaccttggcgctggcttcaggaatatgcatcccacagccagtttagagaaatacatgttgtaaatggcattgacagctgctctttaggatggggagtattatggaaatccacaataacaatctatggcaagcaact

SEQ ID NO: 109783 - DNA, 1186 bp, Homo sapiens
  Payload ID: 1554
  Gene Symbol: ATP10A
  Gene Name: ATPase, class V, type 10A
  Uniprot ID: O60312
  ENST ID: ENST00000389967
  CDS Start-End: 263-730
aggataaggagacctctcaccttggggctgggcctgaaccagggaggggctgaagaaaatcagcaagctggttcccctcagggcctcaagggacctctgcctgaggaatcagcatttggctttgtaagcaccaggagtactcctggaagctccagggcggggagctcgcaccgccgcgcccgggccgcgagtgatgataacctaagaggccggcgcgggcgggcgtgagcggcggaggagccgggcgcggcgacacgcggccatggagcgggagccggcggggaccgaggagcccgggcctccgggacggcggaggcgccgagagggcaggacgcgcacggtgcgctccaacctgctgccgcccccgggcgccgaggaccctgcggctggcgcggccaagggcgagcggcgacggcggcgcgggtgtgcccagcacctggccgacaaccggctcaagactaccaagtacacgctgctgtccttcctgcccaagaacctgttcgagcagttccaccgcccggccaacgtgtactttgtcttcatcgcgctgctcaacttcgtgccggcggtgaacgccttccagcccggcctggcactggcgccggtgctcttcatcctggccatcacggccttcagggacctgtgggaggactacagccgccaccgctccgaccacaagatcaaccacctgggctgcctggtcttcagcagccgctcccacctgaagtgaaaggcaggaaaagccagcctggccccctggcctgaagtccctgcctcagtcttcggccaggcacagtggtctctgaacagccggcacaggacagtaaagctcagtctgctaacagctcggctcaggacagcagcaaagtgaaactgccgccaagtgctgatatgtctggcacggcccaggagagccccttggtagatccatcttggagctgtgtccagcagcctggaccacctcaaggccctgtccctgagaaaggatgcaggatgaacattacaaaatgctgatgaaaaatatcaaggaacatctgaataaatggagagacttcccatgttcatggatcggaaaatgaacataataacatacacaagcttattctacgtggaaaaacacaggtccaaaaatgtccacaagatttctcaaaaagaataataaagtggaagcactcacttctcccaa

SEQ ID NO: 109784 - DNA, 6766 bp, Homo sapiens
  Payload ID: 1554
  Gene Symbol: ATP10A
  Gene Name: ATPase, class V, type 10A
  ENST ID: ENST00000555815
  CDS Start-End: 200-1984
catggatcctttggattttgattccagttgatccctggagtaaggtcctaaccggggtctcccgaggtcgtttcgccgtccaggatggagcaggcggggagctcgcaccgccgcgcccgggccgcgagtgatgataacctaagaggccggcgcgggcgggcgtgagcggcggaggagccgggcgcggcgacacgcggccatggagcgggagccggcggggaccgaggagcccgggcctccgggacggcggaggcgccgagagggcaggacgcgcacggtgcgctccaacctgctgccgcccccgggcgccgaggaccctgcggctggcgcggccaagggcgagcggcgacggcggcgcgggtgtgcccagcacctggccgacaaccggctcaagactaccaagtacacgctgctgtccttcctgcccaagaacctgttcgagcagttccaccgcccggccaacgtgtactttgtcttcatcgcgctgctcaacttcgtgccggcggtgaacgccttccagcccggcctggcactggcgccggtgctcttcatcctggccatcacggccttcagggacctgtgggaggactacagccgccaccgctccgaccacaagatcaaccacctgggctgcctggtcttcagcagggaagaaaagaaatacgtgaaccgattctggaaagaaatccacgtgggagactttgtgcgtcttcgctgcaacgaaatcttccctgcggacattctgctgctctcctccagtgaccccgacgggctatgccacatcgagaccgccaacctggatggagagaccaacctgaagcggcggcaggtggtccgcggcttctcggagcttgtctccgaattcaatcctttgacgttcaccagcgtgatcgaatgcgagaagccaaacaacgacctgagtaggtttcgcggctgcatcatacatgacaacgggaaaaaggccgggctgtataaagaaaacctgctgctgaggggctgcacccttaggaacacggacgcagtcgtcggcattgtcatctacgcaggacatgaaaccaaggctctgctgaacaacagtgggccccgctacaagcgcagcaagctggagaggcagatgaactgcgacgtgctctggtgtgtcctgctccttgtttgcatgtctctgttttcagcagtcggacatggactgtggatatggcggtatcaagagaagaagtcattattttatgtccccaagtctgatggaagctccttatccccagtcacagctgcagtttactcatttttaacaatgataatagttctgcaggttttgatcccaatttccttatacgtttccattgaaattgttaaagcatgccaagtgtacttcattaaccaggacatgcagttgtatgacgaagaaacagactcgcagctgcagtgccgagctctgaacatcacggaagacttaggacagatacagtacattttctcagataaaactggcactttgacagagaataagatggttttccgaagatgcactgtgtctggtgtagaatattctcatgatgcaaatgcgcagcgtctggccaggtaccaagaggcagactcggaggaggaggaggtggtgcccagagggggctcggtgtcccagcgcggcagcatcggcagccaccagagtgtccgggtggtgcacagaacccagagcaccaagtcccaccggcgcacgggcagccgggccgaggccaagagggccagcatgctgtccaagcacacggccttcagcagccccatggagaaggatatcacgcccgacccaaagctgctggagaaggtgagtgagtgtgacaagagcctagccgtggcgaggcatcaggagcacctgctggcccacctctcgcctgagctgtctgacgtctttgatttcttcatcgcactcaccatctgcaacacagtcgtcgtcacgtccccggatcagccacgaacaaaggcaaggtgaggtttgagctgaagtccccggtgaagacgatagaagacttcctgcggaggttcacacccagctgcctgacctcaggctgcagcagcatcgggagcctggccgccaacaagtccagccacaagttgggctccagcttcccgtccaccccgtccagcgacggcatgcttctcaggctggaggagaggctgggccagcccacctcggccatcgccagcaacggctacagcagccaggcggacaactgggcctcggagcttgctcaggagcaggagtcagagcgcgagctgcggtacgaggcggagagcccggatgaggccgcactggtgtatgcggccagagcctacaactgcgtgcttgtggagcggctgcacgaccaagtgtcagtggagctgccccacctgggcaggctcaccttcgagctcctgcacacactgggtttcgattccgtccgcaagaggatgtcagtggtgatccggcacccgcttaccgatgagatcaacgtctacaccaagggggccgactcagtggtcatggatctcctgcagccctgctcttcagttgacgccagagggaggcatcaaaaaaagattcggagcaaaactcagaattacctcaacgtgtatgcggcggaaggcctgcgcaccttgtgcatcgccaagagagttctgagtaaagaagagtatgcctgctggttgcaaagccacctagaagccgaatcctccctggaaaacagcgaggagctcctcttccagtctgccattcgcctggagaccaacctgcacttgttaggtgccactgggattgaagaccgcctgcaggacggagtccctgaaactatttctaaattgcgtcaagcgggcctgcagatttgggttctcactggtgacaaacaagaaacagctgtcaacattgcatatgcctgcaaactgctggaccacgacgaggaggtcatcaccctgaatgccacctcccaggaggcgtgtgcagccctgctagaccagtgcctatgctacgtgcagtccagaggcctccagagagcccctgagaagaccaagggcaaagtgagcatgaggttctcctctctctgcccaccctccacgtccactgcctctggccgcagacccagcctcgtgatcgatgggagaagcctggcctacgctctcgagaaaaacctggaggacaaattcctcttccttgccaagcagtgccgctccgtcctctgctgtcggtcgacgcctctgcagaagagcatggtggtgaagctggtgcggagcaagctcaaggccatgaccctggccataggtgatggagccaatgatgtcagcatgatccaggtggcagatgtgggtgtgggaatctccggccaggagggtatgcaggcagtgatggccagcgactttgcagtgccgaaattccgatacctggagaggctcttgattcttcacgggcattggtgctactcccgacttgccaacatggtgctgtacttcttctacaaaaacacaatgttcgtgggcctcctgttttggttccagtttttctgtggcttctctgcatctaccatgattgaccagtggtatctaatcttctttaatctgctcttctcgtcacttcccccgctcgtgactggggtgctggacagggatgtgccagccaatgtgctgctgaccaacccgcagctctacaagagtggccagaacatggaggaataccggccacgaacgttctggtttaacatggccgacgccgccttccagagcctggtttgcttttccattccttacctggcctactatgactcgaacgtggacctgtttacctgggggacccctattgtgacaatcgcgctgctcactttcctgctccacctgggcattgaaaccaaaacctggacctggctcaactggataacgtgtggcttcagtgtccttttgtttttcaccgtggctttgatttacaatgcgtcttgtgccacgtgctatcctccgtccaacccttactggactatgcaagccttactgggtgacccagtgttttacttgacttgcctgatgacgcctgtcgctgcactgctgcccagattgtttttcagatccctccaggggagggttttccccacacaacttcagctggcacgtcagttgaccaggaagtcccccaggagatgcagtgctcccaaagagacctttgctcagggacgcctcccgaaggactcgggaaccgagcactcatcagggaggacagtcaagacctctgtgcccctgtcccagccttcttggcacacacagcagccggtctgctccctggaggccagcggggagcccagcacagtggacatgagcatgccagtgagggagcacaccctgctggaggggctgagcgcaccggcccccatgtcctctgcgccaggggaggctgtcctgaggagtccaggagggtgtcctgaggagtccaaggtgagagctgccagcaccggcagggtgacccccctgtcttccctcttcagcctgcctaccttcagcttactcaactggatttcctcctggtcgctggtcagcaggctggggagtgtcttacagttctcccggacggagcagcttgcagatggacaagcgggacgtggacttcctgtccagccccactcaggccgatcaggacttcaagggccagaccacagactacttataggagcatcttcaaggcggtcacagtgaaaaccttgaaatggccttttttaatatatataaataaatgttaatattatttatgtttattatttgcacagaagagttctagggagatgtatttctaaatgtttcccaggctaatacaggaaacaagaggtaccaaaaaagaaagtttattttttaaaattctaagtagagtatattgaaaagaaaaagaagagccttaacatatataaaagtttaaagaagagtaacacttgaaaagtgtgtttagatttattttttcatctcatttttaagaacaagcagtacgatttgttttcttcaacatgtgtgactgcgcactgagtacaaatgtgtgactgctcatggttaatgcaggcaggtgtgaacatgggggaacaatgagcagagatggcagagggcagagcacatggcccccagaggcttccagtctcactgacacaggagggctgggctccacttcatccagatgaaggaaaggaagacctcaagaaaaattcacagttgagtgcatcccagcattctgttccgggcaggcatttcaggaagaccgccttgtaggtattacatccctggtgtcgtattttgcctgttaaatcgtaacaagcaataaacaactttcactttgcaaagacagtgtgtccagttaccactggtgtatgaaatgattaatacctgacctcacagagtatgatctcagggcacttccgtaaggcaagtccttttagaggctatgaagaaaacagctgcatggcacataccaaagctgctgcacagctggccaccatggcaccctgcaccaggccatcagcaccacgtgccaaggagctcagcggtcttcaggcatttttgtaatgagccattagttctgtccctctaaaactagaaaaggaagggcaggaaatgataacaacccaaggcaatgatatggcatgtcatcttccgagcccttctttctactttgtcaaacagttcttagttgctggctctgctcggcaccgggactgtgaagggtgtactccctgctgtgtgggagggacctagggcctctttggatgctgtcttcgaggacagcaatgcagagagggcataggatctgaggacaaggaaattcctcagcatggcgtatcaggaaagcatggctcattctgcaatgagccatgagtgtgggccatcgcaagtcacagaaaatgcacctcattccagtcaagcagaaaaacaggcacaggctcagtgtaggtcccaagagagggtgcctggactcagcaactcagacctgggcttttctcccagctttcagggacagctttgtcctgagtctgcctctgttcacggggatgcttggctggagtcacccccaggacttatccatgcatcactattcagaagacacagagggcccctctctccacattccaaacagagtcctggtttcctcagcctcaccctgcatagcttgcacaacatcctcagaaccattcactggcaaatggaggggaacgtgctgactgggactcccagctggagctgggaggagaggtccacttcccttagaacacctgagctgctgcatgagtggacgtcagaagaatctctatgccctgttaaatggggagacaaaggggtggtgggggcttcagccagtgatttcggaccgaaggtgacagccgtcccaaccctgcccagcctgatgccacctcctctgttcttggaacaacgcataggaaaagaatctcctttggaaggtgacactgctccctgaattaaggtaatggttgcgagcaccaagtacaaggactagacgcatatttacctgcgtatctgagagttccagattcccagcttccagatgatccttgcacagacaacctaccttctttccagaggatgtctttctcctctggagagtagatgcttgctcttgggaaacggaatgaccttggcgctggcttcaggaatatgcatcccacagccagtttagagaaatacatgttgtaaatggcattgacagctgctctttaggatggggagtattatggaaatccacaataacaatctatggcaagcaact

SEQ ID NO: 109785 - DNA, 418 bp, Homo sapiens
  Payload ID: 1554
  Gene Symbol: ATP10A
  Gene Name: ATPase, class V, type 10A
  ENST ID: ENST00000555756
  CDS Start-End: 1-418
gccataggtgatggagccaatgatgtcagcatgatccaggtggcagatgtgggtgtgggaatctccggccaggagggtatgcaggagatgctgagggagacgacagcgatggagaccctggccggccacgctcgcactgtgttcagaatggggattttccttccctgttgtgtaccttgcattttgagaagagaagacaaatctgacgccaggtcggcatcaccagtaacaggaatccctctccctttgaaggcagtgatggccagcgactttgcagtgccgaaattccgatacctggagaggctcttgattcttcacgggcattggtgctactcccgacttgccaacatggtgctgtacttcttctacaaaaacacaatgttcgtgggcctcctgttttggttccagtttttctgtg

SEQ ID NO: 109786 - DNA, 988 bp, Homo sapiens
  Payload ID: 1554
  Gene Symbol: ATP10A
  Gene Name: ATPase, class V, type 10A
  Uniprot ID: O60312
  ENST ID: ENST00000619904
  CDS Start-End: 265-732
gaaggataaggagacctctcaccttggggctgggcctgaaccagggaggggctgaagaaaatcagcaagctggttcccctcagggcctcaagggacctctgcctgaggaatcagcatttggctttgtaagcaccaggagtactcctggaagctccagggcggggagctcgcaccgccgcgcccgggccgcgagtgatgataacctaagaggccggcgcgggcgggcgtgagcggcggaggagccgggcgcggcgacacgcggccatggagcgggagccggcggggaccgaggagcccgggcctccgggacggcggaggcgccgagagggcaggacgcgcacggtgcgctccaacctgctgccgcccccgggcgccgaggaccctgcggctggcgcggccaagggcgagcggcgacggcggcgcgggtgtgcccagcacctggccgacaaccggctcaagactaccaagtacacgctgctgtccttcctgcccaagaacctgttcgagcagttccaccgcccggccaacgtgtactttgtcttcatcgcgctgctcaacttcgtgccggcggtgaacgccttccagcccggcctggcactggcgccggtgctcttcatcctggccatcacggccttcagggacctgtgggaggactacagccgccaccgctccgaccacaagatcaaccacctgggctgcctggtcttcagcagccgctcccacctgaagtgaaaggcaggaaaagccagcctggccccctggcctgaagtccctgcctcagtcttcggccaggcacagtggtctctgaacagccggcacaggacagtaaagctcagtctgctaacagctcggctcaggacagcagcaaagtgaaactgccgccaagtgctgatatgtctggcacggcccaggagagccccttggtagatccatcttggagctgtgtccagcagcctggaccacctcaaggccctgtccctgagaaagg

SEQ ID NO: 109787 - DNA, 7566 bp, Homo sapiens
  Payload ID: 1555
  Gene Symbol: ATP10B
  Gene Name: ATPase, class V, type 10B
  Uniprot ID: O94823
  ENST ID: ENST00000327245
  CDS Start-End: 848-5233
tctttcactcttgggcctagcgaggcagcttatttttcctttttctttcattggtcacagttatttcttttcagtgtgtcatcttctctaagtttctgagggagtgttagcttgaggccttgccttgacataatcagatataatcagaaaaatgaaaaattccataggaaagagaactattttagccaaggtgtgcgagagaaataccgccactttcaagcactgttttcttctactggagtctgctcaatagggacgtcagctttgctggggcttcctttgacaagagaatcagaaccgactggtgacatttgtttcaatgaaagcaacagtgtgaagagtaagtagtttttcctattattcatctcactcagtggagataatgaactcctctccactgccaagatgagaaactaccatttcttacacatggacacaaagatgagaacaataaacactgagacttcaaaaaggagggaaggagaaagaggaacaagacttgaaatctacctatcagaacttgcaatttattctgatcaacaatttgcccagctaaagtactacatctgccccctcttcctgtggctgtaggggcacagcaaaggtcactggtctaacctccttaaagggactccgctaacagaaaccaccaaatggagtggagaaaaagaaaagggatcccctatccccaactccagccatctagattaagaaaagccagctgactggacagtagcacagcccagtcacctcatggacaaatttcctaggaaagaacctctcccatctattctacttatcactctcctttgaggttccggccacagatcttcgcctgctgctggaaatggccctctcagtggactcatcgtggcatcggtggcagtggagagtcagagatggcttcccccattgtccatcggaaaccacaccgctgctctctccagagaaagggagacagagctacaacttgacacagcagcgggtcgtgttccccaacaacagcatattccatcaagattgggaagaggtctccaggagataccctggcaacagaacctgcacaaccaaatacaccctcttcaccttcctgccccggaatctctttgagcaatttcatagatgggctaacctctatttcctgttcctggtgattttgaactggatgccctccatggaagtcttccacagagaaatcaccatgttaccattggccattgtcctgttcgtcatcatgatcaaggatggcatggaggacttcaagagacaccgctttgataaagcaataaactgctccaacattcgaatttatgaaagaaaagagcagacctatgtgcagaagtgctggaaggatgtgcgcgtgggagacttcatccaaatgaaatgcaatgagattgtcccagcagacatactcctccttttttcctctgaccccaatgggatatgccatctggaaactgccagcttggatggagagacaaacctcaagcaaagatgtgtcgtgaagggcttctcacagcaggaggtacagttcgaaccagagcttttccacaataccatcgtgtgtgagaaacccaacaaccacctcaacaaatttaagggttatatggagcatcctgaccagaccaggactggctttggctgtgagagtcttctgcttcgaggctgcaccatcagaaacaccgagatggctgttggcattgtcatctatgcaggccatgagacgaaagccatgctgaacaacagtggcccccggtacaaacgcagcaagattgagcggcgcatgaatatagacatcttcttctgcattgggatcctcatcctcatgtgccttattggagctgtaggtcacagcatctggaatgggacctttgaagaacaccctcccttcgatgtgccagatgccaatggcagcttccttcccagtgcccttgggggcttctacatgttcctcacaatgatcatcctgctccaggtgctgatccccatctctttgtatgtctccattgagctggtgaagctcgggcaagtgttcttcttgagcaatgaccttgacctgtatgatgaagagaccgatttatccattcaatgtcgagccctcaacatcgcagaggacttgggccagatccagtacatcttctccgataagacggggaccctgacagagaacaagatggtgttccgacgttgcaccatcatgggcagcgagtattctcaccaagaaaatgctaagcgactggagaccccaaaggagctggactcagatggtgaagagtggacccaataccaatgcctgtccttctcggctagatgggcccaggatccagcaactatgagaagccaaaaaggtgctcagcctctgaggaggagccagagtgcccgggtgcccatccagggccactaccggcaaaggtctatggggcaccgtgaaagctcacagcctcctgtggccttcagcagctccatagaaaaagatgtaactccagataaaaacctactgaccaaggttcgagatgctgccctgtggttggagaccttgtcagacagcagacctgccaaggcttccctctccaccacctcctccattgctgatttcttccttgccttaaccatctgcaactctgtcatggtgtccacaaccaccgagcccaggcagagggtcaccatcaaaccctcaagcaaggctctggggacgtccctggagaagattcagcagctcttccagaagttgaagctattgagcctcagccagtcattctcatccactgcaccctctgacacagacctcggggagagcttaggggccaacgtggccaccacagactcggatgagagagatgatgcatctgtgtgcagtggaggtgactccactgatgacggtggctacaggagcagcatgtgggaccagggcgacatcctggagtctgggtcaggcacttccttggaggaggcattggaggccccagccacagacctggccaggcctgagttctgttacgaggctgagagccctgatgaggccgccctggtgcacgctgcccatgcctacagcttcacactagtgtcccggacacctgagcaggtgactgtgcgcctgccccagggcacctgcctcaccttcagcctcctctgcaccctgggctttgactctgtcaggaagagaatgtctgtggttgtgaggcacccactgactggcgagattgttgtctacaccaagggtgctgactcggtcatcatggacctgctggaagacccagcctgcgtacctgacattaatatggaaaagaagctgagaaaaatccgagcccggacccaaaagcatctagacttgtatgcaagagatggcctgcgcacactatgcattgccaagaaggttgtaagcgaagaggacttccggagatgggccagtttccggcgtgaggctgaggcatccctcgacaaccgagatgagcttctcatggaaactgcacagcatctggagaatcaactcaccttacttggagccactgggatcgaagaccggctgcaggaaggagttccagatacgattgccactctgcgggaggctgggatccagctctgggtcctgactggagataagcaggagacagcggtcaacattgcccattcctgcagactgttaaatcagaccgacactgtttataccatcaatacagagaatcaggagacctgtgaatccatcctcaattgtgcattggaagagctaaagcaatttcgtgaactacagaagccagaccgcaagctctttggattccgcttaccttccaagacaccatccatcacctcagaagctgtggttccagaagctggattggtcatcgatgggaagacattgaatgccatcttccagggaaagctagagaagaagtttctggaattgacccagtattgtcggtccgtcctgtgctgccgctccacgccactccagaagagtatgatagtcaagctggtgcgagacaagttgcgcgtcatgaccctttccataggtgatggagcaaatgatgtaagcatgattcaagctgctgatattggaattggaatatctggacaggaaggcatgcaggctgtcatgtccagcgactttgccatcacccgctttaagcatctcaagaagttgctgctcgtgcatggccactggtgttactcgcgcctggccaggatggtggtgtactacctctacaagaacgtgtgctacgtcaacctgctcttctggtatcagttcttctgtggtttctccagctccaccatgattgattactggcagatgatattcttcaatctcttctttacctccttgcctcctcttgtctttggagtccttgacaaagacatctctgcagaaacactcctggcattgcctgagctatacaagagtggccagaactctgagtgctataacctgtcgactttctggatttctatggtggatgcattctaccagagcctcatctgtttctttatcccttacctggcctataagggctctgatatagatgtctttacctttgggacaccaatcaacaccatctccctcaccacaatccttttgcaccaggcaatggaaatgaagacatggaccattttccacggagtcgtgctcctcggcagcttcctgatgtactttctggtatccctcctgtacaatgccacctgcgtcatctgcaacagccccaccaatccctattgggtgatggaaggccagctctcaaaccccactttctacctcgtctgctttctcacaccagttgttgctcttctcccaagatactttttcctgtctctgcaaggaacttgtgggaagtctctaatctcaaaagctcagaaaattgacaaactccccccagacaaaagaaacctggaaatccagagttggagaagcagacagaggcctgcccctgtccccgaagtggctcgaccaactcaccacccagtgtcatctatcacaggacaggacttcagtgccagcaccccaaagagctctaaccctcccaagaggaagcatgtggaagagtcagtactccacgaacagagatgtggcacggagtgcatgagggatgactcatgctcaggggactcctcagctcaactctcatccggggagcacctgctgggacctaacaggataatggcctactcaagaggacagactgatatgtgccggtgctcaaagaggagcagccatcgccgatcccagagttcactgaccatatgaggagctgcagaaatctgtacaaactcaacagaggccacctagtcactggtccacataacccttgaccccttcttcttcatagaggaaacaatgtgccagtcttattcttttcttcaacaaccttgacttccatggaggaagtgctggccccaaggggtctgacacaaagacgggaaacccagtcggcctctagttttctgctgctctcaggcagcacatcttgcaaacagtttggagaaggaggctgtttttgttgaatcgagttctcaaatcggtttagaccaaagccattcttctgaccctctagataagcgtagcctacaacccagtgccgtaagtttccaagattcaagaagtgtatcaacccaggcaatatctcaggatatggaagtttctgggtttatttacccctcagtgcccagagttaaagtttcagaagagacttgtgcacataagggcttcatctcaagtgtattgcagtaatggctgaatcggggttaacatcccttccaggcacagcgagttggttctgctttttgcctgtaagccaaagaaaagccacatctaaaaagctactactaaaagccagaaagaaaagtggatttgaactcagtgtcacagactcttctgagtgttttagggtcacagctagtgtaagaggcatgaagaatagacatgcaaaagggaacgggtgcaccagagacccctgttttggctgacagaccatatgtcccaccagctggggaatctgacaagaggacataggtggcactctttttttaaagctatttattgtatctatttttaaataaaattgcccatcctcattcagctcttagaacaaaagcaaaaaaccctgtaaatcaggagatataagcacatctgcacccagaataggcccatatgatagggcaaccctgagcttaaacaatgacatcttcaagggtagaactaatctgaaaccccattcagcctattccagaatggggataggctgaaacccccttccagcctctggaagacactggcctgcatcagttagagtcagagcaagtgtcacttcacagggaaaagaaggattatatagacttcctatccctagagtttataaatgtcaactatataaaaaaagctcaaaacagtgttaaaggaatgaacagtagaattttaataggctgtccaaagaagccaggtctgctgtgggcaagtatagcctaaccctagtcttgtaaaataagccagaaagggttactgagccaccttaagctagtacctatatagtaggcaaaaagtacagaaatagatgcaataagtgtggtgagtctttgagcctacgagtcatgccaccagccataagttgacctatcacttgagaacctcctcagcaaagatgccagaaaacattcaatcaagttggcaaatgacacagggagctggccctctgaccatcttcctggcaaacctggactggaagggccatttgcagcactgtcctggagctaatacactgtttcactgcctctgccatataatgatgccagcactagccagctggtgggtatttggaggaatcctgcatgaggattgcccaataaggggcaggtacacatacctggcaaagtgatgatgatgtgaattgtttccagtgaggggattgagtcaaaacttggatctcaggtacctcaatttttcccccaatttctggctactactaaaagccagaaagaacagaacagtggcctcaggagatctgagtttgaatccttgctctctaggatgcaggtggcttgaagcagaatgccacacctgcaagttgattagaactgcctttcttcccaggcttgacataggtattaagtcaaaattacatgaaacccagtggtaaaaaagcctctgaaagctgtaacaccctcagtaataacaaaagggatttttatttcacagctaaagggaaaataggtggagaagttaaaaaataatgtctgatcctgttcctaagttccaaactatagccaacactctgatgctgctctttttcttgtaggaccaaccgtcccagtttgcctgggactttctcatttttacagagtcccaaatcctaggaaactggagcaactggtacaactggtcacctactcttgcccctctgtaaatcaagccaactgtgaccatccaatgtgccatcttacagggaaaagttataaccactattcccctataacataatgctaatgattgtacttagtacatttttatacttttatgatattttactgattggaaatgtcatcctttattaaaaataaacatggttttccatagttgcctgccaa

SEQ ID NO: 109788 - DNA, 2164 bp, Homo sapiens
  Payload ID: 1555
  Gene Symbol: ATP10B
  Gene Name: ATPase, class V, type 10B
  ENST ID: ENST00000520108
  CDS Start-End: 1-1671
gggcaagtgttcttcttgagcaatgaccttgacctgtatgatgaagagaccgatttatccattcaatgtcgagccctcaacatcgcagaggacttgggccagatccagtacatcttctccgataagacggggaccctgacagagaacaagatggtgttccgacgttgcaccatcatgggcagcgagtattctcaccaagaaaatgctaagcgactggagaccccaaaggagctggactcagatggtgaagagtggacccaataccaatgcctgtccttctcggctagatgggcccaggatccagcaactatgagaagccaaaaaggtgctcagcctctgaggaggagccagagtgcccgggtgcccatccagggccactaccggcaaaggtctatggggcaccgtgaaagctcacagcctcctgtggccttcagcagctccatagaaaaagatgtaactccagataaaaacctactgaccaaggttcgagatgctgccctgtggttggagaccttgtcagacagcagacctgccaaggcttccctctccaccacctcctccattgctgatttcttccttgccttaaccatctgcaactctgtcatggtgtccacaaccaccgagcccaggcagagggtcaccatcaaaccctcaagcaaggctctggggacgtccctggagaagattcagcagctcttccagaagttgaagctattgagcctcagccagtcattctcatccactgcaccctctgacacagacctcggggagagcttaggggccaacgtggccaccacagactcggatgagagagatgatgcatctgtgtgcagtggaggtgactccactgatgacggtggctacaggagcagcatgtgggaccagggcgacatcctggagtctgggtcaggcacttccttggaggaggcattggaggccccagccacagacctggccaggcctgagttctgttacgaggctgagagccctgatgaggccgccctggtgcacgctgcccatgcctacagcttcacactagtgtcccggacacctgagcaggtgactgtgcgcctgccccagggcacctgcctcaccttcagcctcctctgcaccctgggctttgactctgtcaggaagagaatgtctgtggttgtgaggcacccactgactggcgagattgttgtctacaccaagggtgctgactcggtcatcatggacctgctggaagacccagcctgcgtacctgacattaatatggaaaagaagctgagaaaaatccgagcccggacccaaaagcatctagacttgtatgcaagagatggcctgcgcacactatgcattgccaagaaggttgtaagcgaagaggacttccggagatgggccagtttccggcgtgaggctgaggcatccctcgacaaccgagatgagcttctcatggaaactgcacagcatctggagaatcaactcaccttacttggagccactgggatcgaagaccggctgcaggaaggagttccagatacgattgccactctgcgggaggctgggatccagctctgggtcctgactggagataagcaggagacagcggtcaacattgcccattcctgcagactgttaaatcagaccgacactgtttataccatcaatacagagaatcaggtgaggtgattctctgtattgatatctgcagatatcaacgtgtagagcaacccctcaaccaagaggacacaggcttctaggtgggatttgggtacaccagggaagcacccaacccccaacagatcactgaatcttggagtctagaggaccctggaagtcatccagcccaatatcctttatctcatccccacacatggctagctggtctcttttacattacttctggcactgcttgttagaaagttttacctctcccaaattctactattggtctagtctccccatttccccacagataaggaaactgaagactactggggctaagtctcttgctcaggtttaccctgcttatttctgataggtagaactaagtctagaactgagctagtgctatttacattctaccacactgtttgcttatggaaactcaactgtcggtttcttactatttaagactaacttatccattgaaaaagtcccaattaaattgaaattattcaga

SEQ ID NO: 109789 - DNA, 6655 bp, Homo sapiens
  Payload ID: 1556
  Gene Symbol: ATP10D
  Gene Name: ATPase, class V, type 10D
  Uniprot ID: Q9P241
  ENST ID: ENST00000273859
  CDS Start-End: 270-4550
gacgggaggaggagcggagggagaagtaggttgcgagctcagcacaggctccggcgctggctcccgcagctgagtttgggagatgtctaagtgattttttttttttcccggaaggcaaatggctggcgtggaagcacaacccgctttcactcttcgaatttgtgcttagctcttttcttgtaccttgcgactcgtgaccaacatgctgtgatgtgtgccgagggaggaattggtcagctacacaacctggatcttaccacagtttggatatgactgaggctctccaatgggccagatatcactggcgacggctgatcagaggtgcaaccagggatgatgattcagggccatacaactattcctcgttgctcgcctgtgggcgcaagtcctctcagacccctaaactgtcaggaaggcaccggattgttgttccccacatccagcccttcaaggatgagtatgagaagttctccggagcctatgtgaacaatcgaatacgaacaacaaagtacacacttctgaattttgtgccaagaaatttatttgaacaatttcacagagctgccaatttatatttcctgttcctagttgtcctgaactgggtacctttggtagaagccttccaaaaggaaatcaccatgttgcctctggtggtggtccttacaattatcgcaattaaagatggcctggaagattatcggaaatacaaaattgacaaacagatcaataatttaataactaaagtttatagtaggaaagagaaaaaatacattgaccgatgctggaaagacgttactgttggggactttattcgcctctcctgcaacgaggtcatccctgcagacatggtactactcttttccactgatccagatggaatctgtcacattgagacttctggtcttgatggagagagcaatttaaaacagaggcaggtggttcggggatatgcagaacaggactctgaagttgatcctgagaagttttccagtaggatagaatgtgaaagcccaaacaatgacctcagcagattccgaggcttcctagaacattccaacaaagaacgcgtgggtctcagtaaagaaaatttgttgcttagaggatgcaccattagaaacacagaggctgttgtgggcattgtggtttatgcaggccatgaaaccaaagcaatgctgaacaacagtgggccacggtataagcgcagcaaattagaaagaagagcaaacacagatgtcctctggtgtgtcatgcttctggtcataatgtgcttaactggcgcagtaggtcatggaatctggctgagcaggtatgaaaagatgcattttttcaatgttcccgagcctgatggacatatcatatcaccactgttggcaggattttatatgttttggaccatgatcattttgttacaggtcttgattcctatttctctctatgtttccatcgaaattgtgaagcttggacaaatatatttcattcaaagtgatgtggatttctacaatgaaaaaatggattctattgttcagtgccgagccctgaacatcgccgaggatctgggacagattcagtacctcttttccgataagacaggaaccctcactgagaataagatggtttttcgaagatgtagtgtggcaggatttgattactgccatgaagaaaatgccaggaggttggagtcctatcaggaagctgtctctgaagatgaagattttatagacacagtcagtggttccctcagcaatatggcaaaaccgagagcccccagctgcaggacagttcataatgggcctttgggaaataagccctcaaatcatcttgctgggagctcttttactctaggaagtggagaaggagccagtgaagtgcctcattccagacaggctgctttcagtagccccattgaaacagacgtggtaccagacaccaggcttttagacaaatttagtcagattacacctcggctctttatgccactagatgagaccatccaaaatccaccaatggaaactttgtacattatcgactttttcattgcattggcaatttgcaacacagtagtggtttctgctcctaaccaaccccgacaaaagatcagacacccttcactgggggggttgcccattaagtctttggaagagattaaaagtcttttccagagatggtctgtccgaagatcaagttctccatcgcttaacagtgggaaagagccatcttctggagttccaaacgcctttgtgagcagactccctctctttagtcgaatgaaaccagcttcacctgtggaggaagaggtctcccaggtgtgtgagagcccccagtgctccagtagctcagcttgctgcacagaaacagagaaacaacacggtgatgcaggcctcctgaatggcaaggcagagtccctccctggacagccattggcctgcaacctgtgttatgaggccgagagcccagacgaagcggccttagtgtatgccgccagggcttaccaatgcactttacggtctcggacaccagagcaggtcatggtggactttgctgctttgggaccattaacatttcaactcctacacatcctgccctttgactcagtaagaaaaagaatgtctgttgtggtccgacaccctctttccaatcaagttgtggtgtatacgaaaggcgctgattctgtgatcatggagttactgtcggtggcttccccagatggagcaagtctggagaaacaacagatgatagtaagggagaaaacccagaagcacttggatgactatgccaaacaaggccttcgtactttatgtatagcaaagaaggtcatgagtgacactgaatatgcagagtggctgaggaatcattttttagctgaaaccagcattgacaacagggaagaattactacttgaatctgccatgaggttggagaacaaacttacattacttggtgctactggcattgaagaccgtctgcaggagggagtccctgaatctatagaagctcttcacaaagcgggcatcaagatctggatgctgacaggggacaagcaggagacagctgtcaacatagcttatgcatgcaaactactggagccagatgacaagctttttatcctcaatacccaaagtaaagatgcctgtgggatgctgatgagcacaattttgaaagaacttcagaagaaaactcaagccctgccagagcaagtgtcattaagtgaagatttacttcagcctcctgtcccccgggactcagggttacgagctggactcattatcactgggaagaccctggagtttgccctgcaagaaagtctgcaaaagcagttcctggaactgacatcttggtgtcaagctgtggtctgctgccgagccacaccgctgcagaaaagtgaagtggtgaaattggtccgcagccatctccaggtgatgacccttgctattggtgatggtgccaatgatgttagcatgatacaagtggcagacattgggataggggtctcaggtcaagaaggcatgcaggctgtgatggccagtgactttgccgtttctcagttcaaacatctcagcaagctccttcttgtccatggacactggtgttatacacggctttccaacatgattctctattttttctataagaatgtggcctatgtgaacctccttttctggtaccagttcttttgtggattttcaggaacatccatgactgattactgggttttgatcttcttcaacctcctcttcacatctgcccctcctgtcatttatggtgttttggagaaagatgtgtctgcagagaccctcatgcaactgcctgaactttacagaagtggtcagaaatcagaggcatacttaccccataccttctggatcaccttattggatgctttttatcaaagcctggtctgcttctttgtgccttattttacctaccagggctcagatactgacatctttgcatttggaaaccccctgaacacagccgctctgttcatcgttctcctccatctggtcattgaaagcaagagtttgacttggattcacttgctggtcatcattggtagcatcttgtcttattttttatttgccatagtttttggagccatgtgtgtaacttgcaacccaccatccaacccttactggattatgcaggagcacatgctggatccagtattctacttagtttgtatcctcacgacgtccattgctcttctgcccaggtttgtatacagagttcttcagggatccctgtttccatctccaattctgagagctaagcactttgacagactaactccagaggagaggactaaagctctcaagaagtggagaggggctggaaagatgaatcaagtgacatcaaagtatgctaaccaatcagctggcaagtcaggaagaagacccatgcctggcccttctgctgtatttgcaatgaagtcagcaagttcctgtgctattgagcaaggaaacttatctctgtgtgaaactgctttagatcaaggctactctgaaactaaggcctttgagatggctggaccctccaaaggtaaagaaagctagataccctccttggagttgcaagtattctttcaaggttggaagagggattttgaagaggtatctctccaagcaagaatgacttgtttttccataagggacatgagcattttactaggcttggaagagctgacatgatgagcattattgtatgtttgtatatacatttgtgatagagggctagagtttgacctagagagagtttaaggaagtgaaatatttaattcagaaccaaatgcttttgtaaaactttttggattttgtaaaagcattttcattctcttagaaattcaagtattttcaaggggagtcatttgagatatatttattttactaggagatcttatattctagggaaatgctttaaatggtcaggctccagtcggaatttttttaagaaaaaagtagtttttaatacattggttaggactcagaggaaatacggaaaaaacattgtagatggttaatttacagataaaatcccaagagccttttaaacaacaaggtacctaaaatagggtataattatactgcttaaaatacagttagtgcctattaatagctttttatttcctatgggaagatgcttttggtcttctggctgaagatgtaggcatacctctcactcatttcaatgttttcctgaggtggagccttcattggaaaggggaaagagggattctagggtttcatcagggaccaggaatgcattcctctgtcaggttccaatcaagagaagaccttttatgagatctgcctctgtatagatgttgtcagttaggaaactgaagccataggtcaggcagacatcagctcagcctgtggcccattgggtgatttcctgtattttaaaactgacagtagcctgatcaaagtgatacaatcaatttcaaaacaatcttccagagaccacttgaaggttcatagtttttacaataccctgagacttttcaggtgttggagcctctaaaatatgagatataaacagaaactaatacaagttgttctctggaggtttctatgaggttcttagaaaaatttggttttaaaatcatttgaggacaggaatgtctatagcaagtttactcctattgcgaatcatgtatgctggctttagttgtaacaaacgattttattctaagtaaggccaggtgctactataaaatcatatattcctgttgaagttcttttgaagtcctatctctatttattatatttgaaagttgtcagccaccagtcatccagaatttccttcctgaatctccatgctcatatgcaatgtctacatcaaggtcttcttaatgactattattctcagggtttagttttctaccttctgcctactattttggtctgacatttttgtagccttctgttattattggaaatagtctcttacataagctgatttcgagaactttcaaaatctcacatagctaatggaagttgctttctgctttcttatgactgtttttataaataaactgtttcataaataatgtatactggaaaattgtcatcactcttgtaaacatttgccaaatccaactgtaattagtaccagaacttagaaggaaagtcacaaagcatgccttttaccagaatattgctttgccttttcttatatggaaaatcactgatgtcatatcatttattatcctcacagcagctggcattcattccctgaaatcgtcgtctcctgataaacaataatttagagatatgttcacttgtaaataaaaaggttagaatctaaggacaaagaatgatccaaaaatactaaggaaaaagaacaattttcaattttcagaaatgaattatctgtacatatgaatagaggaaaatactgagtgctaatgttacagggccacaatctcatatccacaattccaaaatctccaaacctctgaaaactgaaatatttttcataaattaggcgtaaattctatgccctgaacaaatgtaaagctatttatgtactttgcttaatgtaatcattcatatactttgctacaaaaatattaatatatttcattactgaatgctaaactgtatttctttttaaaatttggaaaatttttaattctgaaacacaatctagaccttag

SEQ ID NO: 109790 - DNA, 2550 bp, Homo sapiens
  Payload ID: 1556
  Gene Symbol: ATP10D
  Gene Name: ATPase, class V, type 10D
  ENST ID: ENST00000504445
  CDS Start-End: 259-1866
gagcggagggagaagtaggttgcgagctcagcacaggctccggcgctggctcccgcagctgagtttgggagatgtctaagtgattttttttttttcccggaaggcaaatggctggcgtggaagcacaacccgctttcactcttcgaatttgtgcttagctcttttcttgtaccttgcgactcgtgaccaacatgctgtgatgtgtgccgagggaggaattggtcagctacacaacctggatcttaccacagtttggatatgactgaggctctccaatgggccagatatcactggcgacggctgatcagaggtgcaaccagggatgatgattcagggccatacaactattcctcgttgctcgcctgtgggcgcaagtcctctcagacccctaaactgtcaggaaggcaccggattgttgttccccacatccagcccttcaaggatgagtatgagaagttctccggagcctatgtgaacaatcgaatacgaacaacaaagtacacacttctgaattttgtgccaagaaatttatttgaacaatttcacagagctgccaatttatatttcctgttcctagttgtcctgaactgggtacctttggtagaagccttccaaaaggaaatcaccatgttgcctctggtggtggtccttacaattatcgcaattaaagatggcctggaagattatcggaaatacaaaattgacaaacagatcaataatttaataactaaagtttatagtaggaaagagaaaaaatacattgaccgatgctggaaagacgttactgttggggactttattcgcctctcctgcaacgaggtcatccctgcagacatggtactactcttttccactgatccagatggaatctgtcacattgagacttctggtcttgatggagagagcaatttaaaacagaggcaggtggttcggggatatgcagaacaggactctgaagttgatcctgagaagttttccagtaggatagaatgtgaaagcccaaacaatgacctcagcagattccgaggcttcctagaacattccaacaaagaacgcgtgggtctcagtaaagaaaatttgttgcttagaggatgcaccattagaaacacagaggctgttgtgggcattgtggtttatgcaggccatgaaaccaaagcaatgctgaacaacagtgggccacggtataagcgcagcaaattagaaagaagagcaaacacagatgtcctctggtgtgtcatgcttctggtcataatgtgcttaactggcgcagtaggtcatggaatctggctgagcaggtatgaaaagatgcattttttcaatgttcccgagcctgatggacatatcatatcaccactgttggcaggattttatatgttttggaccatgatcattttgttacagcttggacaaatatatttcattcaaagtgatgtggatttctacaatgaaaaaatggattctattgttcagtgccgagccctgaacatcgccgaggatctgggacagattcagtacctcttttccgataagacaggaaccctcactgagaataagatggtttttcgaagatgtagtgtggcaggatttgattactgccatgaagaaaatgccaggaggttggagtcctatcaggaagctgtctctgaagatgaagattttatagacacagtcagtggttccctcagcaatatggcaaaaccgagagcccccagctgcaggacagttcataatgggcctttgggaaataagccctcaaatcatcttgctgggagctcttttactctaggaagtggagaaggagccagtgaagtgcctcattccagacaggctgctttcagtagccccattgtaagtatgaatgcatgactagagtcttgcacatccacaatgtatgatgagagaacagccttgtaattatgatagagtcaaactctgttgtcttttctaccttagaagagactacatgattgcagctcagcaagatcaccacacataattagaagtataaacaaacaatatcacactagtctacttttaaaaaataactcaatgttgagaggtagtataccatttctgaaaaaaaaaaaggagaatatttctggccagggctgattatgtgtgagcctgaagaaggctgccttggtttaagaatcatggctcactcttagaaccagcaaagcttaccagagttatctcgtagtcagataagcaagtgtaatttatagggacattcataggccatgtggtacattgaaggcctttttattgctctgtaatctcccaaatcccaccaaacttgtggtttttccctattcctggctccagaaggtcattttctaatatatcaatttcagagctcaacagaatgtgttcatgagttccagtgggaagtgtcaggaactgtctagtcacatccattaacaaatccattttactccagaaaaactagaggaccatgtagatgatggggaaaagagggaaaggtgctgtgtgaaaaaaattagaaatttttgctgtatttaaaattacctgtataaaagttcaatttcc

SEQ ID NO: 109791 - DNA, 4146 bp, Homo sapiens
  Payload ID: 1556
  Gene Symbol: ATP10D
  Gene Name: ATPase, class V, type 10D
  ENST ID: ENST00000503288
  CDS Start-End: 1-673
caatgttcccgagcctgatggacatatcatatcaccactgttggcaggattttatatgttttggaccatgatcattttgttacaggtcttgattcctatttctctctatgtttccatcgaaattgtgaagcttggacaaatatatttcattcaaagtgatgtggatttctacaatgaaaaaatggattctattgttcagtgccgagccctgaacatcgccgaggatctgggacagattcagtacctcttttccgataagacaggaaccctcactgagaataagatggtttttcgaagatgtagtgtggcaggatttgattactgccatgaagaaaatgccaggaggttggagtcctatcaggaagctgtctctgaagatgaagattttatagacacagtcagtggttccctcagcaatatggcaaaaccgagagcccccagctgcaggacagttcataatgggcctttgggaaataagccctcaaatcatcttgctgggagctcttttactctaggaagtggagaaggagccagtgaagtgcctcattccagacaggctgctttcagtagccccattgaaacagacgtggtaccagacaccagagcaggtcatggtggactttgctgctttgggaccattaacatttcaactcctacacatcctgccctttgactcagtaagaaaaagaatgtctgttgtggtccgacaccctctttccaatcaagttgtggtgtatacgaaaggcgctgattctgtgatcatggagttactgtcggtggcttccccagatggagcaagtctggagaaacaacagatgatagtaagggagaaaacccagaagcacttggatgactatgccaaacaaggccttcgtactttatgtatagcaaagaaggtcatgagtgacactgaatatgcagagtggctgaggaatcattttttagctgaaaccagcattgacaacagggaagaattactacttgaatctgccatgaggttggagaacaaacttacattacttggtgctactggcattgaagaccgtctgcaggagggagtccctgaatctatagaagctcttcacaaagcgggcatcaagatctggatgctgacaggggacaagcaggagacagctgtcaacatagcttatgcatgcaaactactggagccagatgacaagctttttatcctcaatacccaaagtaaagatgcctgtgggatgctgatgagcacaattttgaaagaacttcagaagaaaactcaagccctgccagagcaagtgtcattaagtgaagatttacttcagcctcctgtcccccgggactcagggttacgagctggactcattatcactgggaagaccctggagtttgccctgcaagaaagtctgcaaaagcagttcctggaactgacatcttggtgtcaagctgtggtctgctgccgagccacaccgctgcagaaaagtgaagtggtgaaattggtccgcagccatctccaggtgatgacccttgctattggtgatggtgccaatgatgttagcatgatacaagtggcagacattgggataggggtctcaggtcaagaaggcatgcaggctgtgatggccagtgactttgccgtttctcagttcaaacatctcagcaagctccttcttgtccatggacactggtgttatacacggctttccaacatgattctctattttttctataagaatgtggcctatgtgaacctccttttctggtaccagttcttttgtggattttcaggaacatccatgactgattactgggttttgatcttcttcaacctcctcttcacatctgcccctcctgtcatttatggtgttttggagaaagatgtgtctgcagagaccctcatgcaactgcctgaactttacagaagtggtcagaaatcagaggcatacttaccccataccttctggatcaccttattggatgctttttatcaaagcctggtctgcttctttgtgccttattttacctaccagggctcagatactgacatctttgcatttggaaaccccctgaacacagccgctctgttcatcgttctcctccatctggtcattgaaagcaagagtttgacttggattcacttgctggtcatcattggtagcatcttgtcttattttttatttgccatagtttttggagccatgtgtgtaacttgcaacccaccatccaacccttactggattatgcaggagcacatgctggatccagtattctacttagtttgtatcctcacgacgtccattgctcttctgcccaggtttgtatacagagttcttcagggatccctgtttccatctccaattctgagagctaagcactttgacagactaactccagaggagaggactaaagctctcaagaagtggagaggggctggaaagatgaatcaagtgacatcaaagtatgctaaccaatcagctggcaagtcaggaagaagacccatgcctggcccttctgctgtatttgcaatgaagtcagcaagttcctgtgctattgagcaaggaaacttatctctgtgtgaaactgctttagatcaaggctactctgaaactaaggcctttgagatggctggaccctccaaaggtaaagaaagctagataccctccttggagttgcaagtattctttcaaggttggaagagggattttgaagaggtatctctccaagcaagaatgacttgtttttccataagggacatgagcattttactaggcttggaagagctgacatgatgagcattattgtatgtttgtatatacatttgtgatagagggctagagtttgacctagagagagtttaaggaagtgaaatatttaattcagaaccaaatgcttttgtaaaactttttggattttgtaaaagcattttcattctcttagaaattcaagtattttcaaggggagtcatttgagatatatttattttactaggagatcttatattctagggaaatgctttaaatggtcaggctccagtcggaatttttttaagaaaaaagtagtttttaatacattggttaggactcagaggaaatacggaaaaaacattgtagatggttaatttacagataaaatcccaagagccttttaaacaacaaggtacctaaaatagggtataattatactgcttaaaatacagttagtgcctattaatagctttttatttcctatgggaagatgcttttggtcttctggctgaagatgtaggcatacctctcactcatttcaatgttttcctgaggtggagccttcattggaaaggggaaagagggattctagggtttcatcagggaccaggaatgcattcctctgtcaggttccaatcaagagaagaccttttatgagatctgcctctgtatagatgttgtcagttaggaaactgaagccataggtcaggcagacatcagctcagcctgtggcccattgggtgatttcctgtattttaaaactgacagtagcctgatcaaagtgatacaatcaatttcaaaacaatcttccagagaccacttgaaggttcatagtttttacaataccctgagacttttcaggtgttggagcctctaaaatatgagatataaacagaaactaatacaagttgttctctggaggtttctatgaggttcttagaaaaatttggttttaaaatcatttgaggacaggaatgtctatagcaagtttactcctattgcgaatcatgtatgctggctttagttgtaacaaacgattttattctaagtaaggccaggtgctactataaaatcatatattcctgttgaagttcttttgaagtcctatctctatttattatatttgaaagttgtcagccaccagtcatccagaatttccttcctgaatctccatgctcatatgcaatgtctacatcaaggtcttcttaatgactattattctcagggtttagttttctaccttctgcctactattttggtctgacatttttgtagccttctgttattattggaaatagtctcttacataagctgatttcgagaactttcaaaatctcacatagctaatggaagttgctttctgctttcttatgactgtttttataaataaactgtttcataaataatgtatactggaaaa

SEQ ID NO: 109792 - DNA, 8768 bp, Homo sapiens
  Payload ID: 1557
  Gene Symbol: ATP11A
  Gene Name: ATPase, class VI, type 11A
  ENST ID: ENST00000375630
  CDS Start-End: 89-3664
gcggccgcactagtaccccggagcccatgggcgcgccgagccgggcgcgggggcgctgaacggcggagcgggagcggccggaggagccatggactgcagcctcgtgcggacgctcgtgcacagatactgtgcaggagaagagaattgggtggacagcaggaccatctacgtgggacacagggagccacctccgggcgcagaggcctacatcccacagagatacccagacaacaggatcgtctcgtccaagtacacattttggaactttatacccaagaatttatttgaacaattcagaagagtagccaacttttatttccttatcatatttctggtgcagttgattattgatacacccacaagtccagtgacaagcggacttccactcttctttgtcattactgtgacggctatcaaacagggttatgaagactggcttcgacataaagcagacaatgccatgaaccagtgtcctgttcatttcattcagcacggcaagctcgttcggaaacaaagtcgaaagctgcgagttggggacattgtcatggttaaggaggacgagacctttccctgcgacttgatcttcctttccagcaaccggggagatgggacgtgccacgtcaccaccgccagcttggatggagaatccagccataaaacgcattacgcggtccaggacaccaaaggcttccacacagaggaggatatcggcggacttcacgccaccatcgagtgtgagcagccccagcccgacctctacaagttcgtgggtcgcatcaacgtttacagtgacctgaatgaccccgtggtgaggcccttaggatcggaaaacctgctgcttagaggagctacactgaagaacactgagaaaatctttggtgtggctatttacacgggaatggaaaccaagatggcattaaattatcaatcaaaatctcagaagcgatctgccgtggaaaaatcgatgaatgcgttcctcattgtgtatctctgcattctgatcagcaaagccctgataaacactgtgctgaaatacatgtggcagagtgagccctttcgggatgagccgtggtataatcagaaaacggagtcggaaaggcagaggaatctgttcctcaaggcattcacggacttcctggccttcatggtcctctttaactacatcatccctgtgtccatgtacgtcacggtcgagatgcagaagttcctcggctcttacttcatcacctgggacgaagacatgtttgacgaggagactggcgaggggcctctggtgaacacgtcggacctcaatgaagagctgggacaggtggagtacatcttcacagacaagaccggcaccctcacggaaaacaacatggagttcaaggagtgctgcatcgaaggccatgtctacgtgccccacgtcatctgcaacgggcaggtcctcccagagtcgtcaggaatcgacatgattgactcgtcccccagcgtcaacgggagggagcgcgaggagctgtttttccgggccctctgtctctgccacaccgtccaggtgaaagacgatgacagcgtagacggccccaggaaatcgccggacggggggaaatcctgtgtgtacatctcatcctcgcccgacgaggtggcgctggtcgaaggtgtccagagacttggctttacctacctaaggctgaaggacaattacatggagatattaaacagggagaaccacatcgaaaggtttgaattgctggaaattttgagttttgactcagtcagaaggagaatgagtgtaattgtaaaatctgctacaggagaaatttatctgttttgcaaaggagcagattcttcgatattcccccgagtgatagaaggcaaagttgaccagatccgagccagagtggagcgtaacgcagtggaggggctccgaactttgtgtgttgcttataaaaggctgatccaagaagaatatgaaggcatttgtaagctgctgcaggctgccaaagtggcccttcaagatcgagagaaaaagttagcagaagcctatgagcaaatagagaaagatcttactctgcttggtgctacagctgttgaggaccggctgcaggagaaagctgcagacaccatcgaggccctgcagaaggccgggatcaaagtctgggttctcacgggagacaagatggagacggccgcggccacgtgctacgcctgcaagctcttccgcaggaacacgcagctgctggagctgaccaccaagaggatcgaggagcagagcctgcacgacgtcctgttcgagctgagcaagacggtcctgcgccacagcgggagcctgaccagagacaacctgtccggactttcagcagatatgcaggactacggtttaattatcgacggagctgcactgtctctgataatgaagcctcgagaagacgggagttccggcaactacagggagctcttcctggaaatctgccggagctgcagcgcggtgctctgctgccgcatggcgcccttgcagaaggctcagattgttaaattaatcaaattttcaaaagagcacccaatcacgttagcaattggcgatggtgcaaatgatgtcagcatgattctggaagcgcacgtgggcataggtgtcatcggcaaggaaggccgccaggctgccaggaacagcgactatgcaatcccaaagtttaagcatttgaagaagatgctgcttgttcacgggcatttttattacattaggatctctgagctcgtgcagtacttcttctataagaacgtctgcttcatcttccctcagtttttataccagttcttctgtgggttttcacaacagactttgtacgacaccgcgtatctgaccctctacaacatcagcttcacctccctccccatcctcctgtacagcctcatggagcagcatgttggcattgacgtgctcaagagagacccgaccctgtacagggacgtcgccaagaatgccctgctgcgctggcgcgtgttcatctactggacgctcctgggactgtttgacgcactggtgttcttctttggtgcttatttcgtgtttgaaaatacaactgtgacaagcaacgggcagatatttggaaactggacgtttggaacgctggtattcaccgtgatggtgttcacagttacactaaagcttgcattggacacacactactggacttggatcaaccattttgtcatctgggggtcgctgctgttctacgttgtcttttcgcttctctggggaggagtgatctggccgttcctcaactaccagaggatgtactacgtgttcatccagatgctgtccagcgggcccgcctggctggccatcgtgctgctggtgaccatcagcctccttcccgacgtcctcaagaaagtcctgtgccggcagctgtggccaacagcaacagagagagtccagaatgggtgcgcacagcctcgggaccgcgactcagaattcacccctcttgcctctctgcagagcccaggctaccagagcacctgtccctcggccgcctggtacagctcccactctcagcaggtgacactcgcggcctggaaggagaaggtgtccacggagcccccacccatcctcggcggttcccatcaccactgcagttccatcccaagtcacagctgccctaggtcccgtgtgggaatgctcgtgtgatggatggtcctaagcctgtggagactgtgcacgtgcctcttcctggcccccagcaggcaaggaggggggtcacaggccttgccctcgagcatggcaccctggccgcctggacccagcactgtggttgttgagccacaccagtggcctctgggcattcggctcaacgcaggagggacattctgctggcccaccctgcgcgctgtcatgcagaggccattcccccaggcctgtgtcttcacccacctgccatcattggcctttgctgtcactgggagagaagagccgtccagggacccatggtggcccacatgtggatgccacatgctgctgtttcctgcttgcccggccaccacccatgccctccatagggtgaggtggagccatggtggtgcgtcctttactcaacaaccctccaatccggatgctgtgggaagggccgggtcactcggataccatcatccctgcggatgcaccgccgtaccctgctcatctgggagtggtttccctgcggttacgtccaagcccgcctgccctgtgtgttggggctggctgagtttcggtctccccatcaccggccgcctcgtggagaaggcagtgccacgtgggaggacaaggccacgccggcagcttccagccctgccgcagaagtgccaggatgtccatcagccactcgccagggcacggagccgtcagtccactgttacgggagaatgttgatttcgcgggtgcgagggccgggagacagatacttggctgtgatgagcagacatcctctgtccccgtggaggggtcaacaccaaggtggtgttcgtgcaccagaacctgtctcgggctgacgggggtggcacacaggacacgggtggatcccaacaggcagcaccgcacctctgcccgcctcccgcactgcagctccgcccgccgggctctgcgtccccacgtcccctcgtcccatccccacgtcccctcatcccgtcacctcgtccccacatccccttgccccgtcacctcgtcctcatgtccccttgtcctgtcacctcgtccccacgtcccctcgtctcctcatccccacgtcctctcgtccccttgtcccgtccccacataccctcgtccccatgtccccacgcagggctctccttcgtcttaggatctgtccagcgctgctctgggtgggttagcaaccccagggctgctgtgataggaagtccctgttgttctccgtactggcatttctatttctagaaataatatttgacatagccttaatggtccttaaagaagacatttcagtgtgagattcagacttcagacgctgaaactgctgcctttcaggaaagcaccaccaacgctggaggaggagccggccctcacgcccgccccgcgccacgctgtggaacggggctccggcaagtgaaacccagagggtgtttccgaggtgctcgacagtaggtatttttggaagctcagatttcaccatttgattgtataatcttttacctataaaatatttatttgaagtagagggtaaatcagcggtaagaacagtgaacacagtggttgggataaaataaggtgacaaacatcacaccaaagatgagggtagcgagcaactggcttgagcagacagaacggggaagactccactctgtcccgaggggccagccgcaggcgtccccagggccaccctgccctgaggtccttgtgtggccgccctggcttggcagccctgcccacgctgcccccgcaaacaatggtgtgtgcgtttttacagccctttttaggaacccaatatgggcataaatgtaacacctgtagcgggggcagattctctgtatgttcagttaacaaattatttgtaatgtatttttttagaaatcttaaaattgcctttgcactgaagtattttcatagctgtttatatctcttttattcatttatttaacatactgtctaattttaaaaataggtttttaaagctttcatttttaagtttatgaaattttggccactttacatttagattctggtgagagttttgactgaatgttccaatctctgatgaatgcgaattttcagatttgattttattctctacacacacctcttcttttcttggtatttctggtggcagtgattagttgaacagcacatttaaggcacgataatttgctacactttttctttacaatttgttgcaatttcatctgctttctatgtttcattgttaattgccatccttcagccttaaaaatagaagattctcacgtgaaggtttagtaagttgggtcccagctctgcctgtgtggagatagtcaccatgtacctctgacaacaagttttagtgtgaaagtcactaaacttttacacactcccaaacgtctttttaaaaattgcttgggaaattattaaatgaatgtgcctgatgatttgaaatagacaaggggcacgagataaaaaagaaaaggatgagaagatcctcagtgaatgacgttgcagggtcttcatgcaattttccacctcgcagtagttagtatttacttgccttaaactaactttgaagcaagtaatgtcaactttgagcactttgttgagttttgaaaaatcttatttgttgctgcacaggttaataaattatcaatttgtaattcagcatgttggtcagagacacggtcactgattcacacccagtccctgccacagaccgtctcagacacgcacagtgggcctgctgcatgattcacacccagtccctgccacagaccgtctcagacacgcacagtgggcctgctgcatgattcacacccagtccctgccacagaccgtctcagacacgcacagtgggcctgctgcatgcgtgttacctggcttttggctccacgctcactcatagccatgtccacatgggggcttgcacacaggatcactcacatatgtacatgtacccaccacaaacgtgcaagctcctgcacacatgcatgcacacaaacgtgtacacaagtgtgagctcctacacgcatacacacacacacgtgtacatgcaccaaagcatgtgtgacctacagacatgcagaacatgcacgtgtacacataccacagacacgcgtgtgcatgctcctacacaatacatatgcacatatcatgaacagcgtaagttcctacacacggacgtgtgatacacacatgcatgtacaggtaagcacacatgtacaagctcctacaggcttgctctcacacacgtgtatgcacagcagagagacgtatgagcttctactgcacacatgcacacacacacgcacacgtacattcactacaaacgtgcagcctcctgcacacgtgcacattcatgtgtacaccacaaatgagttcccagacgtgtaaacacacgtgcacacatcgtacacatgtgagctcccacacgtacacacagatgcacatggacacaccccaaacacgcacaggctcctacacacatgcacacacgtgtacaccacaaacgagctcccagacatgtaaacacacgtctcccacacgtgagctcccacacgtacacatgcacatgtacgcaccacaaacacatgcgcaggctcctgcaggcgtgaatacacacatgcacacacatatacacacatgtgccacaaacaagtgcacactgtcctggtgtcctgcactgcatcctgcctccttgctgaggggcccctgtgagaggcctctggatgggcatgggaagatgggctccctggcccccagcccatgcctccctgggatgaagagtccccctcctggcagaatgtctgggctttgcagagcaggccccgggggtgaagtcgcagcttcacttacaccagctgctctgtgagcaaggcttggtgccctggacaaggcccttcccctttagggaggtccagcctcgcaagctgaaacctcccctcggctcagccctataccaggcggccacagcaggactggccacacccacgccgcacctcatccgtgcacgcgtcggagcacggccagccttccgccacgagccagctgggaagggccgcggccgcctaaagccccagtcaacccagcctgtgtctgagcagacagggcgaacaagcaggccacaccgtctcgagggaggaggccagatgcggccagcgtctccaacagggtgaccatccgctcggcttgctgagcgtttaaacaaatgtttagacaggctgtggggactcccctgagttgagccttggccaggggtccggtgctgtcgcgggaaacctccagccttgttcttcaaaccactcagctcatgtgttttgcactgactagtactgaataatacaaccactcttatttaatgttagtattatttatttgacaactcagtgtctaacagcttgatatgcaggtccttgcatcctacatttctttaggaagttacccatttgtaactttaaaaacaggaaaaatatcagttggcaaatgcaatcttttttttttttaagctaaaggtgggtgaactggaatgaaaatctttctgatgttgtgtctataagcagccttgatgggatatgttagaagtgtcatgaaagtgtgattctacttttgcagaaaaatctaaagatcaatttatatagctttattttttactttatcaaagtatacagaattttaatatgcatatattgtgtctgacttaaaattataatgtctgcgtcaccatttaaaatgtctgttcattatgtaatgtaataaaagaaggtcttcaaaaatgtatttaacatgaatggtatccatagttgtcatcatcataaatactggagtttatttttaaattattaaacatagtaggtgcattaacataaatcagtctccacacagtaacatttaactgataattcattaatcagctttgaaaaattaaattgttaattaaaccaatctaacatttcagtaaagtttattttgtatgcttctgtttttaacttttatttctgtagataaactgactggataatattatattggacttttctctagattatctaagcaggagacctgaatctgcttgcaataaagaataaaagtctgcttcagtttctttataaagaaactcacacaa

SEQ ID NO: 109793 - DNA, 8795 bp, Homo sapiens
  Payload ID: 1557
  Gene Symbol: ATP11A
  Gene Name: ATPase, class VI, type 11A
  Uniprot ID: P98196
  ENST ID: ENST00000375645
  CDS Start-End: 89-3493
gcggccgcactagtaccccggagcccatgggcgcgccgagccgggcgcgggggcgctgaacggcggagcgggagcggccggaggagccatggactgcagcctcgtgcggacgctcgtgcacagatactgtgcaggagaagagaattgggtggacagcaggaccatctacgtgggacacagggagccacctccgggcgcagaggcctacatcccacagagatacccagacaacaggatcgtctcgtccaagtacacattttggaactttatacccaagaatttatttgaacaattcagaagagtagccaacttttatttccttatcatatttctggtgcagttgattattgatacacccacaagtccagtgacaagcggacttccactcttctttgtcattactgtgacggctatcaaacagggttatgaagactggcttcgacataaagcagacaatgccatgaaccagtgtcctgttcatttcattcagcacggcaagctcgttcggaaacaaagtcgaaagctgcgagttggggacattgtcatggttaaggaggacgagacctttccctgcgacttgatcttcctttccagcaaccggggagatgggacgtgccacgtcaccaccgccagcttggatggagaatccagccataaaacgcattacgcggtccaggacaccaaaggcttccacacagaggaggatatcggcggacttcacgccaccatcgagtgtgagcagccccagcccgacctctacaagttcgtgggtcgcatcaacgtttacagtgacctgaatgaccccgtggtgaggcccttaggatcggaaaacctgctgcttagaggagctacactgaagaacactgagaaaatctttggtgtggctatttacacgggaatggaaaccaagatggcattaaattatcaatcaaaatctcagaagcgatctgccgtggaaaaatcgatgaatgcgttcctcattgtgtatctctgcattctgatcagcaaagccctgataaacactgtgctgaaatacatgtggcagagtgagccctttcgggatgagccgtggtataatcagaaaacggagtcggaaaggcagaggaatctgttcctcaaggcattcacggacttcctggccttcatggtcctctttaactacatcatccctgtgtccatgtacgtcacggtcgagatgcagaagttcctcggctcttacttcatcacctgggacgaagacatgtttgacgaggagactggcgaggggcctctggtgaacacgtcggacctcaatgaagagctgggacaggtggagtacatcttcacagacaagaccggcaccctcacggaaaacaacatggagttcaaggagtgctgcatcgaaggccatgtctacgtgccccacgtcatctgcaacgggcaggtcctcccagagtcgtcaggaatcgacatgattgactcgtcccccagcgtcaacgggagggagcgcgaggagctgtttttccgggccctctgtctctgccacaccgtccaggtgaaagacgatgacagcgtagacggccccaggaaatcgccggacggggggaaatcctgtgtgtacatctcatcctcgcccgacgaggtggcgctggtcgaaggtgtccagagacttggctttacctacctaaggctgaaggacaattacatggagatattaaacagggagaaccacatcgaaaggtttgaattgctggaaattttgagttttgactcagtcagaaggagaatgagtgtaattgtaaaatctgctacaggagaaatttatctgttttgcaaaggagcagattcttcgatattcccccgagtgatagaaggcaaagttgaccagatccgagccagagtggagcgtaacgcagtggaggggctccgaactttgtgtgttgcttataaaaggctgatccaagaagaatatgaaggcatttgtaagctgctgcaggctgccaaagtggcccttcaagatcgagagaaaaagttagcagaagcctatgagcaaatagagaaagatcttactctgcttggtgctacagctgttgaggaccggctgcaggagaaagctgcagacaccatcgaggccctgcagaaggccgggatcaaagtctgggttctcacgggagacaagatggagacggccgcggccacgtgctacgcctgcaagctcttccgcaggaacacgcagctgctggagctgaccaccaagaggatcgaggagcagagcctgcacgacgtcctgttcgagctgagcaagacggtcctgcgccacagcgggagcctgaccagagacaacctgtccggactttcagcagatatgcaggactacggtttaattatcgacggagctgcactgtctctgataatgaagcctcgagaagacgggagttccggcaactacagggagctcttcctggaaatctgccggagctgcagcgcggtgctctgctgccgcatggcgcccttgcagaaggctcagattgttaaattaatcaaattttcaaaagagcacccaatcacgttagcaattggcgatggtgcaaatgatgtcagcatgattctggaagcgcacgtgggcataggtgtcatcggcaaggaaggccgccaggctgccaggaacagcgactatgcaatcccaaagtttaagcatttgaagaagatgctgcttgttcacgggcatttttattacattaggatctctgagctcgtgcagtacttcttctataagaacgtctgcttcatcttccctcagtttttataccagttcttctgtgggttttcacaacagactttgtacgacaccgcgtatctgaccctctacaacatcagcttcacctccctccccatcctcctgtacagcctcatggagcagcatgttggcattgacgtgctcaagagagacccgaccctgtacagggacgtcgccaagaatgccctgctgcgctggcgcgtgttcatctactggacgctcctgggactgtttgacgcactggtgttcttctttggtgcttatttcgtgtttgaaaatacaactgtgacaagcaacgggcagatatttggaaactggacgtttggaacgctggtattcaccgtgatggtgttcacagttacactaaagcttgcattggacacacactactggacttggatcaaccattttgtcatctgggggtcgctgctgttctacgttgtcttttcgcttctctggggaggagtgatctggccgttcctcaactaccagaggatgtactacgtgttcatccagatgctgtccagcgggcccgcctggctggccatcgtgctgctggtgaccatcagcctccttcccgacgtcctcaagaaagtcctgtgccggcagctgtggccaacagcaacagagagagtccagactaagagccagtgcctttctgtcgagcagtcaaccatctttatgctttctcagacttccagcagcctgagtttctgatggaacaagagcccaggctaccagagcacctgtccctcggccgcctggtacagctcccactctcagcaggtgacactcgcggcctggaaggagaaggtgtccacggagcccccacccatcctcggcggttcccatcaccactgcagttccatcccaagtcacagctgccctaggtcccgtgtgggaatgctcgtgtgatggatggtcctaagcctgtggagactgtgcacgtgcctcttcctggcccccagcaggcaaggaggggggtcacaggccttgccctcgagcatggcaccctggccgcctggacccagcactgtggttgttgagccacaccagtggcctctgggcattcggctcaacgcaggagggacattctgctggcccaccctgcgcgctgtcatgcagaggccattcccccaggcctgtgtcttcacccacctgccatcattggcctttgctgtcactgggagagaagagccgtccagggacccatggtggcccacatgtggatgccacatgctgctgtttcctgcttgcccggccaccacccatgccctccatagggtgaggtggagccatggtggtgcgtcctttactcaacaaccctccaatccggatgctgtgggaagggccgggtcactcggataccatcatccctgcggatgcaccgccgtaccctgctcatctgggagtggtttccctgcggttacgtccaagcccgcctgccctgtgtgttggggctggctgagtttcggtctccccatcaccggccgcctcgtggagaaggcagtgccacgtgggaggacaaggccacgccggcagcttccagccctgccgcagaagtgccaggatgtccatcagccactcgccagggcacggagccgtcagtccactgttacgggagaatgttgatttcgcgggtgcgagggccgggagacagatacttggctgtgatgagcagacatcctctgtccccgtggaggggtcaacaccaaggtggtgttcgtgcaccagaacctgtctcgggctgacgggggtggcacacaggacacgggtggatcccaacaggcagcaccgcacctctgcccgcctcccgcactgcagctccgcccgccgggctctgcgtccccacgtcccctcgtcccatccccacgtcccctcatcccgtcacctcgtccccacatccccttgccccgtcacctcgtcctcatgtccccttgtcctgtcacctcgtccccacgtcccctcgtctcctcatccccacgtcctctcgtccccttgtcccgtccccacataccctcgtccccatgtccccacgcagggctctccttcgtcttaggatctgtccagcgctgctctgggtgggttagcaaccccagggctgctgtgataggaagtccctgttgttctccgtactggcatttctatttctagaaataatatttgacatagccttaatggtccttaaagaagacatttcagtgtgagattcagacttcagacgctgaaactgctgcctttcaggaaagcaccaccaacgctggaggaggagccggccctcacgcccgccccgcgccacgctgtggaacggggctccggcaagtgaaacccagagggtgtttccgaggtgctcgacagtaggtatttttggaagctcagatttcaccatttgattgtataatcttttacctataaaatatttatttgaagtagagggtaaatcagcggtaagaacagtgaacacagtggttgggataaaataaggtgacaaacatcacaccaaagatgagggtagcgagcaactggcttgagcagacagaacggggaagactccactctgtcccgaggggccagccgcaggcgtccccagggccaccctgccctgaggtccttgtgtggccgccctggcttggcagccctgcccacgctgcccccgcaaacaatggtgtgtgcgtttttacagccctttttaggaacccaatatgggcataaatgtaacacctgtagcgggggcagattctctgtatgttcagttaacaaattatttgtaatgtatttttttagaaatcttaaaattgcctttgcactgaagtattttcatagctgtttatatctcttttattcatttatttaacatactgtctaattttaaaaataggtttttaaagctttcatttttaagtttatgaaattttggccactttacatttagattctggtgagagttttgactgaatgttccaatctctgatgaatgcgaattttcagatttgattttattctctacacacacctcttcttttcttggtatttctggtggcagtgattagttgaacagcacatttaaggcacgataatttgctacactttttctttacaatttgttgcaatttcatctgctttctatgtttcattgttaattgccatccttcagccttaaaaatagaagattctcacgtgaaggtttagtaagttgggtcccagctctgcctgtgtggagatagtcaccatgtacctctgacaacaagttttagtgtgaaagtcactaaacttttacacactcccaaacgtctttttaaaaattgcttgggaaattattaaatgaatgtgcctgatgatttgaaatagacaaggggcacgagataaaaaagaaaaggatgagaagatcctcagtgaatgacgttgcagggtcttcatgcaattttccacctcgcagtagttagtatttacttgccttaaactaactttgaagcaagtaatgtcaactttgagcactttgttgagttttgaaaaatcttatttgttgctgcacaggttaataaattatcaatttgtaattcagcatgttggtcagagacacggtcactgattcacacccagtccctgccacagaccgtctcagacacgcacagtgggcctgctgcatgattcacacccagtccctgccacagaccgtctcagacacgcacagtgggcctgctgcatgattcacacccagtccctgccacagaccgtctcagacacgcacagtgggcctgctgcatgcgtgttacctggcttttggctccacgctcactcatagccatgtccacatgggggcttgcacacaggatcactcacatatgtacatgtacccaccacaaacgtgcaagctcctgcacacatgcatgcacacaaacgtgtacacaagtgtgagctcctacacgcatacacacacacacgtgtacatgcaccaaagcatgtgtgacctacagacatgcagaacatgcacgtgtacacataccacagacacgcgtgtgcatgctcctacacaatacatatgcacatatcatgaacagcgtaagttcctacacacggacgtgtgatacacacatgcatgtacaggtaagcacacatgtacaagctcctacaggcttgctctcacacacgtgtatgcacagcagagagacgtatgagcttctactgcacacatgcacacacacacgcacacgtacattcactacaaacgtgcagcctcctgcacacgtgcacattcatgtgtacaccacaaatgagttcccagacgtgtaaacacacgtgcacacatcgtacacatgtgagctcccacacgtacacacagatgcacatggacacaccccaaacacgcacaggctcctacacacatgcacacacgtgtacaccacaaacgagctcccagacatgtaaacacacgtctcccacacgtgagctcccacacgtacacatgcacatgtacgcaccacaaacacatgcgcaggctcctgcaggcgtgaatacacacatgcacacacatatacacacatgtgccacaaacaagtgcacactgtcctggtgtcctgcactgcatcctgcctccttgctgaggggcccctgtgagaggcctctggatgggcatgggaagatgggctccctggcccccagcccatgcctccctgggatgaagagtccccctcctggcagaatgtctgggctttgcagagcaggccccgggggtgaagtcgcagcttcacttacaccagctgctctgtgagcaaggcttggtgccctggacaaggcccttcccctttagggaggtccagcctcgcaagctgaaacctcccctcggctcagccctataccaggcggccacagcaggactggccacacccacgccgcacctcatccgtgcacgcgtcggagcacggccagccttccgccacgagccagctgggaagggccgcggccgcctaaagccccagtcaacccagcctgtgtctgagcagacagggcgaacaagcaggccacaccgtctcgagggaggaggccagatgcggccagcgtctccaacagggtgaccatccgctcggcttgctgagcgtttaaacaaatgtttagacaggctgtggggactcccctgagttgagccttggccaggggtccggtgctgtcgcgggaaacctccagccttgttcttcaaaccactcagctcatgtgttttgcactgactagtactgaataatacaaccactcttatttaatgttagtattatttatttgacaactcagtgtctaacagcttgatatgcaggtccttgcatcctacatttctttaggaagttacccatttgtaactttaaaaacaggaaaaatatcagttggcaaatgcaatcttttttttttttaagctaaaggtgggtgaactggaatgaaaatctttctgatgttgtgtctataagcagccttgatgggatatgttagaagtgtcatgaaagtgtgattctacttttgcagaaaaatctaaagatcaatttatatagctttattttttactttatcaaagtatacagaattttaatatgcatatattgtgtctgacttaaaattataatgtctgcgtcaccatttaaaatgtctgttcattatgtaatgtaataaaagaaggtcttcaaaaatgtatttaacatgaatggtatccatagttgtcatcatcataaatactggagtttatttttaaattattaaacatagtaggtgcattaacataaatcagtctccacacagtaacatttaactgataattcattaatcagctttgaaaaattaaattgttaattaaaccaatctaacatttcagtaaagtttattttgtatgcttctgtttttaacttttatttctgtagataaactgactggataatattatattggacttttctctagattatctaagcaggagacctgaatctgcttgcaataaagaataaaagtctgcttcagtttctttataaagaaactcacacaa

SEQ ID NO: 109794 - DNA, 3163 bp, Homo sapiens
  Payload ID: 1557
  Gene Symbol: ATP11A
  Gene Name: ATPase, class VI, type 11A
  ENST ID: ENST00000418678
  CDS Start-End: 1-2807
tctacgtgggacacagggagccacctccgggcgcagaggcctacatcccacagagatacccagacaacaggatcgtctcgtccaagtacacattttggaactttatacccaagaatttatttgaacaattcagaagagtagccaacttttatttccttatcatatttctggtgcagttgattattgatacacccacaagtccagtgacaagcggacttccactcttctttgtcattactgtgacggctatcaaacagggttatgaagactggcttcgacataaagcagacaatgccatgaaccagtgtcctgttcatttcattcagcacggcaagctcgttcggaaacaaagtcgaaagctgcgagttggggacattgtcatggttaaggaggacgagacctttccctgcgacttgatcttcctttccagcaaccggggagatgggacgtgccacgtcaccaccgccagcttggatggagaatccagccataaaacgcattacgcggtccaggacaccaaaggcttccacacagaggaggatatcggcggacttcacgccaccatcgagtgtgagcagccccagcccgacctctacaagttcgtgggtcgcatcaacgtttacagtgacctgaatgaccccgtggtgaggcccttaggatcggaaaacctgctgcttagaggagctacactgaagaacactgagaaaatctttggtgtggctatttacacgggaatggaaaccaagatggcattaaattatcaatcaaaatctcagaagcgatctgccgtggaaaaatcgatgaatgcgttcctcattgtgtatctctgcattctgatcagcaaagccctgataaacactgtgctgaaatacatgtggcagagtgagccctttcgggatgagccgtggtataatcagaaaacggagtcggaaaggcagaggaatctgttcctcaaggcattcacggacttcctggccttcatggtcctctttaactacatcatccctgtgtccatgtacgtcacggtcgagatgcagaagttcctcggctcttacttcatcacctgggacgaagacatgtttgacgaggagactggcgaggggcctctggtgaacacgtcggacctcaatgaagagctgggacaggtggagtacatcttcacagacaagaccggcaccctcacggaaaacaacatggagttcaaggagtgctgcatcgaaggccatgtctacgtgccccacgtcatctgcaacgggcaggtcctcccagagtcgtcaggaatcgacatgattgactcgtcccccagcgtcaacgggagggagcgcgaggagctgtttttccgggccctctgtctctgccacaccgtccaggtgaaagacgatgacagcgtagacggccccaggaaatcgccggacggggggaaatcctgtgtgtacatctcatcctcgcccgacgaggtggcgctggtcgaaggtgtccagagacttggctttacctacctaaggctgaaggacaattacatggagatattaaacagggagaaccacatcgaaaggtttgaattgctggaaattttgagttttgactcagtcagaaggagaatgagtgtaattgtaaaatctgctacaggagaaatttatctgttttgcaaaggagcagattcttcgatattcccccgagtgatagaaggcaaagttgaccagatccgagccagagtggagcgtaacgcagtggaggggctccgaactttgtgtgttgcttataaaaggctgatccaagaagaatatgaaggcatttgtaagctgctgcaggctgccaaagtggcccttcaagatcgagagaaaaagttagcagaagcctatgagcaaatagagaaagatcttactctgcttggtgctacagctgttgaggaccggctgcaggagaaagctgcagacaccatcgaggccctgcagaaggccgggatcaaagtctgggttctcacgggagacaagatggagacggccgcggccacgtgctacgcctgcaagctcttccgcaggaacacgcagctgctggagctgaccaccaagaggatcgaggagcagagcctgcacgacgtcctgttcgagctgagcaagacggtcctgcgccacagcgggagcctgaccagagacaacctgtccggactttcagcagatatgcaggactacggtttaattatcgacggagctgcactgtctctgataatgaagcctcgagaagacgggagttccggcaactacagggagctcttcctggaaatctgccggagctgcagcgcggtgctctgctgccgcatggcgcccttgcagaaggctcagattgttaaattaatcaaattttcaaaagagcacccaatcacgttagcaattggcgatggtgcaaatgatgtcagcatgattctggaagcgcacgtgggcataggtgtcatcggcaaggaaggccgccaggctgccaggaacagcgactatgcaatcccaaagtttaagcatttgaagaagatgctgcttgttcacgggcatttttattacattaggatctctgagctcgtgcagtacttcttctataagaacgtctgcttcatcttccctcagtttttataccagttcttctgtgggttttcacaacagactttgtacgacaccgcgtatctgaccctctacaacatcagcttcacctccctccccatcctcctgtacagcctcatggagcagcatgttggcattgacgtgctcaagagagacccgaccctgtacaggtaccatcctccaaacagcctctcctgagagcagagagagtaactaggcagcactctggcagttccttccaatagccacctggcagacctcagttgagggccagaagcattcggcatctgctgatattcttgcttgatcaggagcttgtttaaactggaagcaacatagctcaaatggagattcttcaagtcttgctggatggtttatgctgcatttggaacatctgtgtggagccagtttgcactttcctgtgctttctgacagtcctgagggagctggggtacaagcgtcttcctcgttgtgaccctagggaatctgtggcctaagttatcctttaaaaccatgtgtgttccattcagtgagaaaaaacaaaaattaacagc

SEQ ID NO: 109795 - DNA, 550 bp, Homo sapiens
  Payload ID: 1557
  Gene Symbol: ATP11A
  Gene Name: ATPase, class VI, type 11A
  ENST ID: ENST00000415301
  CDS Start-End: 1-226
gttcatccagatgctgtccagcgggcccgcctggctggccatcgtgctgctggtgaccatcagcctccttcccgacgtcctcaagaaagtcctgtgccggcagctgtggccaacagcaacagagagagtccagaggggtgtgaagcacaaggctccagtccaggccgcacagagcagcgatgggcccctcctgaaggacctcctacggcggccaaggcgcagttagctccacgctagagcccaggctaccagagcacctgtccctcggccgcctggtacagctcccactctcagcaggtgacactcgcggcctggaaggagaaggtgtccacggagcccccacccatcctcggcggttcccatcaccactgcagttccatcccaagtcacagctgccctaggtcccgtgtgggaatgctcgtgtgatggatggtcctaagcctgtggagactgtgcacgtgcctcttcctggcccccagcaggcaaggaggggggtcacaggccttgccctcgagcatggcaccctggccgcctggacccagcactgtgg

SEQ ID NO: 109796 - DNA, 2446 bp, Homo sapiens
  Payload ID: 1557
  Gene Symbol: ATP11A
  Gene Name: ATPase, class VI, type 11A
  ENST ID: ENST00000419631
  CDS Start-End: 1-552
ttcaccgtgatggtgttcacagttacactaaagcttgcattggacacacactactggacttggatcaaccattttgtcatctgggggtcgctgctgttctacgttgtcttttcgcttctctggggaggagtgatctggccgttcctcaactaccagaggatgtactacgtgttcatccagatgctgtccagcgggcccgcctggctggccatcgtgctgctggtgaccatcagcctccttcccgacgtcctcaagaaagtcctgtgccggcagctgtggccaacagcaacagagagagtccagaatgggtgcgcacagcctcgggaccgcgactcagaattcacccctcttgcctctctgcagagcccaggctaccagagcacctgtccctcggccgcctggtacagctcccactctcagcaggtgacactcgcggcctggaaggagaaggtgtccacggagcccccacccatcctcggcggttcccatcaccactgcagttccatcccaagtcacagctgccctaggtcccgtgtgggaatgctcgtgtgatggatggtcctaagcctgtggagactgtgcacgtgcctcttcctggcccccagcaggcaaggaggggggtcacaggccttgccctcgagcatggcaccctggccgcctggacccagcactgtggttgttgagccacaccagtggcctctgggcattcggctcaacgcaggagggacattctgctggcccaccctgcgcgctgtcatgcagaggccattcccccaggcctgtgtcttcacccacctgccatcattggcctttgctgtcactgggagagaagagccgtccagggacccatggtggcccacatgtggatgccacatgctgctgtttcctgcttgcccggccaccacccatgccctccatagggtgaggtggagccatggtggtgcgtcctttactcaacaaccctccaatccggatgctgtgggaagggccgggtcactcggataccatcatccctgcggatgcaccgccgtaccctgctcatctgggagtggtttccctgcggttacgtccaagcccgcctgccctgtgtgttggggctggctgagtttcggtctccccatcaccggccgcctcgtggagaaggcagtgccacgtgggaggacaaggccacgccggcagcttccagccctgccgcagaagtgccaggatgtccatcagccactcgccagggcacggagccgtcagtccactgttacgggagaatgttgatttcgcgggtgcgagggccgggagacagatacttggctgtgatgagcagacatcctctgtccccgtggaggggtcaacaccaaggtggtgttcgtgcaccagaacctgtctcgggctgacgggggtggcacacaggacacgggtggatcccaacaggcagcaccgcacctctgcccgcctcccgcactgcagctccgcccgccgggctctgcgtccccacgtcccctcgtcccatccccacgtcccctcatcccgtcacctcgtccccacatccccttgccccgtcacctcgtcctcatgtccccttgtcctgtcacctcgtccccacgtcccctcgtctcctcatccccacgtcctctcgtccccttgtcccgtccccacataccctcgtccccatgtccccacgcagggctctccttcgtcttaggatctgtccagcgctgctctgggtgggttagcaaccccagggctgctgtgataggaagtccctgttgttctccgtactggcatttctatttctagaaataatatttgacatagccttaatggtccttaaagaagacatttcagtgtgagattcagacttcagacgctgaaactgctgcctttcaggaaagcaccaccaacgctggaggaggagccggccctcacgcccgccccgcgccacgctgtggaacggggctccggcaagtgaaacccagagggtgtttccgaggtgctcgacagtaggtatttttggaagctcagatttcaccatttgattgtataatcttttacctataaaatatttatttgaagtagagggtaaatcagcggtaagaacagtgaacacagtggttgggataaaataaggtgacaaacatcacaccaaagatgagggtagcgagcaactggcttgagcagacagaacggggaagactccactctgtcccgaggggccagccgcaggcgtccccagggccaccctgccctgaggtccttgtgtggccgccctggcttggcagccctgcccacgctgcccccgcaaacaatggtgtgtgcgtttttacagccctttttaggaacccaatatgggcataaatgtaacacctgtagcgggggcagattctctgtatgttcagttaacaaattatttgtaatgtatttttttagaaatcttaaaattgcctttgcactg

SEQ ID NO: 109797 - DNA, 8858 bp, Homo sapiens
  Payload ID: 1557
  Gene Symbol: ATP11A
  Gene Name: ATPase, class VI, type 11A
  Uniprot ID: P98196
  ENST ID: ENST00000487903
  CDS Start-End: 89-3493
gcggccgcactagtaccccggagcccatgggcgcgccgagccgggcgcgggggcgctgaacggcggagcgggagcggccggaggagccatggactgcagcctcgtgcggacgctcgtgcacagatactgtgcaggagaagagaattgggtggacagcaggaccatctacgtgggacacagggagccacctccgggcgcagaggcctacatcccacagagatacccagacaacaggatcgtctcgtccaagtacacattttggaactttatacccaagaatttatttgaacaattcagaagagtagccaacttttatttccttatcatatttctggtgcagttgattattgatacacccacaagtccagtgacaagcggacttccactcttctttgtcattactgtgacggctatcaaacagggttatgaagactggcttcgacataaagcagacaatgccatgaaccagtgtcctgttcatttcattcagcacggcaagctcgttcggaaacaaagtcgaaagctgcgagttggggacattgtcatggttaaggaggacgagacctttccctgcgacttgatcttcctttccagcaaccggggagatgggacgtgccacgtcaccaccgccagcttggatggagaatccagccataaaacgcattacgcggtccaggacaccaaaggcttccacacagaggaggatatcggcggacttcacgccaccatcgagtgtgagcagccccagcccgacctctacaagttcgtgggtcgcatcaacgtttacagtgacctgaatgaccccgtggtgaggcccttaggatcggaaaacctgctgcttagaggagctacactgaagaacactgagaaaatctttggtgtggctatttacacgggaatggaaaccaagatggcattaaattatcaatcaaaatctcagaagcgatctgccgtggaaaaatcgatgaatgcgttcctcattgtgtatctctgcattctgatcagcaaagccctgataaacactgtgctgaaatacatgtggcagagtgagccctttcgggatgagccgtggtataatcagaaaacggagtcggaaaggcagaggaatctgttcctcaaggcattcacggacttcctggccttcatggtcctctttaactacatcatccctgtgtccatgtacgtcacggtcgagatgcagaagttcctcggctcttacttcatcacctgggacgaagacatgtttgacgaggagactggcgaggggcctctggtgaacacgtcggacctcaatgaagagctgggacaggtggagtacatcttcacagacaagaccggcaccctcacggaaaacaacatggagttcaaggagtgctgcatcgaaggccatgtctacgtgccccacgtcatctgcaacgggcaggtcctcccagagtcgtcaggaatcgacatgattgactcgtcccccagcgtcaacgggagggagcgcgaggagctgtttttccgggccctctgtctctgccacaccgtccaggtgaaagacgatgacagcgtagacggccccaggaaatcgccggacggggggaaatcctgtgtgtacatctcatcctcgcccgacgaggtggcgctggtcgaaggtgtccagagacttggctttacctacctaaggctgaaggacaattacatggagatattaaacagggagaaccacatcgaaaggtttgaattgctggaaattttgagttttgactcagtcagaaggagaatgagtgtaattgtaaaatctgctacaggagaaatttatctgttttgcaaaggagcagattcttcgatattcccccgagtgatagaaggcaaagttgaccagatccgagccagagtggagcgtaacgcagtggaggggctccgaactttgtgtgttgcttataaaaggctgatccaagaagaatatgaaggcatttgtaagctgctgcaggctgccaaagtggcccttcaagatcgagagaaaaagttagcagaagcctatgagcaaatagagaaagatcttactctgcttggtgctacagctgttgaggaccggctgcaggagaaagctgcagacaccatcgaggccctgcagaaggccgggatcaaagtctgggttctcacgggagacaagatggagacggccgcggccacgtgctacgcctgcaagctcttccgcaggaacacgcagctgctggagctgaccaccaagaggatcgaggagcagagcctgcacgacgtcctgttcgagctgagcaagacggtcctgcgccacagcgggagcctgaccagagacaacctgtccggactttcagcagatatgcaggactacggtttaattatcgacggagctgcactgtctctgataatgaagcctcgagaagacgggagttccggcaactacagggagctcttcctggaaatctgccggagctgcagcgcggtgctctgctgccgcatggcgcccttgcagaaggctcagattgttaaattaatcaaattttcaaaagagcacccaatcacgttagcaattggcgatggtgcaaatgatgtcagcatgattctggaagcgcacgtgggcataggtgtcatcggcaaggaaggccgccaggctgccaggaacagcgactatgcaatcccaaagtttaagcatttgaagaagatgctgcttgttcacgggcatttttattacattaggatctctgagctcgtgcagtacttcttctataagaacgtctgcttcatcttccctcagtttttataccagttcttctgtgggttttcacaacagactttgtacgacaccgcgtatctgaccctctacaacatcagcttcacctccctccccatcctcctgtacagcctcatggagcagcatgttggcattgacgtgctcaagagagacccgaccctgtacagggacgtcgccaagaatgccctgctgcgctggcgcgtgttcatctactggacgctcctgggactgtttgacgcactggtgttcttctttggtgcttatttcgtgtttgaaaatacaactgtgacaagcaacgggcagatatttggaaactggacgtttggaacgctggtattcaccgtgatggtgttcacagttacactaaagcttgcattggacacacactactggacttggatcaaccattttgtcatctgggggtcgctgctgttctacgttgtcttttcgcttctctggggaggagtgatctggccgttcctcaactaccagaggatgtactacgtgttcatccagatgctgtccagcgggcccgcctggctggccatcgtgctgctggtgaccatcagcctccttcccgacgtcctcaagaaagtcctgtgccggcagctgtggccaacagcaacagagagagtccagactaagagccagtgcctttctgtcgagcagtcaaccatctttatgctttctcagacttccagcagcctgagtttctgatggaacaagcagaatgggtgcgcacagcctcgggaccgcgactcagaattcacccctcttgcctctctgcagagcccaggctaccagagcacctgtccctcggccgcctggtacagctcccactctcagcaggtgacactcgcggcctggaaggagaaggtgtccacggagcccccacccatcctcggcggttcccatcaccactgcagttccatcccaagtcacagctgccctaggtcccgtgtgggaatgctcgtgtgatggatggtcctaagcctgtggagactgtgcacgtgcctcttcctggcccccagcaggcaaggaggggggtcacaggccttgccctcgagcatggcaccctggccgcctggacccagcactgtggttgttgagccacaccagtggcctctgggcattcggctcaacgcaggagggacattctgctggcccaccctgcgcgctgtcatgcagaggccattcccccaggcctgtgtcttcacccacctgccatcattggcctttgctgtcactgggagagaagagccgtccagggacccatggtggcccacatgtggatgccacatgctgctgtttcctgcttgcccggccaccacccatgccctccatagggtgaggtggagccatggtggtgcgtcctttactcaacaaccctccaatccggatgctgtgggaagggccgggtcactcggataccatcatccctgcggatgcaccgccgtaccctgctcatctgggagtggtttccctgcggttacgtccaagcccgcctgccctgtgtgttggggctggctgagtttcggtctccccatcaccggccgcctcgtggagaaggcagtgccacgtgggaggacaaggccacgccggcagcttccagccctgccgcagaagtgccaggatgtccatcagccactcgccagggcacggagccgtcagtccactgttacgggagaatgttgatttcgcgggtgcgagggccgggagacagatacttggctgtgatgagcagacatcctctgtccccgtggaggggtcaacaccaaggtggtgttcgtgcaccagaacctgtctcgggctgacgggggtggcacacaggacacgggtggatcccaacaggcagcaccgcacctctgcccgcctcccgcactgcagctccgcccgccgggctctgcgtccccacgtcccctcgtcccatccccacgtcccctcatcccgtcacctcgtccccacatccccttgccccgtcacctcgtcctcatgtccccttgtcctgtcacctcgtccccacgtcccctcgtctcctcatccccacgtcctctcgtccccttgtcccgtccccacataccctcgtccccatgtccccacgcagggctctccttcgtcttaggatctgtccagcgctgctctgggtgggttagcaaccccagggctgctgtgataggaagtccctgttgttctccgtactggcatttctatttctagaaataatatttgacatagccttaatggtccttaaagaagacatttcagtgtgagattcagacttcagacgctgaaactgctgcctttcaggaaagcaccaccaacgctggaggaggagccggccctcacgcccgccccgcgccacgctgtggaacggggctccggcaagtgaaacccagagggtgtttccgaggtgctcgacagtaggtatttttggaagctcagatttcaccatttgattgtataatcttttacctataaaatatttatttgaagtagagggtaaatcagcggtaagaacagtgaacacagtggttgggataaaataaggtgacaaacatcacaccaaagatgagggtagcgagcaactggcttgagcagacagaacggggaagactccactctgtcccgaggggccagccgcaggcgtccccagggccaccctgccctgaggtccttgtgtggccgccctggcttggcagccctgcccacgctgcccccgcaaacaatggtgtgtgcgtttttacagccctttttaggaacccaatatgggcataaatgtaacacctgtagcgggggcagattctctgtatgttcagttaacaaattatttgtaatgtatttttttagaaatcttaaaattgcctttgcactgaagtattttcatagctgtttatatctcttttattcatttatttaacatactgtctaattttaaaaataggtttttaaagctttcatttttaagtttatgaaattttggccactttacatttagattctggtgagagttttgactgaatgttccaatctctgatgaatgcgaattttcagatttgattttattctctacacacacctcttcttttcttggtatttctggtggcagtgattagttgaacagcacatttaaggcacgataatttgctacactttttctttacaatttgttgcaatttcatctgctttctatgtttcattgttaattgccatccttcagccttaaaaatagaagattctcacgtgaaggtttagtaagttgggtcccagctctgcctgtgtggagatagtcaccatgtacctctgacaacaagttttagtgtgaaagtcactaaacttttacacactcccaaacgtctttttaaaaattgcttgggaaattattaaatgaatgtgcctgatgatttgaaatagacaaggggcacgagataaaaaagaaaaggatgagaagatcctcagtgaatgacgttgcagggtcttcatgcaattttccacctcgcagtagttagtatttacttgccttaaactaactttgaagcaagtaatgtcaactttgagcactttgttgagttttgaaaaatcttatttgttgctgcacaggttaataaattatcaatttgtaattcagcatgttggtcagagacacggtcactgattcacacccagtccctgccacagaccgtctcagacacgcacagtgggcctgctgcatgattcacacccagtccctgccacagaccgtctcagacacgcacagtgggcctgctgcatgattcacacccagtccctgccacagaccgtctcagacacgcacagtgggcctgctgcatgcgtgttacctggcttttggctccacgctcactcatagccatgtccacatgggggcttgcacacaggatcactcacatatgtacatgtacccaccacaaacgtgcaagctcctgcacacatgcatgcacacaaacgtgtacacaagtgtgagctcctacacgcatacacacacacacgtgtacatgcaccaaagcatgtgtgacctacagacatgcagaacatgcacgtgtacacataccacagacacgcgtgtgcatgctcctacacaatacatatgcacatatcatgaacagcgtaagttcctacacacggacgtgtgatacacacatgcatgtacaggtaagcacacatgtacaagctcctacaggcttgctctcacacacgtgtatgcacagcagagagacgtatgagcttctactgcacacatgcacacacacacgcacacgtacattcactacaaacgtgcagcctcctgcacacgtgcacattcatgtgtacaccacaaatgagttcccagacgtgtaaacacacgtgcacacatcgtacacatgtgagctcccacacgtacacacagatgcacatggacacaccccaaacacgcacaggctcctacacacatgcacacacgtgtacaccacaaacgagctcccagacatgtaaacacacgtctcccacacgtgagctcccacacgtacacatgcacatgtacgcaccacaaacacatgcgcaggctcctgcaggcgtgaatacacacatgcacacacatatacacacatgtgccacaaacaagtgcacactgtcctggtgtcctgcactgcatcctgcctccttgctgaggggcccctgtgagaggcctctggatgggcatgggaagatgggctccctggcccccagcccatgcctccctgggatgaagagtccccctcctggcagaatgtctgggctttgcagagcaggccccgggggtgaagtcgcagcttcacttacaccagctgctctgtgagcaaggcttggtgccctggacaaggcccttcccctttagggaggtccagcctcgcaagctgaaacctcccctcggctcagccctataccaggcggccacagcaggactggccacacccacgccgcacctcatccgtgcacgcgtcggagcacggccagccttccgccacgagccagctgggaagggccgcggccgcctaaagccccagtcaacccagcctgtgtctgagcagacagggcgaacaagcaggccacaccgtctcgagggaggaggccagatgcggccagcgtctccaacagggtgaccatccgctcggcttgctgagcgtttaaacaaatgtttagacaggctgtggggactcccctgagttgagccttggccaggggtccggtgctgtcgcgggaaacctccagccttgttcttcaaaccactcagctcatgtgttttgcactgactagtactgaataatacaaccactcttatttaatgttagtattatttatttgacaactcagtgtctaacagcttgatatgcaggtccttgcatcctacatttctttaggaagttacccatttgtaactttaaaaacaggaaaaatatcagttggcaaatgcaatcttttttttttttaagctaaaggtgggtgaactggaatgaaaatctttctgatgttgtgtctataagcagccttgatgggatatgttagaagtgtcatgaaagtgtgattctacttttgcagaaaaatctaaagatcaatttatatagctttattttttactttatcaaagtatacagaattttaatatgcatatattgtgtctgacttaaaattataatgtctgcgtcaccatttaaaatgtctgttcattatgtaatgtaataaaagaaggtcttcaaaaatgtatttaacatgaatggtatccatagttgtcatcatcataaatactggagtttatttttaaattattaaacatagtaggtgcattaacataaatcagtctccacacagtaacatttaactgataattcattaatcagctttgaaaaattaaattgttaattaaaccaatctaacatttcagtaaagtttattttgtatgcttctgtttttaacttttatttctgtagataaactgactggataatattatattggacttttctctagattatctaagcaggagacctgaatctgcttgcaataaagaataaaagtctgcttcagtttctttataaagaaactcacacaa

SEQ ID NO: 109798 - DNA, 5786 bp, Homo sapiens
  Payload ID: 1557
  Gene Symbol: ATP11A
  Gene Name: ATPase, class VI, type 11A
  ENST ID: ENST00000471555
  CDS Start-End: 1-1058
cttcgatattcccccgagtgatagaaggcaaagttgaccagatccgagccagagtggagcgtaacgcagtggaggggctccgaactttgtgtgttgcttataaaaggctgatccaagaagaatatgaaggcatttgtaagctgctgcaggctgccaaagtggcccttcaagatcgagagaaaaagttagcagaagcctatgagcaaatagagaaagatcttactctgcttggtgctacagctgttgaggaccggctgcaggagaaagctgcagacaccatcgaggccctgcagaaggccgggatcaaagtctgggttctcacgggagacaagatggagacggccgcggccacgtgctacgcctgcaagctcttccgcaggaacacgcagctgctggagctgaccaccaagaggatcgaggagcagagcctgcacgacgtcctgttcgagctgagcaagacggtcctgcgccacagcgggagcctgaccagagacaacctgtccggactttcagcagatatgcaggactacggtttaattatcgacggagctgcactgtctctgataatgaagcctcgagaagacgggagttccggcaactacagggagctcttcctggaaatctgccggagctgcagcgcggtgctctgctgccgcatggcgcccttgcagaaggctcagattgttaaattaatcaaattttcaaaagagcacccaatcacgttagcaattggcgatggtgcaaatgatgtcagcatgattctggaagcgcacgtgggcataggtgtcatcggcaaggaaggccgccaggctgccaggaacagcgactatgcaatcccaaagtttaagcatttgaagaagatgctgcttgttcacgggcatttttattacattaggatctctgagctcgtgcagtacttcttctataagaacgtctgcttcatcttccctcagtttttataccagttcttctgtgggttttcacaacagggacgtcgccaagaatgccctgctgcgctggcgcgtgttcatctactggacgctcctgggactgtttgacgcactggtgttcttctttggtgcttatttcgtgtttgaaaatacaactgtgacaagcaacgggcagatatttggaaactggacgtttggaacgctggtattcaccgtgatggtgttcacagttacactaaagcttgcattggacacacactactggacttggatcaaccattttgtcatctgggggtcgctgctgttctacgttgtcttttcgcttctctggggaggagtgatctggccgttcctcaactaccagaggatgtactacgtgttcatccagatgctgtccagcgggcccgcctggctggccatcgtgctgctggtgaccatcagcctccttcccgacgtcctcaagaaagtcctgtgccggcagctgtggccaacagcaacagagagagtccagactaagagccagtgcctttctgtcgagcagtcaaccatctttatgctttctcagacttccagcagcctgagtttctgatggaacaagagcccaggctaccagagcacctgtccctcggccgcctggtacagctcccactctcagcaggtgacactcgcggcctggaaggagaaggtgtccacggagcccccacccatcctcggcggttcccatcaccactgcagttccatcccaagtcacagctgccctaggtcccgtgtgggaatgctcgtgtgatggatggtcctaagcctgtggagactgtgcacgtgcctcttcctggcccccagcaggcaaggaggggggtcacaggccttgccctcgagcatggcaccctggccgcctggacccagcactgtggttgttgagccacaccagtggcctctgggcattcggctcaacgcaggagggacattctgctggcccaccctgcgcgctgtcatgcagaggccattcccccaggcctgtgtcttcacccacctgccatcattggcctttgctgtcactgggagagaagagccgtccagggacccatggtggcccacatgtggatgccacatgctgctgtttcctgcttgcccggccaccacccatgccctccatagggtgaggtggagccatggtggtgcgtcctttactcaacaaccctccaatccggatgctgtgggaagggccgggtcactcggataccatcatccctgcggatgcaccgccgtaccctgctcatctgggagtggtttccctgcggttacgtccaagcccgcctgccctgtgtgttggggctggctgagtttcggtctccccatcaccggccgcctcgtggagaaggcagtgccacgtgggaggacaaggccacgccggcagcttccagccctgccgcagaagtgccaggatgtccatcagccactcgccagggcacggagccgtcagtccactgttacgggagaatgttgatttcgcgggtgcgagggccgggagacagatacttggctgtgatgagcagacatcctctgtccccgtggaggggtcaacaccaaggtggtgttcgtgcaccagaacctgtctcgggctgacgggggtggcacacaggacacgggtggatcccaacaggcagcaccgcacctctgcccgcctcccgcactgcagctccgcccgccgggctctgcgtccccacgtcccctcgtcccatccccacgtcccctcatcccgtcacctcgtccccacatccccttgccccgtcacctcgtcctcatgtccccttgtcctgtcacctcgtccccacgtcccctcgtctcctcatccccacgtcctctcgtccccttgtcccgtccccacataccctcgtccccatgtccccacgcagggctctccttcgtcttaggatctgtccagcgctgctctgggtgggttagcaaccccagggctgctgtgataggaagtccctgttgttctccgtactggcatttctatttctagaaataatatttgacatagccttaatggtccttaaagaagacatttcagtgtgagattcagacttcagacgctgaaactgctgcctttcaggaaagcaccaccaacgctggaggaggagccggccctcacgcccgccccgcgccacgctgtggaacggggctccggcaagtgaaacccagagggtgtttccgaggtgctcgacagtaggtatttttggaagctcagatttcaccatttgattgtataatcttttacctataaaatatttatttgaagtagagggtaaatcagcggtaagaacagtgaacacagtggttgggataaaataaggtgacaaacatcacaccaaagatgagggtagcgagcaactggcttgagcagacagaacggggaagactccactctgtcccgaggggccagccgcaggcgtccccagggccaccctgccctgaggtccttgtgtggccgccctggcttggcagccctgcccacgctgcccccgcaaacaatggtgtgtgcgtttttacagccctttttaggaacccaatatgggcataaatgtaacacctgtagcgggggcagattctctgtatgttcagttaacaaattatttgtaatgtatttttttagaaatcttaaaattgcctttgcactgaagtattttcatagctgtttatatctcttttattcatttatttaacatactgtctaattttaaaaataggtttttaaagctttcatttttaagtttatgaaattttggccactttacatttagattctggtgagagttttgactgaatgttccaatctctgatgaatgcgaattttcagatttgattttattctctacacacacctcttcttttcttggtatttctggtggcagtgattagttgaacagcacatttaaggcacgataatttgctacactttttctttacaatttgttgcaatttcatctgctttctatgtttcattgttaattgccatccttcagccttaaaaatagaagattctcacgtgaaggtttagtaagttgggtcccagctctgcctgtgtggagatagtcaccatgtacctctgacaacaagttttagtgtgaaagtcactaaacttttacacactcccaaacgtctttttaaaaattgcttgggaaattattaaatgaatgtgcctgatgatttgaaatagacaaggggcacgagataaaaaagaaaaggatgagaagatcctcagtgaatgacgttgcagggtcttcatgcaattttccacctcgcagtagttagtatttacttgccttaaactaactttgaagcaagtaatgtcaactttgagcactttgttgagttttgaaaaatcttatttgttgctgcacaggttaataaattatcaatttgtaattcagcatgttggtcagagacacggtcactgattcacacccagtccctgccacagaccgtctcagacacgcacagtgggcctgctgcatgattcacacccagtccctgccacagaccgtctcagacacgcacagtgggcctgctgcatgattcacacccagtccctgccacagaccgtctcagacacgcacagtgggcctgctgcatgcgtgttacctggcttttggctccacgctcactcatagccatgtccacatgggggcttgcacacaggatcactcacatatgtacatgtacccaccacaaacgtgcaagctcctgcacacatgcatgcacacaaacgtgtacacaagtgtgagctcctacacgcatacacacacacacgtgtacatgcaccaaagcatgtgtgacctacagacatgcagaacatgcacgtgtacacataccacagacacgcgtgtgcatgctcctacacaatacatatgcacatatcatgaacagcgtaagttcctacacacggacgtgtgatacacacatgcatgtacaggtaagcacacatgtacaagctcctacaggcttgctctcacacacgtgtatgcacagcagagagacgtatgagcttctactgcacacatgcacacacacacgcacacgtacattcactacaaacgtgcagcctcctgcacacgtgcacattcatgtgtacaccacaaatgagttcccagacgtgtaaacacacgtgcacacatcgtacacatgtgagctcccacacgtacacacagatgcacatggacacaccccaaacacgcacaggctcctacacacatgcacacacgtgtacaccacaaacgagctcccagacatgtaaacacacgtctcccacacgtgagctcccacacgtacacatgcacatgtacgcaccacaaacacatgcgcaggctcctgcaggcgtgaatacacacatgcacacacatatacacacatgtgccacaaacaagtgcacactgtcctggtgtcctgcactgcatcctgcctccttgctgaggggcccctgtgagaggcctctggatgggcatgggaagatgggctccctggcccccagcccatgcctccctgggatgaagagtccccctcctggcagaatgtctgggctttgcagagcaggccccgggggtgaagtcgcagcttcacttacaccagctgctctgtgagcaaggcttggtgccctggacaaggcccttcccctttagggaggtccagcctcgcaagctgaaacctcccctcggctcagccctataccaggcggccacagcaggactggccacacccacgccgcacctcatccgtgcacgcgtcggagcacggccagccttccgccacgagccagctgggaagggccgcggccgc

SEQ ID NO: 109799 - DNA, 885 bp, Homo sapiens
  Payload ID: 1557
  Gene Symbol: ATP11A
  Gene Name: ATPase, class VI, type 11A
  ENST ID: ENST00000610419
  CDS Start-End: 1-189
gatatgcaggactacggtttaattatcgacggagctgcactgtctctgataatgaagcctcgagaagacgggagttccggcaactacagggagctcttcctggaaatctgccggagctgcagcgcggtgctctgctgccgcatggcgcccttgcagaaggctcaggtgctgcccgcccgtcctcgatagctggtggtcagggcgtccaaaacactgaaaaccttccgttaggtctcaccgcctcagattgttaaacaatctagcagggtaccacctgttaaaaatagaagcaaccgtgatagagatttaaaacgcagatcttgttttgcttgtcgggccagcttctgtgattagtgggtgatgaccagtcagatgtatgacccttccagatgcagtggccaggacagctgccctggctgacttctgttaaaaaaaaaaaaaaaagctatctcaatcactcctgagaatctacactaaaggtgtaagggaagggagctgacattactgagcacctagtgtgtgcctcctacagatacgaatgcatttagtctcaaaataaccctctcagacaaatgagggcaccagctttacaaatgggaataatttgccgaaaaggctgcagatgggaaatgccacgaggattcaacttgtcttgtccatcaaactccaaacgtctcacgcggccatgttcttgtgggaaacgcacacctgaagttttttctttaaatagttttgaaagcactatggaatgtattgtaaacatggatgtctttctggtatcaggaagcctagaaaagttctgactttgttataccacattttagatatgataggccaatttctcttgaactgttcatgaataaatccatcattggtcagagcaaa

SEQ ID NO: 109800 - DNA, 7325 bp, Homo sapiens
  Payload ID: 1558
  Gene Symbol: ATP11B
  Gene Name: ATPase, class VI, type 11B
  Uniprot ID: Q9Y2G3
  ENST ID: ENST00000323116
  CDS Start-End: 261-3794
ggtcaataatgaaggtggctgcggcgcggcggcaggctcagctgcgccgggcgggggcggcgccggggccgcgcctgtaggactcggggccgacgccgcgggatggggacgcggcgcggggagtgaggcagtggcggcggcggcggtaagcggaacttcggcccgaggggctcgcccgctcccgcctctgtcttgtcggcctccacctgcagccccgcggcccccgcgccccgcgggacccggacggcgacgacgggggaatgtggcgctggatccggcagcagctgggttttgacccaccacatcagagtgacacaagaaccatctacgtagccaacaggtttcctcagaatggcctttacacacctcagaaatttatagataacaggatcatttcatctaagtacactgtgtggaattttgttccaaaaaatttatttgaacagttcagaagagtggcaaacttttattttcttattatatttttggttcagcttatgattgatacacctaccagtccagttaccagtggacttccattattctttgtgataacagtaactgccataaagcagggatatgaagattggttacggcataactcagataatgaagtaaatggagctcctgtttatgttgttcgaagtggtggccttgtaaaaactagatcaaaaaacattcgggtgggtgatattgttcgaatagccaaagatgaaatttttcctgcagacttggtgcttctgtcctcagatcgactggatggttcctgtcacgttacaactgctagtttggacggagaaactaacctgaagacacatgtggcagttccagaaacagcattattacaaacagttgccaatttggacactctagtagctgtaatagaatgccagcaaccagaagcagacttatacagattcatgggacgaatgatcataacccaacaaatggaagaaattgtaagacctctggggccggagagtctcctgcttcgtggagccagattaaaaaacacaaaagaaatttttggtgttgcggtatacactggaatggaaactaagatggcattaaattacaagagcaaatcacagaaacgatctgcagtagaaaagtcaatgaatacatttttgataatttatctagtaattcttatatctgaagctgtcatcagcactatcttgaagtatacatggcaagctgaagaaaaatgggatgaaccttggtataaccaaaaaacagaacatcaaagaaatagcagtaagattctgagatttatttcagacttccttgcttttttggttctctacaatttcatcattccaatttcattatatgtgacagtcgaaatgcagaaatttcttggatcattttttattggctgggatcttgatctgtatcatgaagaatcagatcagaaagctcaagtcaatacttccgatctgaatgaagagcttggacaggtagagtacgtgtttacagataaaactggtacactgacagaaaatgagatgcagtttcgggaatgttcaattaatggcatgaaataccaagaaattaatggtagacttgtacccgaaggaccaacaccagactcttcagaaggaaacttatcttatcttagtagtttatcccatcttaacaacttatcccatcttacaaccagttcctctttcagaaccagtcctgaaaatgaaactgaactaattaaagaacatgatctcttctttaaagcagtcagtctctgtcacactgtacagattagcaatgttcaaactgactgcactggtgatggtccctggcaatccaacctggcaccatcgcagttggagtactatgcatcttcaccagatgaaaaggctctagtagaagctgctgcaaggattggtattgtgtttattggcaattctgaagaaactatggaggttaaaactcttggaaaactggaacggtacaaactgcttcatattctggaatttgattcagatcgtaggagaatgagtgtaattgttcaggcaccttcaggtgagaagttattatttgctaaaggagctgagtcatcaattctccctaaatgtataggtggagaaatagaaaaaaccagaattcatgtagatgaatttgctttgaaagggctaagaactctgtgtatagcatatagaaaatttacatcaaaagagtatgaggaaatagataaacgcatatttgaagccaggactgccttgcagcagcgggaagagaaattggcagctgttttccagttcatagagaaagacctgatattacttggagccacagcagtagaagacagactacaagataaagttcgagaaactattgaagcattgagaatggctggtatcaaagtatgggtacttactggggataaacatgaaacagctgttagtgtgagtttatcatgtggccattttcatagaaccatgaacatccttgaacttataaaccagaaatcagacagcgagtgtgctgaacaattgaggcagcttgccagaagaattacagaggatcatgtgattcagcatgggctggtagtggatgggaccagcctatctcttgcactcagggagcatgaaaaactatttatggaagtttgcagaaattgttcagctgtattatgctgtcgtatggctccactgcagaaagcaaaagtaataagactaataaaaatatcacctgagaaacctataacattggctgttggtgatggtgctaatgacgtaagcatgatacaagaagcccatgttggcataggaatcatgggtaaagaaggaagacaggctgcaagaaacagtgactatgcaatagccagatttaagttcctctccaaattgctttttgttcatggtcatttttattatattagaatagctacccttgtacagtattttttttataagaatgtgtgctttatcacaccccagtttttatatcagttctactgtttgttttctcagcaaacattgtatgacagcgtgtacctgactttatacaatatttgttttacttccctacctattctgatatatagtcttttggaacagcatgtagaccctcatgtgttacaaaataagcccaccctttatcgagacattagtaaaaaccgcctcttaagtattaaaacatttctttattggaccatcctgggcttcagtcatgcctttattttcttttttggatcctatttactaatagggaaagatacatctctgcttggaaatggccagatgtttggaaactggacatttggcactttggtcttcacagtcatggttattacagtcacagtaaagatggctctggaaactcatttttggacttggatcaaccatctcgttacctggggatctattatattttattttgtattttccttgttttatggagggattctctggccatttttgggctcccagaatatgtattttgtgtttattcagctcctgtcaagtggttctgcttggtttgccataatcctcatggttgttacatgtctatttcttgatatcataaagaaggtctttgaccgacacctccaccctacaagtactgaaaaggcacagcttactgaaacaaatgcaggtatcaagtgcttggactccatgtgctgtttcccggaaggagaagcagcgtgtgcatctgttggaagaatgctggaacgagttataggaagatgtagtccaacccacatcagcagatcatggagtgcatcggatcctttctataccaacgacaggagcatcttgactctctccacaatggactcatctacttgttaaaggggcagtagtactttgtgggagccagttcacctcctttcctaaaattcagtgtgatcaccctgttaatggccacactagctctgaaattaatttccaaaatctttgtagtagttcatacccactcagagttataatggcaaacaaacagaaagcattagtacaagcccctcccaacacccttaatttgaatctgaacatgttaaaatttgagaataaagagacatttttcatctctttgtctggtttgtcccttgtgcttatgggactcctaatggcatttcagtctgttgctgaggccattatattttaatataaatgtagaaaaaagagagaaatcttagtaaagagtattttttagtattagcttgattattgactcttctatttaaatctgcttctgtaaattatgctgaaagtttgccttgagaactctatttttttattagagttatatttaaagcttttcatgggaaaagttaatgtgaatactgaggaattttggtccctcagtgacctgtgttgttaattcattaatgcattctgagttcacagagcaaattaggagaatcatttccaaccattatttactgcagtatggggagtaaatttataccaattcctctaactgtactgtaacacagcctgtaaagttagccatataaatgcaagggtatatcatatatacaaatcaggaatcaggtccgttcaccgaacttcaaattgatgtttactaatatttttgtgacagagtataaagaccctatagtgggtaaattagatactattagcatattattaatttaatgtctttatcattggatcttttgcatgctttaatctggttaacatatttaaatttgctttttttctctttacctgaaggctctgtgtatagtatttcatgacatcgttgtacagtttaactatatcaataaaaagtttggacagtatttaaatattgcaaatatgtttaattatacaaatcagaatagtatgggtaattaaatgaatacaaaaagaagagcctctttctgcagccgacttagacatgctcttccctttctataagctagattttagaataaagggtttcagttaataatcttattttcaggttatgtcatctaacttatagcaaactaccacaatacagtgagttctgccagtgtcccagtacaaggcatatttcaggtgtggctgtggaatgtaaaaatgctcaacttgtatcaggtaatgttagcaataaattaaatgctaagaatgattaatcgggtacatgttactgtaattaactcattgcacttcaaaacctaacttccatcctgaatttatcaagtagttcagtattgtcatttgtttttgttttattgaaaagtaatgttgtcttaagatttagaagtgattattagcttgagaactattacccagctctaagcaaataatgattgtatacatattaagataatggttaaatgcggttttaccaagttttcccttgaaaatgtaattcctttatggagatttattgtgcagccctaagcttccttcccatttcatgaatataaggcttctagaattggactggcaggggaaagaatggtagagacagaaattaagactttatccttgtttgcttgtaaactattattttcttgctaatgtaacatttgtctgttccagtgatgtaaggatattaagttattaagctaaatattaattttcaaaaatagtccttctttaacttagatatttcatagctggatttaggaagatctgttattctggaagtactaaaaagaataatacaacgtacaatgtctgcattcactaattcatgttccagaagaggaaataatgaagatatactcagtagagtactaggtgggaggatatggaaatttgctcataaaatctcttataaaacgtgcatataacaaaatgacacccagtaggcctgcattacatttacatgaccgtgtttatttgccatcaaataaactgagtactgacaccagacaaagactccaaagtcataaaatagcctatgaccaactgcagcaagacaggaggtcagctcgcctataatggtgcttaaagtgtgattgatgtaattttctgtactcaccatttgaagttagttaaggagaactttatttttttaaaaaaagtaaatggcaaccactagtgtgctcatcctgaactgttactccaaatccactccgtttttaaagcaaaattatcttgtgattttaagaaaagagttttctatttatttaagaaagtaacaatgcagtctgcaagctttcagtagttttctagtgctatattcatcctgtaaaactcttactacgtaaccagtaatcacaaggaaagtgtcccctttgcatatttctttaaaattctttctttggaaagtatgatgttgataattaacttacccttatctgccaaaaccagagcaaaatgctaaatacgttattgctaatcagtggtctcaaatcgatttgcctccctttgcctcgtctgagggctgtaagcctgaagatagtggcaagcaccaagtcagtttccaaaattgcccctcagctgctttaagtgactcagcaccctgcctcagcttcagcaggcgtaggctcaccctgggcggagcaaagtatgggccagggagaactacagctacgaagacctgctgtcgagttgagaaaaggggagaatttatggtctgaattttctaactgtcctctttcttgggtctaaagctcataatacacaaaggcttccagacctgagccacacccaggccctatcctgaacaggagactaaacagaggcaaatcaaccctaggaaatacttgcattctgccctacggttagtaccaggactgaggtcatttctactggaaaagattgtgagattgaacttatctgatcgcttgagactcctaataggcaggagtcaaggccactagaaaattgacagttaagagccaaaagtttttaaaatatgctactctgaaaaatctcgtgaaggctgtaggaaaagggagaatcttccatgttggtgtttttcctgtaaagatcagtttggggtatgatataagcaggtattaataaaaataacacaccaaagagttacgtaaaacatgttttattaattttggtccccacgtacagacattttatttctattttgaaatgagttatctattttcataaaagtaaaacactattaaagtgctgttttatgtgaaataacttgaatgttgttcctataaaaaatagatcataactcatgatatgtttgtaatcatggtaatttagatttttatgaggaatgagtatctggaaatattgtagcaatacttggtttaaaattttggacctgagacactgtggctgtctaatgtaatcctttaaaaattctctgcattgtcagtaaatgtagtatattattgtacagctactcataattttttaaagtttatgaagttatatttatcaaataaaaactttcctatataattaaaa

SEQ ID NO: 109801 - DNA, 716 bp, Homo sapiens
  Payload ID: 1558
  Gene Symbol: ATP11B
  Gene Name: ATPase, class VI, type 11B
  ENST ID: ENST00000482070
  CDS Start-End: 1-716
gggaccagcctatctcttgcactcagggagcatgaaaaactatttatggaagtttgcagaaattgttcagctgtattatgctgtcgtatggctccactgcagaaagcaaaagtaataagactaataaaaatatcacctgagaaacctataacattggctgttggtgatggtgctaatgacgtaagcatgatacaagaagcccatgttggcataggaatcatgggtaaagaaggaagacaggctgcaagaaacagtgactatgcaatagccagatttaagttcctctccaaattgctttttgttcatggtcatttttattatattagaatagctacccttgtacagtattttttttataagacattgtatgacagcgtgtacctgactttatacaatatttgttttacttccctacctattctgatatatagtcttttggaacagcatgtagaccctcatgtgttacaaaataagcccaccctttatcgagacattagtaaaaaccgcctcttaagtattaaaacatttctttattggaccatcctgggcttcagtcatgcctttattttcttttttggatcctatttactaatagggaaagatacatctctgcttggaaatggccagatgtttggaaactggacatttggcactttggtcttcacagtcatggttattacagtcacagtaaagatggctctggaaactcatttttg

SEQ ID NO: 109802 - DNA, 2390 bp, Homo sapiens
  Payload ID: 1558
  Gene Symbol: ATP11B
  Gene Name: ATPase, class VI, type 11B
  ENST ID: ENST00000466758
  CDS Start-End: 1-327
cagaaatcagacagcgagtgtgctgaacaattgaggcagcttgccagaagaattacagaggatcatgtgattcagcatgggctggtagtggatgggaccagcctatctcttgcactcagggagcatgaaaaactatttatggaagtttgcagaaattgttcagctgtattatgctgtcgtatggctccactgcagaaagcaaaagtaataagactaataaaaatatcacctgagaaacctataacattggctgttggtgatggtgctaatgacgaatcatgggtaaagaaggaagacaggctgcaagaaacagtgactatgcaatagccagatttaagttcctctccaaattgctttttgttcatggtcatttttattatattagaatagctacccttgtacagtattttttttataagaatgtgtgctttatcacaccccagtttttatatcagttctactgtttgttttctcagcaaacattgtatgacagcgtgtacctgactttatacaatatttgttttacttccctacctattctgatatatagtcttttggaacagcatgtagaccctcatgtgttacaaaataagcccaccctttatcgagacattagtaaaaaccgcctcttaagtattaaaacatttctttattggaccatcctgggcttcagtcatgcctttattttcttttttggatcctatttactaatagggaaagatacatctctgcttggaaatggccagatgtttggaaactggacatttggcactttggtcttcacagtcatggttattacagtcacagtaaagatggctctggaaactcatttttggacttggatcaaccatctcgttacctggggatctattatattttattttgtattttccttgttttatggagggattctctggccatttttgggctcccagaatatgtattttgtgtttattcagctcctgtcaagtggttctgcttggtttgccataatcctcatggttgttacatgtctatttcttgatatcataaagaaggtctttgaccgacacctccaccctacaagtactgaaaaggcacagatgtactccaacacagttgctttaagtgacgagttcatcgcactgcagccattgtcgagggcaaggaatcagctgagcaaacttaggtctgggattacagaagtaagccaccgcacctggcccatattcttagcttactgaaacaaatgcaggtatcaagtgcttggactccatgtgctgtttcccggaaggagaagcagcgtgtgcatctgttggaagaatgctggaacgagttataggaagatgtagtccaacccacatcagcagatcatggagtgcatcggatcctttctataccaacgacaggagcatcttgactctctccacaatggactcatctacttgttaaaggggcagtagtactttgtgggagccagttcacctcctttcctaaaattcagtgtgatcaccctgttaatggccacactagctctgaaattaatttccaaaatctttgtagtagttcatacccactcagagttataatggcaaacaaacagaaagcattagtacaagcccctcccaacacccttaatttgaatctgaacatgttaaaatttgagaataaagagacatttttcatctctttgtctggtttgtcccttgtgcttatgggactcctaatggcatttcagtctgttgctgaggccattatattttaatataaatgtagaaaaaagagagaaatcttagtaaagagtattttttagtattagcttgattattgactcttctatttaaatctgcttctgtaaattatgctgaaagtttgccttgagaactctatttttttattagagttatatttaaagcttttcatgggaaaagttaatgtgaatactgaggaattttggtccctcagtgacctgtgttgttaattcattaatgcattctgagttcacagagcaaattaggagaatcatttccaaccattatttactgcagtatggggagtaaatttataccaattcctctaactgtactgtaacacagcctgtaaagttagccatataaatgcaagggtatatcatatatacaaatcaggaatcaggtccgttcaccgaacttcaaattgatgtttactaatatttttgtgacagagtataaagaccctatagtgggtaaattagatactattagcatattattaatttaatgtctttatcattggatcttttgcatgctttaatctggttaacatatttaaatttgctttttttctctttacctgaaggctctgtgtatagtatttcatgacatcgttgtacagtttaactatatcaataaaaagtttggacagtatttaaa

SEQ ID NO: 109803 - DNA, 3259 bp, Homo sapiens
  Payload ID: 1558
  Gene Symbol: ATP11B
  Gene Name: ATPase, class VI, type 11B
  ENST ID: ENST00000498086
  CDS Start-End: 1-2912
atttggacactctagtagctgtaatagaatgccagcaaccagaagcagacttatacagattcatgggacgaatgatcataacccaacaaatggaagaaattgtaagacctctggggccggagagtctcctgcttcgtggagccagattaaaaaacacaaaagaaatttttggtgttgcggtatacactggaatggaaactaagatggcattaaattacaagagcaaatcacagaaacgatctgcagtagaaaagtcaatgaatacatttttgataatttatctagtaattcttatatctgaagctgtcatcagcactatcttgaagtatacatggcaagctgaagaaaaatgggatgaaccttggtataaccaaaaaacagaacatcaaagaaatagcagtaagattctgagatttatttcagacttccttgcttttttggttctctacaatttcatcattccaatttcattatatgtgacagtcgaaatgcagaaatttcttggatcattttttattggctgggatcttgatctgtatcatgaagaatcagatcagaaagctcaagtcaatacttccgatctgaatgaagagcttggacaggtagagtacgtgtttacagataaaactggtacactgacagaaaatgagatgcagtttcgggaatgttcaattaatggcatgaaataccaagaaattaatggtagacttgtacccgaaggaccaacaccagactcttcagaaggaaacttatcttatcttagtagtttatcccatcttaacaacttatcccatcttacaaccagttcctctttcagaaccagtcctgaaaatgaaactgaactaattaaagaacatgatctcttctttaaagcagtcagtctctgtcacactgtacagattagcaatgttcaaactgactgcactggtgatggtccctggcaatccaacctggcaccatcgcagttggagtactatgcatcttcaccagatgaaaaggctctagtagaagctgctgcaaggattggtattgtgtttattggcaattctgaagaaactatggaggttaaaactcttggaaaactggaacggtacaaactgcttcatattctggaatttgattcagatcgtaggagaatgagtgtaattgttcaggcaccttcaggtgagaagttattatttgctaaaggagctgagtcatcaattctccctaaatgtataggtggagaaatagaaaaaaccagaattcatgtagatgaatttgctttgaaagggctaagaactctgtgtatagcatatagaaaatttacatcaaaagagtatgaggaaatagataaacgcatatttgaagccaggactgccttgcagcagcgggaagagaaattggcagctgttttccagttcatagagaaagacctgatattacttggagccacagcagtagaagacagactacaagataaagttcgagaaactattgaagcattgagaatggctggtatcaaagtatgggtacttactggggataaacatgaaacagctgttagtgtgagtttatcatgtggccattttcatagaaccatgaacatccttgaacttataaaccagaaatcagacagcgagtgtgctgaacaattgaggcagcttgccagaagaattacagaggatcatgtgattcagcatgggctggtagtggatgggaccagcctatctcttgcactcagggagcatgaaaaactatttatggaagtttgcagaaattgttcagctgtattatgctgtcgtatggctccactgcagaaagcaaaagtaataagactaataaaaatatcacctgagaaacctataacattggctgttggtgatggtgctaatgacgtaagcatgatacaagaagcccatgttggcataggaatcatgggtaaagaaggaagacaggctgcaagaaacagtgactatgcaatagccagatttaagttcctctccaaattgctttttgttcatggtcatttttattatattagaatagctacccttgtacagtattttttttataagaatgtgtgctttatcacaccccagtttttatatcagttctactgtttgttttctcagcaaacattgtatgacagcgtgtacctgactttatacaatatttgttttacttccctacctattctgatatatagtcttttggaacagcatgtagaccctcatgtgttacaaaataagcccaccctttatcgagacattagtaaaaaccgcctcttaagtattaaaacatttctttattggaccatcctgggcttcagtcatgcctttattttcttttttggatcctatttactaatagggaaagatacatctctgcttggaaatggccagatgtttggaaactggacatttggcactttggtcttcacagtcatggttattacagtcacagtaaagatggctctggaaactcatttttggacttggatcaaccatctcgttacctggggatctattatattttattttgtattttccttgttttatggagggattctctggccatttttgggctcccagaatatgtattttgtgtttattcagctcctgtcaagtggttctgcttggtttgccataatcctcatggttgttacatgtctatttcttgatatcataaagaaggtctttgaccgacacctccaccctacaagtactgaaaaggcacagatgtactccaacacagttgctttaagtgacgagttcatcgcactgcagccattgtcgagggcaaggaatcagctgagcaaacttagcttactgaaacaaatgcaggtatcaagtgcttggactccatgtgctgtttcccggaaggagaagcagcgtgtgcatctgttggaagaatgctggaacgagttataggaagatgtagtccaacccacatcagcagatcatggagtgcatcggatcctttctataccaacgacaggagcatcttgactctctccacaatggactcatctacttgttaaaggggcagtagtactttgtgggagccagttcacctcctttcctaaaattcagtgtgatcaccctgttaatggccacactagctctgaaattaatttccaaaatctttgtagtagttcatacccactcagagttataatggcaaacaaacagaaagcattagtacaagcccctcccaacacccttaatttgaatctgaacatgttaaaatttgagaataaagagacatttttcatctc

SEQ ID NO: 109804 - DNA, 963 bp, Homo sapiens
  Payload ID: 1558
  Gene Symbol: ATP11B
  Gene Name: ATPase, class VI, type 11B
  ENST ID: ENST00000493826
  CDS Start-End: 258-845
caataatgaaggtggctgcggcgcggcggcaggctcagctgcgccgggcgggggcggcgccggggccgcgcctgtaggactcggggccgacgccgcgggatggggacgcggcgcggggagtgaggcagtggcggcggcggcggtaagcggaacttcggcccgaggggctcgcccgctcccgcctctgtcttgtcggcctccacctgcagccccgcggcccccgcgccccgcgggacccggacggcgacgacgggggaatgtggcgctggatccggcagcagctgggttttgacccaccacatcagagtgacacaagaaccatctacgtagccaacaggtttcctcagaatggcctttacacacctcagaaatttatagataacaggatcatttcatctaagtacactgtgtggaattttgttccaaaaaatttatttgaacagttcagaagagtggcaaacttttattttcttattatatttttggttcagcttatgattgatacacctaccagtccagttaccagtggacttccattattctttgtgataacagtaactgccataaagcagggatatgaagattggttacggcataactcagataatgaagtaaatggagctcctgtttatgttgttcgaagtggtggccttgtaaaaactagatcaaaaaacattcgggtgggtgatattgttcgaatagccaaagatgaaatttttcctgcagacttggtgcttctgtcctcagatcgactggatggttcctgtcacgttacaactgctagtttggacggagaaactaacctgaaggtttgcttgcatatgtttgagtattgctcttggtgaacaaagtgtctttggattataattatacttaactttggttaaagtagtaaagtttgaccagattaaggggaagtttttaaaattactatttcaaaaataaaaaggttttaagaaagaa

SEQ ID NO: 109805 - DNA, 488 bp, Homo sapiens
  Payload ID: 1558
  Gene Symbol: ATP11B
  Gene Name: ATPase, class VI, type 11B
  ENST ID: ENST00000484691
  CDS Start-End: 1-358
gccatttttgggctcccagaatatgtattttgtgtttattcagctcctgtcaagtggttctgcttggtttgccataatcctcatggttgttacatgtctatttcttgatatcataaagaaggtctttgaccgacacctccaccctacaagtactgaaaaggcacagatgtactccaacacagttgctttaagtgacgagttcatcgcactgcagccattgtcgagggcaaggaatcagctgagcaaacttagcttactgaaacaaatgcaggtatcaagtgcttggactccatgtgctgtttcccggaaggagaagcagcgtgtgcatctgttggaagaatgctggaacgagttataggaagatgtagtccaacccacatcagcaggtgtgaaatctctctaagtagcctttgctgcagatgagtatcctatctggaacaggatgaacctgccgctctagatacctaataaatcagcagctggtttta

SEQ ID NO: 109806 - DNA, 1660 bp, Homo sapiens
  Payload ID: 1558
  Gene Symbol: ATP11B
  Gene Name: ATPase, class VI, type 11B
  ENST ID: ENST00000491699
  CDS Start-End: 1-442
gatggctctggaaactcatttttggacttggatcaaccatctcgttacctggggatctattatattttattttgtattttccttgttttatggagggattctctggccatttttgggctcccagaatatgtattttgtgtttattcagctcctgtcaagtggttctgcttggtttgccataatcctcatggttgttacatgtctatttcttgatatcataaagaaggtctttgaccgacacctccaccctacaagtactgaaaaggcacagcttactgaaacaaatgcaggtatcaagtgcttggactccatgtgctgtttcccggaaggagaagcagcgtgtgcatctgttggaagaatgctggaacgagttataggaagatgtagtccaacccacatcagcaggtgtgaaatctctctaagtagcctttgctgcagatgagtatcctatctggaacaggatgaacctgccgctctagatacctaataaatcagcagctggttttaccaactgaagcaggaagtctgctatttattagcactctttggtggtagatttcactttgtggctttggggtaagggctttttcactcacaaaggaagagaaagcacctttgaagagacttcatctaatgaacaaaaaattttgtttcataatctttctaaaatgtgctcagtaggagtgtgtttatggtactcttttatggtttgtataactttcttttttaaattatacatatactatttcctttttatttttttaaaatttttttgctttttgtctttacaaaataatctcaacataacagtgaagtcaaaggctttccttttcttactctgtatgtatattttccagttggttatttgaggctttgaggtatttataaacacaaaaggctgtatttctgctcccctacctcttcttatgtctgtaatgaagttttgaaatgagtcatgatttttaagtttcttttgcttggtatttattgcctaattaaaagtgtatgagttagaacaggctttttaaattatggagtaaaagaatcttagcatttttgtcccctcctaaatctgtttcttgaatgagatttatcaccatgcctgctgttgtgcaccataacgaaaaaaaacaccttttggtaaacaccatttaaaattcatttaaacttgcaatggatttatttattcatacatttccccaagagttatatcactatttagaggatgttagggggtagaaagagctttttccacacttggtgttctttaggtgaatgataccatattctcaaaatcagggcagcagtacacggtatgcatggaggtacaaatgggcagggagagatgttggttgccattgtcccaaatgtgctacatgaatattagcactttctacatgtgccagggcttggaaaaggttggaaattaccccaggaacaggttataaagagtgaagaaggcactactcctatctactggaaaaaggatttttattatttggttagctttgtgttttaaaaaaatgatgagtatgatatcattcatctgttataaaattcaggtaacttttactggtgaacttgttagttctcactttagctttagcttagccatgcctttatgatacaattgaatttataaatagcattcttatgttaa

SEQ ID NO: 109807 - DNA, 6115 bp, Homo sapiens
  Payload ID: 1559
  Gene Symbol: ATP11C
  Gene Name: ATPase, class VI, type 11C
  Uniprot ID: Q8NB49
  ENST ID: ENST00000327569
  CDS Start-End: 100-3498
ttacaaggatcacaggggttggtacaagttgcttgataatctgcagcattctctctgagatttagctgccattgtgttgccaaatttctgcatgtcagtatgcagatggtcccatctctccctccagcctctgagtgtgctggagaagagaaacgagttggcacacgcacagtgtttgttggcaatcatccagtttcggaaacagaagcttacattgcacaaagattttgtgataatagaatagtctcatctaagtatacactttggaattttctcccaaagaatctgtttgaacagtttagaagaattgcaaatttttattttctcataatcttccttgtacaggtcacagtagacacaccaactagcccagttaccagtggacttccacttttctttgttataactgttacagccatcaagcagggatatgaggattgtctgagacacagagctgacaatgaagtcaacaaaagcactgtttacattattgaaaatgcaaagcgagtgagaaaagaaagtgaaaaaatcaaggttggtgatgtagtagaagtacaggcagatgaaacctttccctgtgatcttattcttctatcatcttgcaccactgatggaacctgttatgtcactacagccagtcttgatggggaatccaattgcaagacacattatgcagtacgtgataccattgcactgtgtacagcagaatccatcgataccctccgagcagcaattgaatgtgaacagcctcaacctgacctctacaaatttgttgggcgaatcaatatctacagtaatagtcttgaggctgttgccaggtctttgggacctgaaaatctcttgctgaaaggagctacgctaaaaaataccgagaagatatatggagttgctgtttacactggaatggaaaccaaaatggctttgaactaccaagggaaatctcagaaacgttctgctgttgaaaaatctattaatgctttcctgattgtatatttatttatcttactgaccaaagctgcagtatgcactactctaaagtatgtttggcaaagtaccccatacaatgatgaaccttggtataaccaaaagactcagaaagagcgagagaccttgaaggttttaaaaatgttcaccgacttcctatcatttatggttctattcaactttatcattcctgtctccatgtacgtcacagtagaaatgcagaaattcttgggctccttcttcatctcatgggataaggacttttatgatgaagaaattaatgaaggagccctggttaacacatcagaccttaatgaagaacttggtcaggtggattatgtatttacagataagactggaacactcactgaaaacagcatggaattcattgaatgctgcatagatggccacaaatataaaggtgtaactcaagaggttgatggattatctcaaactgatggaactttaacatattttgacaaagtagataagaatcgagaagagctgtttctacgtgccttgtgtttatgtcatactgtagaaatcaaaacaaacgatgctgttgatggagctacagaatcagctgaattaacctatatctcctcttcaccagatgaaatagctttggtgaaaggagctaaaaggtacgggttcacatttttaggaaatcgaaatggatatatgagagtagagaaccaaagaaaagaaatagaagaatatgaacttcttcacaccttaaactttgatgctgtccggcgacgtatgagtgtaattgtgaagactcaagaaggagacatacttctcttttgtaaaggagcagactcggcagtttttcccagagtgcaaaatcatgaaattgagttaactaaagtccatgtggaacgtaatgcaatggatgggtatcggacactctgtgtagccttcaaagaaattgctccagatgattatgaaagaattaacagacagctcatagaggcaaaaatggccttacaagacagagaagaaaaaatggaaaaagttttcgatgatattgagacaaacatgaatttaattggagccactgcagttgaagacaagctacaagatcaagctgcagagaccattgaagctctgcatgcagcaggcctgaaagtctgggtgctcactggggacaagatggagacagctaaatccacatgctatgcctgccgccttttccagaccaacactgagctcttagaactaaccacaaaaaccattgaagaaagtgaaaggaaagaagatcgattacatgaattattgatagaatatcgcaagaaattgctgcatgagtttcctaaaagtactagaagctttaaaaaagcatggacagaacatcaggaatatggattaatcatagatggctccacattgtcactcatactaaattctagtcaagactctagttcaaacaattacaaaagcattttcctacaaatatgtatgaagtgtactgcagtgctctgctgtcggatggcaccattacagaaagcccagattgtcagaatggtgaagaatttaaaaggcagcccaataactctgtcgataggtgatggtgccaatgatgttagtatgatcttggaatcccatgtgggaataggtattaaaggcaaagaaggtcgccaagcagctaggaatagcgattattctgttccaaagtttaaacacttaaagaaactgctgttggctcatggacatctatattatgtgagaatagcacaccttgtacagtacttcttctataagaacctttgtttcattttgccacagtttttgtaccagttcttctgtggattctcacaacagccactgtatgatgctgcttaccttacaatgtacaatatctgcttcacatccttgcccatcctggcctatagtctactggaacagcacatcaacattgacactctgacctcagatccccgattgtatatgaaaatttctggcaatgccatgctacagttgggccccttcttatattggacatttctggctgcctttgaagggacagtgttcttctttgggacttactttctttttcagactgcatccctagaagaaaatggaaaggtatacggaaactggacttttggaaccattgtttttacagtcttagtattcactgtaaccctgaagcttgccttggatacccgattctggacgtggataaatcactttgtgatttggggttctttagccttctatgtatttttctcattcttctggggaggaattatttggccttttctcaagcaacagagaatgtattttgtatttgcccaaatgctgtcttctgtatccacatggttggctataattcttctaatatttatcagcctgttccctgagattcttctgatagtattaaagaatgtaagaagaagaagtgccaggagaaatctgagctgtagaagggcatctgactcattatccgccagaccttcagtcagacctcttcttttacgaacattctcagacgaatctaatgtattgtaacagaatccgaatcttgaactgcctatgttattgtcctacaagcatactgacagtggttacagctaaaaaagaaagcatgaagaaacaactacaaaaagttatcatctcaggatacttgatacgcaacacactaaaccactctcatgtctagagttcacaataaatgttcattaaaataccaaatgattctcttaagcatttaccattattgtaagtagcctttatggccaaagctgtaagttaagaattatatgaaagttgaaagcaagaatacttagaattctggctttagttagagtaatataactcaaatgggtgctcttttaacccatgaactttgtgaatggatttaaatacaatagtatgaagtagaagttatgcaatgagaatgaatagattttgctaatactactttttttgcctggcagaagaaatagactatttggatcacatttctcattcctcctaaatgatcatcttaattttttttcccaagtacataaggaatacttgaaaatacagaataactaaatagtatcaatgcatcagacagaatagttaatcccttctgtttacccatgtgctactaatgtcttggtagaatattcttgccaaaaaaataccttgaacgcttatgtggaaagtgttaacttacgggtatttttgtgggaatagaaaaaaattgtttattttttattcttctgaattaaaccccacttatgggtgtaagcctactagacttgaaaataaagtataaaacatttccaatcacttagtagcccctcaaagtagttagaaaataaacagatttttccagtgttgattttactgggatctgcagtaaggtggtttaaaccatagttatataaaaataaaggtcattctgaatatcagccttttataattttatgtgaagaggaagaaatatagcttattttaaacttttgacggtttttatttgaaagagattgcatttatgcatatatgcagtgctttttcttaaacttggccaatttggaaagggggaaggagccaccccaaaacggtggttcagcttgtagagccatgactctgtgaagatgaatgttgtctcttaacttggacagggaaatggtctaactctaaaccatgtaactgaccttagtaaagtccttgactaactgaactagaaggaaggtttagccttctaattagttcacttgaaacataaatgtgaaatgtcttcattcaatgttaaacacatacttttttggatataaatgaccatatttatttgactgctagtttttttgttttttttttgtctttctggcatgcctgtactattattaatgtttatattgtaccttgatttggaaaagtattggagttaatctgtattatatttatatagtccatatggcacatttgattcttccacatatattttgtgttaatgtttaggtatgatttttttctaaattctagaaaagaacataatttcagttatcagaagccattccatcattatagaccctttttcattatttcatttgctctcatatatcagtattatttttgagcattttgttacatgtcattcacaacttacctaagtgtgctgtgttctggtagcccgtatttgaggtaagctgctgaaaacaaaagtctctatattctttgcctattccaaagagctaaaaaagtctaacccaggaaagcttttgatattttgtgtttgttttcttgttcttatggttgttgttgctgtattatgattgctgttttacataaaatctatgggaactgtgaatacagacaagagagccacagtagagaggcttgtttaatgcagtaccattggagagttaacagaataatctagtagaaaaataactggttgcatgtaaaattccttccagccagaaagaaagaaagacaaggagtaagggggatttagagttatgtctcagctacacattacattgtgatactgcagctcaaattcagaatggcaatgatacatgatatcatggcctagatccttgagagggacctggctttcctttttaaaagatattttactgaagagctaaaaactggccagtgtggggttagcagatcgaataacttgaaatagaccatgcagtattcctagcactcaatgtaatcaccctatttgtgacagagaaagggaaaaaaatataataagatcatctacctataatttgaataattttgagctatcaaaatgtctttgtaattttcacaaccgctgtccattgtttgaggatgttacctactaaactgaaaacattcattccatatctacttacacatacaccagcaacagtataaatgtaagcctaactttgcaaaattcgtaataatttagtgatggaattttttaataacatgcagtatataaatgtgcagattttatgcgtgttgacaaaatcatttttcagcttgcaaaatgggactgcaatattacatttttcacttaagcagttttttacatctacgttgttgctttctaaaatgaatgtgaatgccatcttttatgactgcaacttgccttttccattacagaaatttttgtttgatgtaatcaataaactttggtatgatatgattg

SEQ ID NO: 109808 - DNA, 6010 bp, Homo sapiens
  Payload ID: 1559
  Gene Symbol: ATP11C
  Gene Name: ATPase, class VI, type 11C
  Uniprot ID: Q8NB49
  ENST ID: ENST00000361648
  CDS Start-End: 100-3459
ttacaaggatcacaggggttggtacaagttgcttgataatctgcagcattctctctgagatttagctgccattgtgttgccaaatttctgcatgtcagtatgcagatggtcccatctctccctccagcctctgagtgtgctggagaagagaaacgagttggcacacgcacagtgtttgttggcaatcatccagtttcggaaacagaagcttacattgcacaaagattttgtgataatagaatagtctcatctaagtatacactttggaattttctcccaaagaatctgtttgaacagtttagaagaattgcaaatttttattttctcataatcttccttgtacaggtcacagtagacacaccaactagcccagttaccagtggacttccacttttctttgttataactgttacagccatcaagcagggatatgaggattgtctgagacacagagctgacaatgaagtcaacaaaagcactgtttacattattgaaaatgcaaagcgagtgagaaaagaaagtgaaaaaatcaaggttggtgatgtagtagaagtacaggcagatgaaacctttccctgtgatcttattcttctatcatcttgcaccactgatggaacctgttatgtcactacagccagtcttgatggggaatccaattgcaagacacattatgcagtacgtgataccattgcactgtgtacagcagaatccatcgataccctccgagcagcaattgaatgtgaacagcctcaacctgacctctacaaatttgttgggcgaatcaatatctacagtaatagtcttgaggctgttgccaggtctttgggacctgaaaatctcttgctgaaaggagctacgctaaaaaataccgagaagatatatggagttgctgtttacactggaatggaaaccaaaatggctttgaactaccaagggaaatctcagaaacgttctgctgttgaaaaatctattaatgctttcctgattgtatatttatttatcttactgaccaaagctgcagtatgcactactctaaagtatgtttggcaaagtaccccatacaatgatgaaccttggtataaccaaaagactcagaaagagcgagagaccttgaaggttttaaaaatgttcaccgacttcctatcatttatggttctattcaactttatcattcctgtctccatgtacgtcacagtagaaatgcagaaattcttgggctccttcttcatctcatgggataaggacttttatgatgaagaaattaatgaaggagccctggttaacacatcagaccttaatgaagaacttggtcaggtggattatgtatttacagataagactggaacactcactgaaaacagcatggaattcattgaatgctgcatagatggccacaaatataaaggtgtaactcaagaggttgatggattatctcaaactgatggaactttaacatattttgacaaagtagataagaatcgagaagagctgtttctacgtgccttgtgtttatgtcatactgtagaaatcaaaacaaacgatgctgttgatggagctacagaatcagctgaattaacctatatctcctcttcaccagatgaaatagctttggtgaaaggagctaaaaggtacgggttcacatttttaggaaatcgaaatggatatatgagagtagagaaccaaagaaaagaaatagaagaatatgaacttcttcacaccttaaactttgatgctgtccggcgacgtatgagtgtaattgtgaagactcaagaaggagacatacttctcttttgtaaaggagcagactcggcagtttttcccagagtgcaaaatcatgaaattgagttaactaaagtccatgtggaacgtaatgcaatggatgggtatcggacactctgtgtagccttcaaagaaattgctccagatgattatgaaagaattaacagacagctcatagaggcaaaaatggccttacaagacagagaagaaaaaatggaaaaagttttcgatgatattgagacaaacatgaatttaattggagccactgcagttgaagacaagctacaagatcaagctgcagagaccattgaagctctgcatgcagcaggcctgaaagtctgggtgctcactggggacaagatggagacagctaaatccacatgctatgcctgccgccttttccagaccaacactgagctcttagaactaaccacaaaaaccattgaagaaagtgaaaggaaagaagatcgattacatgaattattgatagaatatcgcaagaaattgctgcatgagtttcctaaaagtactagaagctttaaaaaagcatggacagaacatcaggaatatggattaatcatagatggctccacattgtcactcatactaaattctagtcaagactctagttcaaacaattacaaaagcattttcctacaaatatgtatgaagtgtactgcagtgctctgctgtcggatggcaccattacagaaagcccagattgtcagaatggtgaagaatttaaaaggcagcccaataactctgtcgataggtgatggtgccaatgatgttagtatgatcttggaatcccatgtgggaataggtattaaaggcaaagaaggtcgccaagcagctaggaatagcgattattctgttccaaagtttaaacacttaaagaaactgctgttggctcatggacatctatattatgtgagaatagcacaccttgtacagtacttcttctataagaacctttgtttcattttgccacagtttttgtaccagttcttctgtggattctcacaacagccactgtatgatgctgcttaccttacaatgtacaatatctgcttcacatccttgcccatcctggcctatagtctactggaacagcacatcaacattgacactctgacctcagatccccgattgtatatgaaaatttctggcaatgccatgctacagttgggccccttcttatattggacatttctggctgcctttgaagggacagtgttcttctttgggacttactttctttttcagactgcatccctagaagaaaatggaaaggtatacggaaactggacttttggaaccattgtttttacagtcttagtattcactgtaaccctgaagcttgccttggatacccgattctggacgtggataaatcactttgtgatttggggttctttagccttctatgtatttttctcattcttctggggaggaattatttggccttttctcaagcaacagagaatgtattttgtatttgcccaaatgctgtcttctgtatccacatggttggctataattcttctaatatttatcagcctgttccctgagattcttctgatagtattaaagaatgtaagaagaagaagtgccaggaatccgaatcttgaactgcctatgttattgtcctacaagcatactgacagtggttacagctaaaaaagaaagcatgaagaaacaactacaaaaagttatcatctcaggatacttgatacgcaacacactaaaccactctcatgtctagagttcacaataaatgttcattaaaataccaaatgattctcttaagcatttaccattattgtaagtagcctttatggccaaagctgtaagttaagaattatatgaaagttgaaagcaagaatacttagaattctggctttagttagagtaatataactcaaatgggtgctcttttaacccatgaactttgtgaatggatttaaatacaatagtatgaagtagaagttatgcaatgagaatgaatagattttgctaatactactttttttgcctggcagaagaaatagactatttggatcacatttctcattcctcctaaatgatcatcttaattttttttcccaagtacataaggaatacttgaaaatacagaataactaaatagtatcaatgcatcagacagaatagttaatcccttctgtttacccatgtgctactaatgtcttggtagaatattcttgccaaaaaaataccttgaacgcttatgtggaaagtgttaacttacgggtatttttgtgggaatagaaaaaaattgtttattttttattcttctgaattaaaccccacttatgggtgtaagcctactagacttgaaaataaagtataaaacatttccaatcacttagtagcccctcaaagtagttagaaaataaacagatttttccagtgttgattttactgggatctgcagtaaggtggtttaaaccatagttatataaaaataaaggtcattctgaatatcagccttttataattttatgtgaagaggaagaaatatagcttattttaaacttttgacggtttttatttgaaagagattgcatttatgcatatatgcagtgctttttcttaaacttggccaatttggaaagggggaaggagccaccccaaaacggtggttcagcttgtagagccatgactctgtgaagatgaatgttgtctcttaacttggacagggaaatggtctaactctaaaccatgtaactgaccttagtaaagtccttgactaactgaactagaaggaaggtttagccttctaattagttcacttgaaacataaatgtgaaatgtcttcattcaatgttaaacacatacttttttggatataaatgaccatatttatttgactgctagtttttttgttttttttttgtctttctggcatgcctgtactattattaatgtttatattgtaccttgatttggaaaagtattggagttaatctgtattatatttatatagtccatatggcacatttgattcttccacatatattttgtgttaatgtttaggtatgatttttttctaaattctagaaaagaacataatttcagttatcagaagccattccatcattatagaccctttttcattatttcatttgctctcatatatcagtattatttttgagcattttgttacatgtcattcacaacttacctaagtgtgctgtgttctggtagcccgtatttgaggtaagctgctgaaaacaaaagtctctatattctttgcctattccaaagagctaaaaaagtctaacccaggaaagcttttgatattttgtgtttgttttcttgttcttatggttgttgttgctgtattatgattgctgttttacataaaatctatgggaactgtgaatacagacaagagagccacagtagagaggcttgtttaatgcagtaccattggagagttaacagaataatctagtagaaaaataactggttgcatgtaaaattccttccagccagaaagaaagaaagacaaggagtaagggggatttagagttatgtctcagctacacattacattgtgatactgcagctcaaattcagaatggcaatgatacatgatatcatggcctagatccttgagagggacctggctttcctttttaaaagatattttactgaagagctaaaaactggccagtgtggggttagcagatcgaataacttgaaatagaccatgcagtattcctagcactcaatgtaatcaccctatttgtgacagagaaagggaaaaaaatataataagatcatctacctataatttgaataattttgagctatcaaaatgtctttgtaattttcacaaccgctgtccattgtttgaggatgttacctactaaactgaaaacattcattccatatctacttacacatacaccagcaacagtataaatgtaagcctaactttgcaaaattcgtaataatttagtgatggaattttttaataacatgcagtatataaatgtgcagattttatgcgtgttgacaaaatcatttttcagcttgcaaaatgggactgcaatattacatttttcacttaagcagttttttacatctacgttgttgctttctaaaatgaatgtgaatgccatcttttatgactgcaacttgccttttccattacagaaatttttgtttgatgtaatcaataaactttggtatgatatgattg

SEQ ID NO: 109809 - DNA, 6924 bp, Homo sapiens
  Payload ID: 1559
  Gene Symbol: ATP11C
  Gene Name: ATPase, class VI, type 11C
  ENST ID: ENST00000370557
  CDS Start-End: 1029-4370
cgctgcgcagcagcaacgacacaaagcctgactttacaacctcagagaaagtggaagtaagaaggcttaggtgggcaggcaggacgagagaaagactgagaggagggaaagccgcgtaggtgggagtacagcggcgcgagggtcgagggggaaccctcgtcggtgcagatgaggagggtgggctttcagaactagtcccccctcgcaccccgccccgcccctcccgcgctggggtcttcacggtgccctgcctcagagcccggctccaccacgcccggaagagggagtctggccgtcggctggctcagggcgggccggttggctgtacccaggctccctggcccgagtgcgggaccagagcgcggggcggcgcggcagccgcggaccgaggaggggctgcgagcgaaacggcgcggcgcggcacggcggacgagttagggccggggcgagggaggctgtggctcccgacagagacaggggagtagtgtcgggctgaggcgaggtgaggcgcggggtgcctcgggagggttccccgtgccccgaggggggcggccgcggagtccagcggggaggcgggcggtggtgccgcgtcggggaagagcgcatcccgcggggtgccgagcccggcgctggcggagagacgggggcgccccctccccacaggaggagcctcgcgctcctccgccatccttcccccgcgcggcgggctcgccttctcagtgggtgctgcgcgagctgccggcccggggtgccggggccagataagggcgatccgcggggccgccgcccccgggtcaggcaggccgggggcgggccgcgagtgaggcggggcggcggctaggctgcgggcggctggggggcgggggagcgcggagagccgaggggggcaggcggcgagcgggtggcccggccgcccgcctcgctgctccgcttggcgccgccggcccacgccgcagtgtgttttgtggacggcgccttcccagacagcccggtagagcccagctcagcgcccggcagccttcgacgcgatgttccgccggagcttgaatcgtttttgtgctggagaagagaaacgagttggcacacgcacagtgtttgttggcaatcatccagtttcggaaacagaagcttacattgcacaaagattttgtgataatagaatagtctcatctaagtatacactttggaattttctcccaaagaatctgtttgaacagtttagaagaattgcaaatttttattttctcataatcttccttgtacaggtcacagtagacacaccaactagcccagttaccagtggacttccacttttctttgttataactgttacagccatcaagcagggatatgaggattgtctgagacacagagctgacaatgaagtcaacaaaagcactgtttacattattgaaaatgcaaagcgagtgagaaaagaaagtgaaaaaatcaaggttggtgatgtagtagaagtacaggcagatgaaacctttccctgtgatcttattcttctatcatcttgcaccactgatggaacctgttatgtcactacagccagtcttgatggggaatccaattgcaagacacattatgcagtacgtgataccattgcactgtgtacagcagaatccatcgataccctccgagcagcaattgaatgtgaacagcctcaacctgacctctacaaatttgttgggcgaatcaatatctacagtaatagtcttgaggctgttgccaggtctttgggacctgaaaatctcttgctgaaaggagctacgctaaaaaataccgagaagatatatggagttgctgtttacactggaatggaaaccaaaatggctttgaactaccaagggaaatctcagaaacgttctgctgttgaaaaatctattaatgctttcctgattgtatatttatttatcttactgaccaaagctgcagtatgcactactctaaagtatgtttggcaaagtaccccatacaatgatgaaccttggtataaccaaaagactcagaaagagcgagagaccttgaaggttttaaaaatgttcaccgacttcctatcatttatggttctattcaactttatcattcctgtctccatgtacgtcacagtagaaatgcagaaattcttgggctccttcttcatctcatgggataaggacttttatgatgaagaaattaatgaaggagccctggttaacacatcagaccttaatgaagaacttggtcaggtggattatgtatttacagataagactggaacactcactgaaaacagcatggaattcattgaatgctgcatagatggccacaaatataaaggtgtaactcaagaggttgatggattatctcaaactgatggaactttaacatattttgacaaagtagataagaatcgagaagagctgtttctacgtgccttgtgtttatgtcatactgtagaaatcaaaacaaacgatgctgttgatggagctacagaatcagctgaattaacctatatctcctcttcaccagatgaaatagctttggtgaaaggagctaaaaggtacgggttcacatttttaggaaatcgaaatggatatatgagagtagagaaccaaagaaaagaaatagaagaatatgaacttcttcacaccttaaactttgatgctgtccggcgacgtatgagtgtaattgtgaagactcaagaaggagacatacttctcttttgtaaaggagcagactcggcagtttttcccagagtgcaaaatcatgaaattgagttaactaaagtccatgtggaacgtaatgcaatggatgggtatcggacactctgtgtagccttcaaagaaattgctccagatgattatgaaagaattaacagacagctcatagaggcaaaaatggccttacaagacagagaagaaaaaatggaaaaagttttcgatgatattgagacaaacatgaatttaattggagccactgcagttgaagacaagctacaagatcaagctgcagagaccattgaagctctgcatgcagcaggcctgaaagtctgggtgctcactggggacaagatggagacagctaaatccacatgctatgcctgccgccttttccagaccaacactgagctcttagaactaaccacaaaaaccattgaagaaagtgaaaggaaagaagatcgattacatgaattattgatagaatatcgcaagaaattgctgcatgagtttcctaaaagtactagaagctttaaaaaagcatggacagaacatcaggaatatggattaatcatagatggctccacattgtcactcatactaaattctagtcaagactctagttcaaacaattacaaaagcattttcctacaaatatgtatgaagtgtactgcagtgctctgctgtcggatggcaccattacagaaagcccagattgtcagaatggtgaagaatttaaaaggcagcccaataactctgtcgataggtgatggtgccaatgatgttagtatgatcttggaatcccatgtgggaataggcaaagaaggtcgccaagcagctaggaatagcgattattctgttccaaagtttaaacacttaaagaaactgctgttggctcatggacatctatattatgtgagaatagcacaccttgtacagtacttcttctataagaacctttgtttcattttgccacagtttttgtaccagttcttctgtggattctcacaacagccactgtatgatgctgcttaccttacaatgtacaatatctgcttcacatccttgcccatcctggcctatagtctactggaacagcacatcaacattgacactctgacctcagatccccgattgtatatgaaaatttctggcaatgccatgctacagttgggccccttcttatattggacatttctggctgcctttgaagggacagtgttcttctttgggacttactttctttttcagactgcatccctagaagaaaatggaaaggtatacggaaactggacttttggaaccattgtttttacagtcttagtattcactgtaaccctgaagcttgccttggatacccgattctggacgtggataaatcactttgtgatttggggttctttagccttctatgtatttttctcattcttctggggaggaattatttggccttttctcaagcaacagagaatgtattttgtatttgcccaaatgctgtcttctgtatccacatggttggctataattcttctaatatttatcagcctgttccctgagattcttctgatagtattaaagaatgtaagaagaagaagtgccaggaatccgaatcttgaactgcctatgttattgtcctacaagcatactgacagtggttacagctaaaaaagaaagcatgaagaaacaactacaaaaagttatcatctcaggatacttgatacgcaacacactaaaccactctcatgtctagagttcacaataaatgttcattaaaataccaaatgattctcttaagcatttaccattattgtaagtagcctttatggccaaagctgtaagttaagaattatatgaaagttgaaagcaagaatacttagaattctggctttagttagagtaatataactcaaatgggtgctcttttaacccatgaactttgtgaatggatttaaatacaatagtatgaagtagaagttatgcaatgagaatgaatagattttgctaatactactttttttgcctggcagaagaaatagactatttggatcacatttctcattcctcctaaatgatcatcttaattttttttcccaagtacataaggaatacttgaaaatacagaataactaaatagtatcaatgcatcagacagaatagttaatcccttctgtttacccatgtgctactaatgtcttggtagaatattcttgccaaaaaaataccttgaacgcttatgtggaaagtgttaacttacgggtatttttgtgggaatagaaaaaaattgtttattttttattcttctgaattaaaccccacttatgggtgtaagcctactagacttgaaaataaagtataaaacatttccaatcacttagtagcccctcaaagtagttagaaaataaacagatttttccagtgttgattttactgggatctgcagtaaggtggtttaaaccatagttatataaaaataaaggtcattctgaatatcagccttttataattttatgtgaagaggaagaaatatagcttattttaaacttttgacggtttttatttgaaagagattgcatttatgcatatatgcagtgctttttcttaaacttggccaatttggaaagggggaaggagccaccccaaaacggtggttcagcttgtagagccatgactctgtgaagatgaatgttgtctcttaacttggacagggaaatggtctaactctaaaccatgtaactgaccttagtaaagtccttgactaactgaactagaaggaaggtttagccttctaattagttcacttgaaacataaatgtgaaatgtcttcattcaatgttaaacacatacttttttggatataaatgaccatatttatttgactgctagtttttttgttttttttttgtctttctggcatgcctgtactattattaatgtttatattgtaccttgatttggaaaagtattggagttaatctgtattatatttatatagtccatatggcacatttgattcttccacatatattttgtgttaatgtttaggtatgatttttttctaaattctagaaaagaacataatttcagttatcagaagccattccatcattatagaccctttttcattatttcatttgctctcatatatcagtattatttttgagcattttgttacatgtcattcacaacttacctaagtgtgctgtgttctggtagcccgtatttgaggtaagctgctgaaaacaaaagtctctatattctttgcctattccaaagagctaaaaaagtctaacccaggaaagcttttgatattttgtgtttgttttcttgttcttatggttgttgttgctgtattatgattgctgttttacataaaatctatgggaactgtgaatacagacaagagagccacagtagagaggcttgtttaatgcagtaccattggagagttaacagaataatctagtagaaaaataactggttgcatgtaaaattccttccagccagaaagaaagaaagacaaggagtaagggggatttagagttatgtctcagctacacattacattgtgatactgcagctcaaattcagaatggcaatgatacatgatatcatggcctagatccttgagagggacctggctttcctttttaaaagatattttactgaagagctaaaaactggccagtgtggggttagcagatcgaataacttgaaatagaccatgcagtattcctagcactcaatgtaatcaccctatttgtgacagagaaagggaaaaaaatataataagatcatctacctataatttgaataattttgagctatcaaaatgtctttgtaattttcacaaccgctgtccattgtttgaggatgttacctactaaactgaaaacattcattccatatctacttacacatacaccagcaacagtataaatgtaagcctaactttgcaaaattcgtaataatttagtgatggaattttttaataacatgcagtatataaatgtgcagattttatgcgtgttgacaaaatcatttttcagcttgcaaaatgggactgcaatattacatttttcacttaagcagttttttacatctacgttgttgctttctaaaatgaatgtgaatgccatcttttatgactgcaacttgccttttccattacagaaatttttgtttgatgtaatcaataaactttggtatgatatgattgata

SEQ ID NO: 109810 - DNA, 3165 bp, Homo sapiens
  Payload ID: 1559
  Gene Symbol: ATP11C
  Gene Name: ATPase, class VI, type 11C
  ENST ID: ENST00000450801
  CDS Start-End: 1-519
actctgacctcagatccccgattgtatatgaaaatttctggcaatgccatgctacagttgggccccttcttatattggacatttctggctgcctttgaagggacagtgttcttctttgggacttactttctttttcagactgcatccctagaagaaaatggaaaggtatacggaaactggacttttggaaccattgtttttacagtcttagtattcactgtaaccctgaagcttgccttggatacccgattctggacgtggataaatcactttgtgatttggggttctttagccttctatgtatttttctcattcttctggggaggaattatttggccttttctcaagcaacagagaatgtattttgtatttgcccaaatgctgtcttctgtatccacatggttggctataattcttctaatatttatcagcctgttccctgagattcttctgatagtattaaagaatgtaagaagaagaagtgccagggttcatcacttaatttcctcttctgcataaaaagtatagtaaaaacttcgttatccaatgcaggtgaatccgaatcttgaactgcctatgttattgtcctacaagcatactgacagtggttacagctaaaaaagaaagcatgaagaaacaactacaaaaagttatcatctcaggatacttgatacgcaacacactaaaccactctcatgtctagagttcacaataaatgttcattaaaataccaaatgattctcttaagcatttaccattattgtaagtagcctttatggccaaagctgtaagttaagaattatatgaaagttgaaagcaagaatacttagaattctggctttagttagagtaatataactcaaatgggtgctcttttaacccatgaactttgtgaatggatttaaatacaatagtatgaagtagaagttatgcaatgagaatgaatagattttgctaatactactttttttgcctggcagaagaaatagactatttggatcacatttctcattcctcctaaatgatcatcttaattttttttcccaagtacataaggaatacttgaaaatacagaataactaaatagtatcaatgcatcagacagaatagttaatcccttctgtttacccatgtgctactaatgtcttggtagaatattcttgccaaaaaaataccttgaacgcttatgtggaaagtgttaacttacgggtatttttgtgggaatagaaaaaaattgtttattttttattcttctgaattaaaccccacttatgggtgtaagcctactagacttgaaaataaagtataaaacatttccaatcacttagtagcccctcaaagtagttagaaaataaacagatttttccagtgttgattttactgggatctgcagtaaggtggtttaaaccatagttatataaaaataaaggtcattctgaatatcagccttttataattttatgtgaagaggaagaaatatagcttattttaaacttttgacggtttttatttgaaagagattgcatttatgcatatatgcagtgctttttcttaaacttggccaatttggaaagggggaaggagccaccccaaaacggtggttcagcttgtagagccatgactctgtgaagatgaatgttgtctcttaacttggacagggaaatggtctaactctaaaccatgtaactgaccttagtaaagtccttgactaactgaactagaaggaaggtttagccttctaattagttcacttgaaacataaatgtgaaatgtcttcattcaatgttaaacacatacttttttggatataaatgaccatatttatttgactgctagtttttttgttttttttttgtctttctggcatgcctgtactattattaatgtttatattgtaccttgatttggaaaagtattggagttaatctgtattatatttatatagtccatatggcacatttgattcttccacatatattttgtgttaatgtttaggtatgatttttttctaaattctagaaaagaacataatttcagttatcagaagccattccatcattatagaccctttttcattatttcatttgctctcatatatcagtattatttttgagcattttgttacatgtcattcacaacttacctaagtgtgctgtgttctggtagcccgtatttgaggtaagctgctgaaaacaaaagtctctatattctttgcctattccaaagagctaaaaaagtctaacccaggaaagcttttgatattttgtgtttgttttcttgttcttatggttgttgttgctgtattatgattgctgttttacataaaatctatgggaactgtgaatacagacaagagagccacagtagagaggcttgtttaatgcagtaccattggagagttaacagaataatctagtagaaaaataactggttgcatgtaaaattccttccagccagaaagaaagaaagacaaggagtaagggggatttagagttatgtctcagctacacattacattgtgatactgcagctcaaattcagaatggcaatgatacatgatatcatggcctagatccttgagagggacctggctttcctttttaaaagatattttactgaagagctaaaaactggccagtgtggggttagcagatcgaataacttgaaatagaccatgcagtattcctagcactcaatgtaatcaccctatttgtgacagagaaagggaaaaaaatataataagatcatctacctataatttgaataattttgagctatcaaaatgtctttgtaattttcacaaccgctgtccattgtttgaggatgttacctactaaactgaaaacattcattccatatctacttacacatacaccagcaacagtataaatgtaagcctaactttgcaaaattcgtaataatttagtgatggaattttttaataacatgcagtatataaatgtgcagattttatgcgtgttgacaaaatcatttttcagcttgcaaaatgggactgcaatattacatttttcacttaagcagttttttacatctacgttgttgctttctaaaatgaatgtgaatgccatcttttatgactgcaacttgccttttccattacagaaatttttgtttgatgtaatcaataaactttggtatgatatg

SEQ ID NO: 109811 - DNA, 606 bp, Homo sapiens
  Payload ID: 1559
  Gene Symbol: ATP11C
  Gene Name: ATPase, class VI, type 11C
  ENST ID: ENST00000422228
  CDS Start-End: 1-606
ttgaatgctgcatagatggccacaaatataaaggtgtaactcaagaggttgatggattatctcaaactgatggaactttaacatattttgacaaagtagataagaatcgagaagagctgtttctacgtgccttgtgtttatgtcatactgtagaaatcaaaacaaacgatgctgttgatggagctacagaatcagctgaattaacctatatctcctcttcaccagatgaaatagctttggtgaaaggagctaaaagatatgaacttcttcacaccttaaactttgatgctgtccggcgacgtatgagtgtaattgtgaagactcaagaaggagacatacttctcttttgtaaaggagcagactcggcagtttttcccagagtgcaaaatcatgaaattgagttaactaaagtccatgtggaacgtaatgcaatggatgggtatcggacactctgtgtagccttcaaagaaattgctccagatgattatgaaagaattaacagacagctcatagaggcaaaaatggccttacaagacagagaagaaaaaatggaaaaagttttcgatgatattgagacaaacatgaatttaattggagccactgcag

SEQ ID NO: 109812 - DNA, 3113 bp, Homo sapiens
  Payload ID: 1559
  Gene Symbol: ATP11C
  Gene Name: ATPase, class VI, type 11C
  ENST ID: ENST00000433868
  CDS Start-End: 1-496
tgaagggacagtgttcttctttgggacttactttctttttcagactgcatccctagaagaaaatggaaaggtatacggaaactggacttttggaaccattgtttttacagtcttagtattcactgtaaccctgaagcttgccttggatacccgattctggacgtggataaatcactttgtgatttggggttctttagccttctatgtatttttctcattcttctggggaggaattatttggccttttctcaagcaacagagaatgtattttgtatttgcccaaatgctgtcttctgtatccacatggttggctataattcttctaatatttatcagcctgttccctgagattcttctgatagtattaaagaatgtaagaagaagaagtgccaggagaaatctgagctgtagaagggcatctgactcattatccgccagaccttcagtcagacctcttcttttacgaacattctcagacgaatctaatgtattgtaacagaatccgaatcttgaactgcctatgttattgtcctacaagcatactgacagtggttacagctaaaaaagaaagcatgaagaaacaactacaaaaagttatcatctcaggatacttgatacgcaacacactaaaccactctcatgtctagagttcacaataaatgttcattaaaataccaaatgattctcttaagcatttaccattattgtaagtagcctttatggccaaagctgtaagttaagaattatatgaaagttgaaagcaagaatacttagaattctggctttagttagagtaatataactcaaatgggtgctcttttaacccatgaactttgtgaatggatttaaatacaatagtatgaagtagaagttatgcaatgagaatgaatagattttgctaatactactttttttgcctggcagaagaaatagactatttggatcacatttctcattcctcctaaatgatcatcttaattttttttcccaagtacataaggaatacttgaaaatacagaataactaaatagtatcaatgcatcagacagaatagttaatcccttctgtttacccatgtgctactaatgtcttggtagaatattcttgccaaaaaaataccttgaacgcttatgtggaaagtgttaacttacgggtatttttgtgggaatagaaaaaaattgtttattttttattcttctgaattaaaccccacttatgggtgtaagcctactagacttgaaaataaagtataaaacatttccaatcacttagtagcccctcaaagtagttagaaaataaacagatttttccagtgttgattttactgggatctgcagtaaggtggtttaaaccatagttatataaaaataaaggtcattctgaatatcagccttttataattttatgtgaagaggaagaaatatagcttattttaaacttttgacggtttttatttgaaagagattgcatttatgcatatatgcagtgctttttcttaaacttggccaatttggaaagggggaaggagccaccccaaaacggtggttcagcttgtagagccatgactctgtgaagatgaatgttgtctcttaacttggacagggaaatggtctaactctaaaccatgtaactgaccttagtaaagtccttgactaactgaactagaaggaaggtttagccttctaattagttcacttgaaacataaatgtgaaatgtcttcattcaatgttaaacacatacttttttggatataaatgaccatatttatttgactgctagtttttttgttttttttttgtctttctggcatgcctgtactattattaatgtttatattgtaccttgatttggaaaagtattggagttaatctgtattatatttatatagtccatatggcacatttgattcttccacatatattttgtgttaatgtttaggtatgatttttttctaaattctagaaaagaacataatttcagttatcagaagccattccatcattatagaccctttttcattatttcatttgctctcatatatcagtattatttttgagcattttgttacatgtcattcacaacttacctaagtgtgctgtgttctggtagcccgtatttgaggtaagctgctgaaaacaaaagtctctatattctttgcctattccaaagagctaaaaaagtctaacccaggaaagcttttgatattttgtgtttgttttcttgttcttatggttgttgttgctgtattatgattgctgttttacataaaatctatgggaactgtgaatacagacaagagagccacagtagagaggcttgtttaatgcagtaccattggagagttaacagaataatctagtagaaaaataactggttgcatgtaaaattccttccagccagaaagaaagaaagacaaggagtaagggggatttagagttatgtctcagctacacattacattgtgatactgcagctcaaattcagaatggcaatgatacatgatatcatggcctagatccttgagagggacctggctttcctttttaaaagatattttactgaagagctaaaaactggccagtgtggggttagcagatcgaataacttgaaatagaccatgcagtattcctagcactcaatgtaatcaccctatttgtgacagagaaagggaaaaaaatataataagatcatctacctataatttgaataattttgagctatcaaaatgtctttgtaattttcacaaccgctgtccattgtttgaggatgttacctactaaactgaaaacattcattccatatctacttacacatacaccagcaacagtataaatgtaagcctaactttgcaaaattcgtaataatttagtgatggaattttttaataacatgcagtatataaatgtgcagattttatgcgtgttgacaaaatcatttttcagcttgcaaaatgggactgcaatattacatttttcacttaagcagttttttacatctacgttgttgctttctaaaatgaatgtgaatgccatcttttatgactgcaacttgccttttccattacagaaatttttgtttgatgtaatcaataaactttggtatgatatgattg

SEQ ID NO: 109813 - DNA, 8289 bp, Homo sapiens
  Payload ID: 1560
  Gene Symbol: ATP7A
  Gene Name: ATPase, Cu++ transporting, alpha polypeptide
  Uniprot ID: Q04656
  ENST ID: ENST00000343533
  CDS Start-End: 202-4470
ccgccgcggcggggggtgggaaaagagaagcagagggaggagttgttgctgccgccgccgcagccgcagctactgtgacttctccgattgtgtgagctttgttggagcctgcgtacgtggatttatcgctgccacggtctgcgtagctccagaggtttaaccataggatagagaaaccaggaatgtaatgaggaaatcaaaatggatccaagtatgggtgtgaattctgttaccatttctgttgagggtatgacttgcaattcctgtgtttggaccattgagcagcagattggaaaagtgaatggtgtgcatcacattaaggtatcactggaagaaaaaaatgcaactattatttatgaccctaaactacagactccaaagaccctacaggaagctattgatgacatgggctttgatgctgttatccataatcctgaccctctccctgttttaactgacaccttgtttctgactgttacggcgtcactgactttgccatgggaccatatccaaagcacattgctgaagaccaagggtgtgacagacattaaaatttaccctcagaaaagaactgtagcagtgacaataatcccttctatagtgaatgccaatcagataaaagagctggttccagaactcagtttagatactgggacactggagaaaaagtcaggagcttgtgaagatcatagtatggctcaagctggtgaagtcgtgctgaagatgaaagtggaagggatgacctgccattcatgtactagcactattgaaggaaaaattgggaaactgcaaggtgttcagcgaattaaagtctccctggacaatcaagaagctactattgtttatcaacctcatcttatctcagtagaggaaatgaaaaagcagattgaagctatgggctttccagcatttgtcaaaaagcagcccaagtacctcaaattgggagctattgatgtagaacgtctaaagaacacaccagttaaatcctcagaagggtcacagcaaaggagtccatcatataccaatgattcaacagccactttcatcattgatggcatgcattgtaaatcatgtgtgtcaaatattgaaagtactttatctgcactccaatatgtaagcagcatagtagtttctttagagaataggtctgccattgtgaagtataatgcaagctcagtcactccagaatccctgagaaaagcaatagaggctgtatcaccggggctatatagagttagtatcacaagtgaagttgagagtacctcaaactctccctccagctcatctcttcagaagattcctttgaatgtagttagccagcctctgacacaagaaactgtgataaacattgatggcatgacttgtaattcctgtgtgcagtctattgagggtgtcatatcaaaaaagccaggtgtaaaatccatacgagtctcccttgcaaatagcaatgggactgttgagtatgatcctctactaacctctccagaaacgttgagaggagcaatagaagacatgggatttgatgctaccttgtcagacacgaatgagccgttggtagtaatagctcagccttcatcggaaatgccgcttttgacttcaactaatgaattttatactaaagggatgacaccagttcaagacaaggaggaaggaaagaattcatctaagtgttacatacaggtcactggcatgacttgcgcttcctgtgtagcaaacattgaacggaatttaaggcgggaagaaggaatatattctatacttgtggccctgatggctggcaaggcagaagtaaggtataatcctgctgttatacaacccccaatgatagcagagttcatccgagaacttggatttggagccactgtgatagaaaatgctgatgaaggagatggtgttttggaacttgttgtgaggggaatgacgtgtgcctcctgcgtacataaaatagagtctagtctcacaaaacacagagggatcctatactgctccgtggccctggcaaccaacaaagcacatattaaatatgacccagaaattattggtcctagagatattatccatacaattgaaagcttaggttttgaagcttctttggtcaagaaggatcggtcagcaagtcacttagatcataaacgagaaataagacaatggagacggtcttttcttgtgagtctgtttttctgtattcctgtaatggggctgatgatatatatgatggttatggaccaccactttgcaactcttcaccataatcaaaacatgagtaaagaagaaatgatcaaccttcattcttctatgttcctggagcgccagattcttccaggattgtctgttatgaatttgctgtcctttttattgtgtgtacctgtacagggcaaaacatcagaggctcttgcaaagttaatttcactacaagctacagaagcaactattgtaactcttgattctgataatatcctcctcagtgaagaacaagtggatgtggaacttgtacaacgtggagatatcattaaagtagttccaggaggcaaatttccagtggatggtcgtgttattgaaggacattctatggtagatgagtccctcatcacaggggaggcaatgcctgtggctaagaaacctggcagcacagtgattgctggttccattaaccagaacgggtcactgcttatctgcgcaacacatgttggagcagacacaaccctttctcaaattgtcaaacttgtggaagaggcacaaacatcaaaggctcctatccagcagtttgcagacaaactcagtggctattttgttccttttattgtttttgtttccattgccaccctcttggtatggattgtaattggatttctgaattttgaaattgtggaaacctactttcctggctacaatagaagtatctcccgaacagaaacgataatacgatttgctttccaagcctctatcacagttctgtgtattgcatgtccctgttcactgggactggccactccaactgctgtgatggtgggtacaggagtaggtgctcaaaatggcatactaataaaaggtggagagccattggagatggctcataaggtaaaggtagtggtatttgataagactggaaccattactcacggaaccccagtggtgaatcaagtaaaggttctaactgaaagtaacagaatatcacaccataaaatcttggccattgtgggaactgctgaaagtaacagtgaacaccctctaggaacagccataaccaaatattgcaaacaggagctggacactgaaaccttgggtacctgcatagatttccaggttgtgccaggctgtggtattagctgtaaagtcaccaatattgaaggcttgctacataagaataactggaatatagaggacaataatattaaaaatgcatccctggttcaaattgatgccagtaatgaacagtcatcaacttcgtcttccatgattattgatgcccagatctcaaatgctcttaatgctcagcagtataaagtcctcattggtaaccgggagtggatgattagaaatggtcttgtcattaataacgatgtaaatgatttcatgactgaacatgagagaaaaggtcggactgctgtattagtagcagttgatgatgagctgtgtggcttgatagccattgcagacacagtgaagcctgaagcagaactggctatccatattctgaaatctatgggcttagaagtagttctgatgactggagacaacagtaaaacagctagatctattgcttctcaggttggcattactaaggtgtttgctgaagttctaccttctcacaaggttgctaaagtgaagcaacttcaagaggaggggaaacgggtagcaatggtgggagatggaatcaatgactccccagctctggcaatggctaatgtgggaattgctattggcacaggcacagatgtagccattgaagcagctgatgtggttttgataaggaatgatcttctggatgtagtggcaagtattgacttatcaagaaagacagtcaagaggattcggataaattttgtctttgctctaatttataatctggttggaattcccatagctgctggagtttttatgcccattggtttggttttgcagccctggatgggatctgcagcaatggctgcttcatctgtttctgtagtactttcttctctcttccttaaactttacaggaaaccaacttacgagagttatgaactgcctgcccggagccagataggacagaagagtccttcagaaatcagcgttcatgttggaatagatgatacctcaaggaattctcctaaactgggtttgctggaccggattgttaattatagcagagcctctataaactcactactgtctgataaacgctccctaaacagtgttgttaccagtgaacctgacaagcactcactcctggtgggagacttcagggaagatgatgacactgcattataaaaggccatggagagtgctgccagtttaacttgtcatgcactgacacagcattcatgatgttaccttcacttttcaaaatattgtagaaggatttttctcatgctcttatattagggattctatttgagttgcgtttatctgttggcaaaaatatctttttcaaggcatcagctctgaacctagctttatttaaactgaatttccagtatatttttgttttcactaacaacagataaggtagagcagtgaggtttacaacaagccctacaattagagattgctgaactgctgctaaagtgattttttttttatttgaccaaaaaaaaaaaggcccaagaagaagaaaatgaaaaatttgaagatttgagagcatgaagatattcatgcttttgaactcaaaatattgaagatactctcaagcctgtatccctgccccactggggagcaatgactttcaaagcactgtgtataaaacatctagttttagaagggaaacagttgaaactgtttaaaaatagatgtgccttatttattgcaggctttctttcccccattctccctgcatccttgtccttgcaggtgcttttttagatgctccaatatgtcttcttttgttattttctttcgagctaaccaagtttaggtggtttttcattgattaaaaataactgacaactgttctaatattttgctcctttttaaattttgtagctcaaaagaccttaaaggtctgtagggttccctgcctcccatctttccactgttgtaaaaagtatatcaaattattccttcaagtttcctagctctgtgctcagtttcagttcactcctgccaagttggactctaagttattcttcatgtagtctgctgatctcagtctggaaacttaacattatgagccttttctgctcaaaaaattttcaaagattaaaactattatacatatacaggtcatataaaattacctggattcactaaatttgtttgttgttgttgttgttgttgttgttgttgttgagacagagtcttgttttgcagcccaggctggagtgcagtggcaccatcttggctcactgcaacctctgcctaccggattcaaggaattctccctgcctcagcctcctgagtagctaggattacaggtgcctgccaccacacccggctaattttcatatttttcagtagagacggggtttcgccatgttggctagcctggtcttaaactcctaacctcaggtgatccacccgccttggcctcccaaagtgctgggattacaggtgtgagcctccatgcccagcctaaatttgtattttttgaattgagtataatcactttgctagtatatataatttaatagattttatttatcttttagtgtttcagataacctctcaaaaagactttaaaataatgctattacacaaagctgcatttaccaaaaaatacagtaaaatcataatacagaaactaaaatttccctaggttatgacgctttttagctaaatatatactcttctctagtttaaaacatttgaacttgcctagttagtgtggttggcaaatttaggagcttgttcccattgccaaatggatttagaaattcccttgtgagtgcctggtagctaatacactggtcagagatctggtacttgtaagactatttaaatttctttgttagttgcaagatggatttcatatgcagaatatgtaaatgaagaggactcataagtaaattcctaacattttgttcccattaccagaagcaaagctgctgctaacccaacatctggcacataggatttgtactcggtaaatgttagttcttttctccccttgaggtcagtaataaatacaaaaaaatcatttttctagagcagagtcttaaaatcaggtgggggtaggggatggagttcttcctttcctaccccttttctcttttatcctttcatatatacacatgcaaagtttacaaccttattccatgctgtctttcagatttagaaaagatctaatttctgtctcagctgtcttaaagagagaactgaagcttttgatgaaggtgctattaatctagaaaggcaaacccatttcactgaaatatcaatgggtttgcatatctaggccctttttttagaccaatgcctatgccatcctccatgctttcagtttgagttttattatttattattttaattccagtggcccatcttataatacaacttgtttcttctagaagacagagctgatagggtaaatgttgaaaaaagaagcatgcctccttctccctcccacccacctcaagcagttgaacacagccagttattcttccattattatgtgtaccttggagtcatcctcttggtcttgtattcatattgtgggacagtgggaatagcagcttgtagtattgaaataatcaaagagataatttcagctcttacaacaagaacagaaaacatgctaattagaaaaagtcctgctttaagtaatatgtagccacatttgaatcctctaccacaagtcttttttgcaatcttgaactttcattagcttcaaagagaagctgtatttacaggagaaagaggtgattatggagggaatcaaaaatactgctttcagttagtagctagctttaagtcaggagttagtaatgagaaattttataaatgtgtatttctgtgtattcacatacatatatatatacacacatatatatgtacatacacatacatacatattaccatactgaagggaaatggatttatatttgaatttgatatttgaatatttgaagttctctatttatatttcatttatcactcttctgtattcactcagcaaccatgcccttagtctgaagataacaaggatactttaatatccagtgccggttcagactcacctatgtggcaccttaaacttaaatatccaaagatgccttttgaatttcaaagattaaaacacagctagagtagtagtattgtagtctcaagatgtatggtgtgtcatttgtgaaaatagaaacgttatttttcctagtttagtatcaacattttagaatgtcaaatttgatgccttgtgaacaagtaattttatattgtgctttaattttttaaaaagtattctttattcatatgtatagaatgcttaaaatagcactgtagacaagatgtttccaaaactttaagtgcgcatatcttttctgtatacagcttaaaatcaaaaatgtatgttaagagaattttttctattacttatggatcatgctttaaaatgatttttcttgatatttattttactccattttgtttttttctctgggtgaggcatctggttactggttattttaaaaagaataaagacattcctggaatcactccttttgggtttttgtttgttttgtttcttttctacatttttaagtattattttacaaaatagaaaaaatatagattcatgccaaattattacctatttttacactaactttctgcagtccctccatctggtatgagtaaccagatagagcacaaagcatgagttcttgttcttcagttaaaagagcttctttcacagtgttgataacaaatgccttttgtagccaaaaccaggcgtctcaaccttacgtttttagttaaagaaatgtttagctaaacgttgttgaacattgattgtttggtaccgaaaacagcagtggacgatgttgtgcaatatccatctactgtagttaagatattcagtagtttgtttttcataagcatgtaattgatcatatttctgccaaggatgtgccttcaactttataattatagtgttgt

SEQ ID NO: 109814 - DNA, 4775 bp, Homo sapiens
  Payload ID: 1560
  Gene Symbol: ATP7A
  Gene Name: ATPase, Cu++ transporting, alpha polypeptide
  Uniprot ID: Q04656
  ENST ID: ENST00000350425
  CDS Start-End: 131-955
actgtgacttctccgattgtgtgagctttgttggagcctgcgtacgtggatttatcgctgccacggtctgcgtagctccagaggtttaaccataggatagagaaaccaggaatgtaatgaggaaatcaaaatggatccaagtatgggtgtgaattctgttaccatttctgttgagggtatgacttgcaattcctgtgtttggaccattgagcagcagattggaaaagtgaatggtgtgcatcacattaaggtatcactggaagaaaaaaatgcaactattatttatgaccctaaactacagactccaaagaccctacaggaagctattgatgacatgggctttgatgctgttatccataatcctgaccctctccctgttttaactgacaccttgtttctgactgttacggcgtcactgactttgccatgggaccatatccaaagcacattgctgaagaccaagggtgtgacagacattaaaatttaccctcagaaaagaactgtagcagtgacaataatcccttctatagtgaatgccaatcagataaaagagctggttccagaactcagtttagatactgggacactggagaaaaagtcaggagcttgtgaagatcatagtatggctcaagctggtgaagtcgtgctgaagatgaaagtggaagggatgacctgccattcatgtactagcactattgaaggaaaaattgggaaactgcaaggtgttcagcgaattaaagtctccctggacaatcaagaagctactattgtttatcaacctcatcttatctcagtagaggaaatgaaaaagcagattgaagctatgggctttccagcatttgtcaaaaagcagcccaagtacctcaaattgggagctattgatgtagaacgtctaaagaacacaccagttaaatcctcagaagggtcacagcaaaggagtccatcataccaatgattcaacagccactttcatcattgatggcatgcattgtaaatcatgtgtgtcaaatattgaaagtactttatctgcactccaatatgtaagcagcatagtagtttctttagagaataggtctgccattgtgaagtataatgcaagctcagtcactccagaatccctgagaaaagcaatagaggctgtatcaccggggctatatagagttagtatcacaagtgaagttgagagtacctcaaactctccctccagctcatctcttcagaagattcctttgaatgtagttagccagcctctgacacaagaaactgtgataaacattgatggcatgacttgtaattcctgtgtgcagtctattgagggtgtcatatcaaaaaagccaggtgtaaaatccatacgagtctcccttgcaaatagcaatgggactgttgagtatgatcctctactaacctctccagaaacgttgagaggagcaatagaagacatgggatttgatgctaccttgtcagacacgaatgagccgttggtagtaatagctcagccttcatcggaaatgccgcttttgacttcaactaatgaattttatactaaagggatgacaccagttcaagacaaggaggaaggaaagaattcatctaagtgttacatacaggtcactggcatgacttgcgcttcctgtgtagcaaacattgaacggaatttaaggcgggaagaaggaatatattctatacttgtggccctgatggctggcaaggcagaagtaaggtataatcctgctgttatacaacccccaatgatagcagagttcatccgagaacttggatttggagccactgtgatagaaaatgctgatgaaggagatggtgttttggaacttgttgtgaggggaatgacgtgtgcctcctgcgtacataaaatagagtctagtctcacaaaacacagagggatcctatactgctccgtggccctggcaaccaacaaagcacatattaaatatgacccagaaattattggtcctagagatattatccatacaattgaaagcttaggttttgaagcttctttggtcaagaaggatcggtcagcaagtcacttagatcataaacgagaaataagacaatggagacggtcttttcttgtgagtctgtttttctgtattcctgtaatggggctgatgatatatatgatggttatggaccaccactttgcaactcttcaccataatcaaaacatgagtaaagaagaaatgatcaaccttcattcttctatgttcctggagcgccagattcttccaggattgtctgttatgaatttgctgtcctttttattgtgtgtacctgtacagtttttcggaggctggtacttctacattcaggcttataaagcactgaagcataagacagcaaatatggacgtactgattgtgctggcaaccaccattgcatttgcctactctttgattattcttctagttgcaatgtatgagagagccaaagtgaaccctattactttctttgacacaccccctatgctgtttgtgtttattgcactaggccgatggctggaacatatagcaaagggcaaaacatcagaggctcttgcaaagttaatttcactacaagctacagaagcaactattgtaactcttgattctgataatatcctcctcagtgaagaacaagtggatgtggaacttgtacaacgtggagatatcattaaagtagttccaggaggcaaatttccagtggatggtcgtgttattgaaggacattctatggtagatgagtccctcatcacaggggaggcaatgcctgtggctaagaaacctggcagcacagtgattgctggttccattaaccagaacgggtcactgcttatctgcgcaacacatgttggagcagacacaaccctttctcaaattgtcaaacttgtggaagaggcacaaacatcaaaggctcctatccagcagtttgcagacaaactcagtggctattttgttccttttattgtttttgtttccattgccaccctcttggtatggattgtaattggatttctgaattttgaaattgtggaaacctactttcctggctacaatagaagtatctcccgaacagaaacgataatacgatttgctttccaagcctctatcacagttctgtgtattgcatgtccctgttcactgggactggccactccaactgctgtgatggtgggtacaggagtaggtgctcaaaatggcatactaataaaaggtggagagccattggagatggctcataaggtaaaggtagtggtatttgataagactggaaccattactcacggaaccccagtggtgaatcaagtaaaggttctaactgaaagtaacagaatatcacaccataaaatcttggccattgtgggaactgctgaaagtaacagtgaacaccctctaggaacagccataaccaaatattgcaaacaggagctggacactgaaaccttgggtacctgcatagatttccaggttgtgccaggctgtggtattagctgtaaagtcaccaatattgaaggcttgctacataagaataactggaatatagaggacaataatattaaaaatgcatccctggttcaaattgatgccagtaatgaacagtcatcaacttcgtcttccatgattattgatgcccagatctcaaatgctcttaatgctcagcagtataaagtcctcattggtaaccgggagtggatgattagaaatggtcttgtcattaataacgatgtaaatgatttcatgactgaacatgagagaaaaggtcggactgctgtattagtagcagttgatgatgagctgtgtggcttgatagccattgcagacacagtgaagcctgaagcagaactggctatccatattctgaaatctatgggcttagaagtagttctgatgactggagacaacagtaaaacagctagatctattgcttctcaggttggcattactaaggtgtttgctgaagttctaccttctcacaaggttgctaaagtgaagcaacttcaagaggaggggaaacgggtagcaatggtgggagatggaatcaatgactccccagctctggcaatggctaatgtgggaattgctattggcacaggcacagatgtagccattgaagcagctgatgtggttttgataaggaatgatcttctggatgtagtggcaagtattgacttatcaagaaagacagtcaagaggattcggataaattttgtctttgctctaatttataatctggttggaattcccatagctgctggagtttttatgcccattggtttggttttgcagccctggatgggatctgcagcaatggctgcttcatctgtttctgtagtactttcttctctcttccttaaactttacaggaaaccaacttacgagagttatgaactgcctgcccggagccagataggacagaagagtccttcagaaatcagcgttcatgttggaatagatgatacctcaaggaattctcctaaactgggtttgctggaccggattgttaattatagcagagcctctataaactcactactgtctgataaacgctccctaaacagtgttgttaccagtgaacctgacaagcactcactcctggtgggagacttcagggaagatgatgacactgcattataaaaggccatggagagtgctgccagtttaacttgtcatgcactgacacagcattcatgatgttaccttcacttttcaaaatattgtagaaggatttttctcatgctcttatattagggattctatttgagttgcgtttatctgttg

SEQ ID NO: 109815 - DNA, 8483 bp, Homo sapiens
  Payload ID: 1560
  Gene Symbol: ATP7A
  Gene Name: ATPase, Cu++ transporting, alpha polypeptide
  Uniprot ID: Q04656
  ENST ID: ENST00000341514
  CDS Start-End: 156-4658
tgctgccgccgccgcagccgcagctactgtgacttctccgattgtgtgagctttgttggagcctgcgtacgtggatttatcgctgccacggtctgcgtagctccagaggtttaaccataggatagagaaaccaggaatgtaatgaggaaatcaaaatggatccaagtatgggtgtgaattctgttaccatttctgttgagggtatgacttgcaattcctgtgtttggaccattgagcagcagattggaaaagtgaatggtgtgcatcacattaaggtatcactggaagaaaaaaatgcaactattatttatgaccctaaactacagactccaaagaccctacaggaagctattgatgacatgggctttgatgctgttatccataatcctgaccctctccctgttttaactgacaccttgtttctgactgttacggcgtcactgactttgccatgggaccatatccaaagcacattgctgaagaccaagggtgtgacagacattaaaatttaccctcagaaaagaactgtagcagtgacaataatcccttctatagtgaatgccaatcagataaaagagctggttccagaactcagtttagatactgggacactggagaaaaagtcaggagcttgtgaagatcatagtatggctcaagctggtgaagtcgtgctgaagatgaaagtggaagggatgacctgccattcatgtactagcactattgaaggaaaaattgggaaactgcaaggtgttcagcgaattaaagtctccctggacaatcaagaagctactattgtttatcaacctcatcttatctcagtagaggaaatgaaaaagcagattgaagctatgggctttccagcatttgtcaaaaagcagcccaagtacctcaaattgggagctattgatgtagaacgtctaaagaacacaccagttaaatcctcagaagggtcacagcaaaggagtccatcatataccaatgattcaacagccactttcatcattgatggcatgcattgtaaatcatgtgtgtcaaatattgaaagtactttatctgcactccaatatgtaagcagcatagtagtttctttagagaataggtctgccattgtgaagtataatgcaagctcagtcactccagaatccctgagaaaagcaatagaggctgtatcaccggggctatatagagttagtatcacaagtgaagttgagagtacctcaaactctccctccagctcatctcttcagaagattcctttgaatgtagttagccagcctctgacacaagaaactgtgataaacattgatggcatgacttgtaattcctgtgtgcagtctattgagggtgtcatatcaaaaaagccaggtgtaaaatccatacgagtctcccttgcaaatagcaatgggactgttgagtatgatcctctactaacctctccagaaacgttgagaggagcaatagaagacatgggatttgatgctaccttgtcagacacgaatgagccgttggtagtaatagctcagccttcatcggaaatgccgcttttgacttcaactaatgaattttatactaaagggatgacaccagttcaagacaaggaggaaggaaagaattcatctaagtgttacatacaggtcactggcatgacttgcgcttcctgtgtagcaaacattgaacggaatttaaggcgggaagaaggaatatattctatacttgtggccctgatggctggcaaggcagaagtaaggtataatcctgctgttatacaacccccaatgatagcagagttcatccgagaacttggatttggagccactgtgatagaaaatgctgatgaaggagatggtgttttggaacttgttgtgaggggaatgacgtgtgcctcctgcgtacataaaatagagtctagtctcacaaaacacagagggatcctatactgctccgtggccctggcaaccaacaaagcacatattaaatatgacccagaaattattggtcctagagatattatccatacaattgaaagcttaggttttgaagcttctttggtcaagaaggatcggtcagcaagtcacttagatcataaacgagaaataagacaatggagacggtcttttcttgtgagtctgtttttctgtattcctgtaatggggctgatgatatatatgatggttatggaccaccactttgcaactcttcaccataatcaaaacatgagtaaagaagaaatgatcaaccttcattcttctatgttcctggagcgccagattcttccaggattgtctgttatgaatttgctgtcctttttattgtgtgtacctgtacagtttttcggaggctggtacttctacattcaggcttataaagcactgaagcataagacagcaaatatggacgtactgattgtgctggcaaccaccattgcatttgcctactctttgattattcttctagttgcaatgtatgagagagccaaagtgaaccctattactttctttgacacaccccctatgctgtttgtgtttattgcactaggccgatggctggaacatatagcaaagggcaaaacatcagaggctcttgcaaagttaatttcactacaagctacagaagcaactattgtaactcttgattctgataatatcctcctcagtgaagaacaagtggatgtggaacttgtacaacgtggagatatcattaaagtagttccaggaggcaaatttccagtggatggtcgtgttattgaaggacattctatggtagatgagtccctcatcacaggggaggcaatgcctgtggctaagaaacctggcagcacagtgattgctggttccattaaccagaacgggtcactgcttatctgcgcaacacatgttggagcagacacaaccctttctcaaattgtcaaacttgtggaagaggcacaaacatcaaaggctcctatccagcagtttgcagacaaactcagtggctattttgttccttttattgtttttgtttccattgccaccctcttggtatggattgtaattggatttctgaattttgaaattgtggaaacctactttcctggctacaatagaagtatctcccgaacagaaacgataatacgatttgctttccaagcctctatcacagttctgtgtattgcatgtccctgttcactgggactggccactccaactgctgtgatggtgggtacaggagtaggtgctcaaaatggcatactaataaaaggtggagagccattggagatggctcataaggtaaaggtagtggtatttgataagactggaaccattactcacggaaccccagtggtgaatcaagtaaaggttctaactgaaagtaacagaatatcacaccataaaatcttggccattgtgggaactgctgaaagtaacagtgaacaccctctaggaacagccataaccaaatattgcaaacaggagctggacactgaaaccttgggtacctgcatagatttccaggttgtgccaggctgtggtattagctgtaaagtcaccaatattgaaggcttgctacataagaataactggaatatagaggacaataatattaaaaatgcatccctggttcaaattgatgccagtaatgaacagtcatcaacttcgtcttccatgattattgatgcccagatctcaaatgctcttaatgctcagcagtataaagtcctcattggtaaccgggagtggatgattagaaatggtcttgtcattaataacgatgtaaatgatttcatgactgaacatgagagaaaaggtcggactgctgtattagtagcagttgatgatgagctgtgtggcttgatagccattgcagacacagtgaagcctgaagcagaactggctatccatattctgaaatctatgggcttagaagtagttctgatgactggagacaacagtaaaacagctagatctattgcttctcaggttggcattactaaggtgtttgctgaagttctaccttctcacaaggttgctaaagtgaagcaacttcaagaggaggggaaacgggtagcaatggtgggagatggaatcaatgactccccagctctggcaatggctaatgtgggaattgctattggcacaggcacagatgtagccattgaagcagctgatgtggttttgataaggaatgatcttctggatgtagtggcaagtattgacttatcaagaaagacagtcaagaggattcggataaattttgtctttgctctaatttataatctggttggaattcccatagctgctggagtttttatgcccattggtttggttttgcagccctggatgggatctgcagcaatggctgcttcatctgtttctgtagtactttcttctctcttccttaaactttacaggaaaccaacttacgagagttatgaactgcctgcccggagccagataggacagaagagtccttcagaaatcagcgttcatgttggaatagatgatacctcaaggaattctcctaaactgggtttgctggaccggattgttaattatagcagagcctctataaactcactactgtctgataaacgctccctaaacagtgttgttaccagtgaacctgacaagcactcactcctggtgggagacttcagggaagatgatgacactgcattataaaaggccatggagagtgctgccagtttaacttgtcatgcactgacacagcattcatgatgttaccttcacttttcaaaatattgtagaaggatttttctcatgctcttatattagggattctatttgagttgcgtttatctgttggcaaaaatatctttttcaaggcatcagctctgaacctagctttatttaaactgaatttccagtatatttttgttttcactaacaacagataaggtagagcagtgaggtttacaacaagccctacaattagagattgctgaactgctgctaaagtgattttttttttatttgaccaaaaaaaaaaaggcccaagaagaagaaaatgaaaaatttgaagatttgagagcatgaagatattcatgcttttgaactcaaaatattgaagatactctcaagcctgtatccctgccccactggggagcaatgactttcaaagcactgtgtataaaacatctagttttagaagggaaacagttgaaactgtttaaaaatagatgtgccttatttattgcaggctttctttcccccattctccctgcatccttgtccttgcaggtgcttttttagatgctccaatatgtcttcttttgttattttctttcgagctaaccaagtttaggtggtttttcattgattaaaaataactgacaactgttctaatattttgctcctttttaaattttgtagctcaaaagaccttaaaggtctgtagggttccctgcctcccatctttccactgttgtaaaaagtatatcaaattattccttcaagtttcctagctctgtgctcagtttcagttcactcctgccaagttggactctaagttattcttcatgtagtctgctgatctcagtctggaaacttaacattatgagccttttctgctcaaaaaattttcaaagattaaaactattatacatatacaggtcatataaaattacctggattcactaaatttgtttgttgttgttgttgttgttgttgttgttgttgagacagagtcttgttttgcagcccaggctggagtgcagtggcaccatcttggctcactgcaacctctgcctaccggattcaaggaattctccctgcctcagcctcctgagtagctaggattacaggtgcctgccaccacacccggctaattttcatatttttcagtagagacggggtttcgccatgttggctagcctggtcttaaactcctaacctcaggtgatccacccgccttggcctcccaaagtgctgggattacaggtgtgagcctccatgcccagcctaaatttgtattttttgaattgagtataatcactttgctagtatatataatttaatagattttatttatcttttagtgtttcagataacctctcaaaaagactttaaaataatgctattacacaaagctgcatttaccaaaaaatacagtaaaatcataatacagaaactaaaatttccctaggttatgacgctttttagctaaatatatactcttctctagtttaaaacatttgaacttgcctagttagtgtggttggcaaatttaggagcttgttcccattgccaaatggatttagaaattcccttgtgagtgcctggtagctaatacactggtcagagatctggtacttgtaagactatttaaatttctttgttagttgcaagatggatttcatatgcagaatatgtaaatgaagaggactcataagtaaattcctaacattttgttcccattaccagaagcaaagctgctgctaacccaacatctggcacataggatttgtactcggtaaatgttagttcttttctccccttgaggtcagtaataaatacaaaaaaatcatttttctagagcagagtcttaaaatcaggtgggggtaggggatggagttcttcctttcctaccccttttctcttttatcctttcatatatacacatgcaaagtttacaaccttattccatgctgtctttcagatttagaaaagatctaatttctgtctcagctgtcttaaagagagaactgaagcttttgatgaaggtgctattaatctagaaaggcaaacccatttcactgaaatatcaatgggtttgcatatctaggccctttttttagaccaatgcctatgccatcctccatgctttcagtttgagttttattatttattattttaattccagtggcccatcttataatacaacttgtttcttctagaagacagagctgatagggtaaatgttgaaaaaagaagcatgcctccttctccctcccacccacctcaagcagttgaacacagccagttattcttccattattatgtgtaccttggagtcatcctcttggtcttgtattcatattgtgggacagtgggaatagcagcttgtagtattgaaataatcaaagagataatttcagctcttacaacaagaacagaaaacatgctaattagaaaaagtcctgctttaagtaatatgtagccacatttgaatcctctaccacaagtcttttttgcaatcttgaactttcattagcttcaaagagaagctgtatttacaggagaaagaggtgattatggagggaatcaaaaatactgctttcagttagtagctagctttaagtcaggagttagtaatgagaaattttataaatgtgtatttctgtgtattcacatacatatatatatacacacatatatatgtacatacacatacatacatattaccatactgaagggaaatggatttatatttgaatttgatatttgaatatttgaagttctctatttatatttcatttatcactcttctgtattcactcagcaaccatgcccttagtctgaagataacaaggatactttaatatccagtgccggttcagactcacctatgtggcaccttaaacttaaatatccaaagatgccttttgaatttcaaagattaaaacacagctagagtagtagtattgtagtctcaagatgtatggtgtgtcatttgtgaaaatagaaacgttatttttcctagtttagtatcaacattttagaatgtcaaatttgatgccttgtgaacaagtaattttatattgtgctttaattttttaaaaagtattctttattcatatgtatagaatgcttaaaatagcactgtagacaagatgtttccaaaactttaagtgcgcatatcttttctgtatacagcttaaaatcaaaaatgtatgttaagagaattttttctattacttatggatcatgctttaaaatgatttttcttgatatttattttactccattttgtttttttctctgggtgaggcatctggttactggttattttaaaaagaataaagacattcctggaatcactccttttgggtttttgtttgttttgtttcttttctacatttttaagtattattttacaaaatagaaaaaatatagattcatgccaaattattacctatttttacactaactttctgcagtccctccatctggtatgagtaaccagatagagcacaaagcatgagttcttgttcttcagttaaaagagcttctttcacagtgttgataacaaatgccttttgtagccaaaaccaggcgtctcaaccttacgtttttagttaaagaaatgtttagctaaacgttgttgaacattgattgtttggtaccgaaaacagcagtggacgatgttgtgcaatatccatctactgtagttaagatattcagtagtttgtttttcataagcatgtaattgatcatatttctgccaaggatgtgccttcaactttataattatagtgttgtaaaata

SEQ ID NO: 109816 - DNA, 6638 bp, Homo sapiens
  Payload ID: 1561
  Gene Symbol: ATP7B
  Gene Name: ATPase, Cu++ transporting, beta polypeptide
  Uniprot ID: P35670
  ENST ID: ENST00000242839
  CDS Start-End: 158-4555
ttcccggacccctgtttgctttagagccgagccgcgccgatgccctcacactctgcgcctcctctcccgggactttaacaccccgctctcctccaccgaccaggtgaccttttgctctgagccagatcagagaagaattcggtgtccgtgcgggacgatgcctgagcaggagagacagatcacagccagagaaggggccagtcggaaaatcttatctaagctttctttgcctacccgtgcctgggaaccagcaatgaagaagagttttgcttttgacaatgttggctatgaaggtggtctggatggcctgggcccttcttctcaggtggccaccagcacagtcaggatcttgggcatgacttgccagtcatgtgtgaagtccattgaggacaggatttccaatttgaaaggcatcatcagcatgaaggtttccctggaacaaggcagtgccactgtgaaatatgtgccatcggttgtgtgcctgcaacaggtttgccatcaaattggggacatgggcttcgaggccagcattgcagaaggaaaggcagcctcctggccctcaaggtccttgcctgcccaggaggctgtggtcaagctccgggtggagggcatgacctgccagtcctgtgtcagctccattgaaggcaaggtccggaaactgcaaggagtagtgagagtcaaagtctcactcagcaaccaagaggccgtcatcacttatcagccttatctcattcagcccgaagacctcagggaccatgtaaatgacatgggatttgaagctgccatcaagagcaaagtggctcccttaagcctgggaccaattgatattgagcggttacaaagcactaacccaaagagacctttatcttctgctaaccagaattttaataattctgagaccttggggcaccaaggaagccatgtggtcaccctccaactgagaatagatggaatgcattgtaagtcttgcgtcttgaatattgaagaaaatattggccagctcctaggggttcaaagtattcaagtgtccttggagaacaaaactgcccaagtaaagtatgacccttcttgtaccagcccagtggctctgcagagggctatcgaggcacttccacctgggaattttaaagtttctcttcctgatggagccgaagggagtgggacagatcacaggtcttccagttctcattcccctggctccccaccgagaaaccaggtccagggcacatgcagtaccactctgattgccattgccggcatgacctgtgcatcctgtgtccattccattgaaggcatgatctcccaactggaaggggtgcagcaaatatcggtgtctttggccgaagggactgcaacagttctttataatccctctgtaattagcccagaagaactcagagctgctatagaagacatgggatttgaggcttcagtcgtttctgaaagctgttctactaaccctcttggaaaccacagtgctgggaattccatggtgcaaactacagatggtacacctacatctgtgcaggaagtggctccccacactgggaggctccctgcaaaccatgccccggacatcttggcaaagtccccacaatcaaccagagcagtggcaccgcagaagtgcttcttacagatcaaaggcatgacctgtgcatcctgtgtgtctaacatagaaaggaatctgcagaaagaagctggtgttctctccgtgttggttgccttgatggcaggaaaggcagagatcaagtatgacccagaggtcatccagcccctcgagatagctcagttcatccaggacctgggttttgaggcagcagtcatggaggactacgcaggctccgatggcaacattgagctgacaatcacagggatgacctgcgcgtcctgtgtccacaacatagagtccaaactcacgaggacaaatggcatcacttatgcctccgttgcccttgccaccagcaaagcccttgttaagtttgacccggaaattatcggtccacgggatattatcaaaattattgaggaaattggctttcatgcttccctggcccagagaaaccccaacgctcatcacttggaccacaagatggaaataaagcagtggaagaagtctttcctgtgcagcctggtgtttggcatccctgtcatggccttaatgatctatatgctgatacccagcaacgagccccaccagtccatggtcctggaccacaacatcattccaggactgtccattctaaatctcatcttctttatcttgtgtacctttgtccagctcctcggtgggtggtacttctacgttcaggcctacaaatctctgagacacaggtcagccaacatggacgtgctcatcgtcctggccacaagcattgcttatgtttattctctggtcatcctggtggttgctgtggctgagaaggcggagaggagccctgtgacattcttcgacacgccccccatgctctttgtgttcattgccctgggccggtggctggaacacttggcaaagagcaaaacctcagaagccctggctaaactcatgtctctccaagccacagaagccaccgttgtgacccttggtgaggacaatttaatcatcagggaggagcaagtccccatggagctggtgcagcggggcgatatcgtcaaggtggtccctgggggaaagtttccagtggatgggaaagtcctggaaggcaataccatggctgatgagtccctcatcacaggagaagccatgccagtcactaagaaacccggaagcactgtaattgcggggtctataaatgcacatggctctgtgctcattaaagctacccacgtgggcaatgacaccactttggctcagattgtgaaactggtggaagaggctcagatgtcaaaggcacccattcagcagctggctgaccggtttagtggatattttgtcccatttatcatcatcatgtcaactttgacgttggtggtatggattgtaatcggttttatcgattttggtgttgttcagagatactttcctaaccccaacaagcacatctcccagacagaggtgatcatccggtttgctttccagacgtccatcacggtgctgtgcattgcctgcccctgctccctggggctggccacgcccacggctgtcatggtgggcaccggggtggccgcgcagaacggcatcctcatcaagggaggcaagcccctggagatggcgcacaagataaagactgtgatgtttgacaagactggcaccattacccatggcgtccccagggtcatgcgggtgctcctgctgggggatgtggccacactgcccctcaggaaggttctggctgtggtggggactgcggaggccagcagtgaacaccccttgggcgtggcagtcaccaaatactgtaaagaggaacttggaacagagaccttgggatactgcacggacttccaggcagtgccaggctgtggaattgggtgcaaagtcagcaacgtggaaggcatcctggcccacagtgagcgccctttgagtgcaccggccagtcacctgaatgaggctggcagccttcccgcagaaaaagatgcagtcccccagaccttctctgtgctgattggaaaccgtgagtggctgaggcgcaacggtttaaccatttctagcgatgtcagtgacgctatgacagaccacgagatgaaaggacagacagccatcctggtggctattgacggtgtgctctgtgggatgatcgcaatcgcagacgctgtcaagcaggaggctgccctggctgtgcacacgctgcagagcatgggtgtggacgtggttctgatcacgggggacaaccggaagacagccagagctattgccacccaggttggcatcaacaaagtctttgcagaggtgctgccttcgcacaaggtggccaaggtccaggagctccagaataaagggaagaaagtcgccatggtgggggatggggtcaatgactccccggccttggcccaggcagacatgggtgtggccattggcaccggcacggatgtggccatcgaggcagccgacgtcgtccttatcagaaatgatttgctggatgtggtggctagcattcacctttccaagaggactgtccgaaggatacgcatcaacctggtcctggcactgatttataacctggttgggatacccattgcagcaggtgtcttcatgcccatcggcattgtgctgcagccctggatgggctcagcggccatggcagcctcctctgtgtctgtggtgctctcatccctgcagctcaagtgctataagaagcctgacctggagaggtatgaggcacaggcgcatggccacatgaagcccctgacggcatcccaggtcagtgtgcacataggcatggatgacaggtggcgggactcccccagggccacaccatgggaccaggtcagctatgtcagccaggtgtcgctgtcctccctgacgtccgacaagccatctcggcacagcgctgcagcagacgatgatggggacaagtggtctctgctcctgaatggcagggatgaggagcagtacatctgatgacttcaggcaggcgggccggggcagggacttgcctccactcaccacaagctgagcaggacagccagcagcaggatgggctgagctagcctccagctttggggacttccgctccctggatatgtccagtcatcctgccctgcagcacgcggccttgtctgggtgcagctgggcttggcctggagaggacggccctgcctgcctcttggcctcacgggaccgtcagcatgggctttgtcttggactctagtccttggctggactgtagaaggtgagaggcgagtcaccctcctcacagacctctgcttggagtatttaggatgactgctgtgaaatggagaacagtttcatcaggaccaaaaaacctcactgggcctttccagagaactgcagacctcactgtcagggtctttctgatgacgcctgtctgtgtgcatcatgtttctgagaccacagtttacctcaggtgtgcctgttgctttcttcctgcatagtctgttcctttcttcgtacatagtctgttccttttctctcctgtgtgcttgtcagtggggacccctcgcaaccctgcctgtcacctgggagggtgggaccaatgtccttgtggtctttgctgctgctctcaggcgcttctccaatgctctggagtgtgcatttcagcttgaacctgcttcctggctcacacatccccagccagggagcttgccacactcttcttcaagttgaggagagttcttttttgcttaaagcccccttctccatggagtgttggcttctcaatagagtgttgttgctgaccagctggagtgagggcctcagagcctgacctgagagtccgtactcggcttcctgtggggtgtaggttctcgcgattcaggacgtccttccatatccctgcccagcctgtggtgcttgaaacgtttgccccatgggaaacgtatgtgtgcaggagcctccctgcacggcccaaggggcttcgttttcagtcttctgactgtcacctcgtggggttcagtagagaattcatgtgactagcgcctggccttgtgtggcttggaggaaatggtactgcccaaataggaggaaaacacagcctccctgagcctgcattctgcacgctgcccaggggcttcagaaaaggagtggccacagcaccccgaagggagcatctgtttacctggcagtggctctcagagcagcagaacgggttcagttttagactctgaagttggttgtgattgacagaaccctttgggagcaaactagtagagttggattaaattctgggtgaaacccttttctcccacacaaaatagttttagtgatttttttcattgtccattacttgccaggggcagttttagcagcacttttgatagattacgtctaatcctcccaaccaaccagcagggtagctattactgtccacattttacaggcaaggaaacaggctccaagaggctgaggactttgcccaggatgacatagccaatggacaagcagtgtctgtcagctgtgaaggcttcactcttattgtccttctaccttgaatagaagttttcctgataagaataaacgaggaaaaggtccttgcctcctggaagaacaaatctaccaggtgatctattcattgtttcaactcagaatgcacttgattcaggaggtcatctgaccttcaccttggatggttagtttcactttttacatatagtttttgcagggttttattttataaaatccaagcgcgctgttgattgtgttttccttgttttcagcccccccactccagcccgcagcacatttccgctgtccgtcagtaattgtgtcctctctttatgcttgcttggggaatgttgttttctgactaggctgatcattatctaaagaatctaattctgttgatttttaaaacttttaggaccataaacgttgtgttcatatatggacatggaaatatttatataattttatagaaaataaccttttagatggtcaaagtgtaaggagtttttttgtcagataatcatttctacttcaaaaacatttcatgcaatattagaataaagttcctgtcattcctcta

SEQ ID NO: 109817 - DNA, 5861 bp, Homo sapiens
  Payload ID: 1561
  Gene Symbol: ATP7B
  Gene Name: ATPase, Cu++ transporting, beta polypeptide
  Uniprot ID: P35670
  ENST ID: ENST00000344297
  CDS Start-End: 3-3779
cgatgcctgagcaggagagacagatcacagccagagaaggggccagtcggaaaatcttatctaagctttctttgcctacccgtgcctgggaaccagcaatgaagaagagttttgcttttgacaatgttggctatgaaggtggtctggatggcctgggcccttcttctcaggtggccaccagcacagtcaggatcttgggcatgacttgccagtcatgtgtgaagtccattgaggacaggatttccaatttgaaaggcatcatcagcatgaaggtttccctggaacaaggcagtgccactgtgaaatatgtgccatcggttgtgtgcctgcaacaggtttgccatcaaattggggacatgggcttcgaggccagcattgcagaaggaaaggcagcctcctggccctcaaggtccttgcctgcccaggaggctgtggtcaagctccgggtggagggcatgacctgccagtcctgtgtcagctccattgaaggcaaggtccggaaactgcaaggagtagtgagagtcaaagtctcactcagcaaccaagaggccgtcatcacttatcagccttatctcattcagcccgaagacctcagggaccatgtaaatgacatgggatttgaagctgccatcaagagcaaagtggctcccttaagcctgggaccaattgatattgagcggttacaaagcactaacccaaagagacctttatcttctgctaaccagaattttaataattctgagaccttggggcaccaaggaagccatgtggtcaccctccaactgagaatagatggaatgcattgtaagtcttgcgtcttgaatattgaagaaaatattggccagctcctaggggttcaaagtattcaagtgtccttggagaacaaaactgcccaagtaaagtatgacccttcttgtaccagcccagtggctctgcagagggctatcgaggcacttccacctgggaattttaaagtttctcttcctgatggagccgaagggagtgggacagatcacaggtcttccagttctcattcccctggctccccaccgagaaaccaggtccagggcacatgcagtaccactctgattgccattgccggcatgacctgtgcatcctgtgtccattccattgaaggcatgatctcccaactggaaggggtgcagcaaatatcggtgtctttggccgaagggactgcaacagttctttataatccctctgtaattagcccagaagaactcagagctgctatagaagacatgggatttgaggcttcagtcgtttctgaaagctgttctactaaccctcttggaaaccacagtgctgggaattccatggtgcaaactacagatggtacacctacatctgtgcaggaagtggctccccacactgggaggctccctgcaaaccatgccccggacatcttggcaaagtccccacaatcaaccagagcagtggcaccgcagaagtgcttcttacagatcaaaggcatgacctgtgcatcctgtgtgtctaacatagaaaggaatctgcagaaagaagctggtgttctctccgtgttggttgccttgatggcaggaaaggcagagatcaagtatgacccagaggtcatccagcccctcgagatagctcagttcatccaggacctgggttttgaggcagcagtcatggaggactacgcaggctccgatggcaacattgagctgacaatcacagggatgacctgcgcgtcctgtgtccacaacatagagtccaaactcacgaggacaaatggcatcacttatgcctccgttgcccttgccaccagcaaagcccttgttaagtttgacccggaaattatcggtccacgggatattatcaaaattattgagagcaaaacctcagaagccctggctaaactcatgtctctccaagccacagaagccaccgttgtgacccttggtgaggacaatttaatcatcagggaggagcaagtccccatggagctggtgcagcggggcgatatcgtcaaggtggtccctgggggaaagtttccagtggatgggaaagtcctggaaggcaataccatggctgatgagtccctcatcacaggagaagccatgccagtcactaagaaacccggaagcactgtaattgcggggtctataaatgcacatggctctgtgctcattaaagctacccacgtgggcaatgacaccactttggctcagattgtgaaactggtggaagaggctcagatgtcaaagaaccccaacaagcacatctcccagacagaggtgatcatccggtttgctttccagacgtccatcacggtgctgtgcattgcctgcccctgctccctggggctggccacgcccacggctgtcatggtgggcaccggggtggccgcgcagaacggcatcctcatcaagggaggcaagcccctggagatggcgcacaagataaagactgtgatgtttgacaagactggcaccattacccatggcgtccccagggtcatgcgggtgctcctgctgggggatgtggccacactgcccctcaggaaggttctggctgtggtggggactgcggaggccagcagtgaacaccccttgggcgtggcagtcaccaaatactgtaaagaggaacttggaacagagaccttgggatactgcacggacttccaggcagtgccaggctgtggaattgggtgcaaagtcagcaacgtggaaggcatcctggcccacagtgagcgccctttgagtgcaccggccagtcacctgaatgaggctggcagccttcccgcagaaaaagatgcagtcccccagaccttctctgtgctgattggaaaccgtgagtggctgaggcgcaacggtttaaccatttctagcgatgtcagtgacgctatgacagaccacgagatgaaaggacagacagccatcctggtggctattgacggtgtgctctgtgggatgatcgcaatcgcagacgctgtcaagcaggaggctgccctggctgtgcacacgctgcagagcatgggtgtggacgtggttctgatcacgggggacaaccggaagacagccagagctattgccacccaggttggcatcaacaaagtctttgcagaggtgctgccttcgcacaaggtggccaaggtccaggagctccagaataaagggaagaaagtcgccatggtgggggatggggtcaatgactccccggccttggcccaggcagacatgggtgtggccattggcaccggcacggatgtggccatcgaggcagccgacgtcgtccttatcagaaatgatttgctggatgtggtggctagcattcacctttccaagaggactgtccgaaggatacgcatcaacctggtcctggcactgatttataacctggttgggatacccattgcagcaggtgtcttcatgcccatcggcattgtgctgcagccctggatgggctcagcggccatggcagcctcctctgtgtctgtggtgctctcatccctgcagctcaagtgctataagaagcctgacctggagaggtatgaggcacaggcgcatggccacatgaagcccctgacggcatcccaggtcagtgtgcacataggcatggatgacaggtggcgggactcccccagggccacaccatgggaccaggtcagctatgtcagccaggtgtcgctgtcctccctgacgtccgacaagccatctcggcacagcgctgcagcagacgatgatggggacaagtggtctctgctcctgaatggcagggatgaggagcagtacatctgatgacttcaggcaggcgggccggggcagggacttgcctccactcaccacaagctgagcaggacagccagcagcaggatgggctgagctagcctccagctttggggacttccgctccctggatatgtccagtcatcctgccctgcagcacgcggccttgtctgggtgcagctgggcttggcctggagaggacggccctgcctgcctcttggcctcacgggaccgtcagcatgggctttgtcttggactctagtccttggctggactgtagaaggtgagaggcgagtcaccctcctcacagacctctgcttggagtatttaggatgactgctgtgaaatggagaacagtttcatcaggaccaaaaaacctcactgggcctttccagagaactgcagacctcactgtcagggtctttctgatgacgcctgtctgtgtgcatcatgtttctgagaccacagtttacctcaggtgtgcctgttgctttcttcctgcatagtctgttcctttcttcgtacatagtctgttccttttctctcctgtgtgcttgtcagtggggacccctcgcaaccctgcctgtcacctgggagggtgggaccaatgtccttgtggtctttgctgctgctctcaggcgcttctccaatgctctggagtgtgcatttcagcttgaacctgcttcctggctcacacatccccagccagggagcttgccacactcttcttcaagttgaggagagttcttttttgcttaaagcccccttctccatggagtgttggcttctcaatagagtgttgttgctgaccagctggagtgagggcctcagagcctgacctgagagtccgtactcggcttcctgtggggtgtaggttctcgcgattcaggacgtccttccatatccctgcccagcctgtggtgcttgaaacgtttgccccatgggaaacgtatgtgtgcaggagcctccctgcacggcccaaggggcttcgttttcagtcttctgactgtcacctcgtggggttcagtagagaattcatgtgactagcgcctggccttgtgtggcttggaggaaatggtactgcccaaataggaggaaaacacagcctccctgagcctgcattctgcacgctgcccaggggcttcagaaaaggagtggccacagcaccccgaagggagcatctgtttacctggcagtggctctcagagcagcagaacgggttcagttttagactctgaagttggttgtgattgacagaaccctttgggagcaaactagtagagttggattaaattctgggtgaaacccttttctcccacacaaaatagttttagtgatttttttcattgtccattacttgccaggggcagttttagcagcacttttgatagattacgtctaatcctcccaaccaaccagcagggtagctattactgtccacattttacaggcaaggaaacaggctccaagaggctgaggactttgcccaggatgacatagccaatggacaagcagtgtctgtcagctgtgaaggcttcactcttattgtccttctaccttgaatagaagttttcctgataagaataaacgaggaaaaggtccttgcctcctggaagaacaaatctaccaggtgatctattcattgtttcaactcagaatgcacttgattcaggaggtcatctgaccttcaccttggatggttagtttcactttttacatatagtttttgcagggttttattttataaaatccaagcgcgctgttgattgtgttttccttgttttcagcccccccactccagcccgcagcacatttccgctgtccgtcagtaattgtgtcctctctttatgcttgcttggggaatgttgttttctgactaggctgatcattatctaaagaatctaattctgttgatttttaaaacttttaggaccataaacgttgtgttcatatatggacatggaaatatttatataattttatagaaaataaccttttagatggtcaaagtgtaaggagtttttttgtcagataatcatttctacttcaaaaacatttcatgcaatattagaataaagttcctgtcattcctct

SEQ ID NO: 109818 - DNA, 6304 bp, Homo sapiens
  Payload ID: 1561
  Gene Symbol: ATP7B
  Gene Name: ATPase, Cu++ transporting, beta polypeptide
  Uniprot ID: P35670
  ENST ID: ENST00000400366
  CDS Start-End: 158-4222
ttcccggacccctgtttgctttagagccgagccgcgccgatgccctcacactctgcgcctcctctcccgggactttaacaccccgctctcctccaccgaccaggtgaccttttgctctgagccagatcagagaagaattcggtgtccgtgcgggacgatgcctgagcaggagagacagatcacagccagagaaggggccagtcggaaaatcttatctaagctttctttgcctacccgtgcctgggaaccagcaatgaagaagagttttgcttttgacaatgttggctatgaaggtggtctggatggcctgggcccttcttctcaggtggccaccagcacagtcaggatcttgggcatgacttgccagtcatgtgtgaagtccattgaggacaggatttccaatttgaaaggcatcatcagcatgaaggtttccctggaacaaggcagtgccactgtgaaatatgtgccatcggttgtgtgcctgcaacaggtttgccatcaaattggggacatgggcttcgaggccagcattgcagaaggaaaggcagcctcctggccctcaaggtccttgcctgcccaggaggctgtggtcaagctccgggtggagggcatgacctgccagtcctgtgtcagctccattgaaggcaaggtccggaaactgcaaggagtagtgagagtcaaagtctcactcagcaaccaagaggccgtcatcacttatcagccttatctcattcagcccgaagacctcagggaccatgtaaatgacatgggatttgaagctgccatcaagagcaaagtggctcccttaagcctgggaccaattgatattgagcggttacaaagcactaacccaaagagacctttatcttctgctaaccagaattttaataattctgagaccttggggcaccaaggaagccatgtggtcaccctccaactgagaatagatggaatgcattgcatgatctcccaactggaaggggtgcagcaaatatcggtgtctttggccgaagggactgcaacagttctttataatccctctgtaattagcccagaagaactcagagctgctatagaagacatgggatttgaggcttcagtcgtttctgaaagctgttctactaaccctcttggaaaccacagtgctgggaattccatggtgcaaactacagatggtacacctacatctgtgcaggaagtggctccccacactgggaggctccctgcaaaccatgccccggacatcttggcaaagtccccacaatcaaccagagcagtggcaccgcagaagtgcttcttacagatcaaaggcatgacctgtgcatcctgtgtgtctaacatagaaaggaatctgcagaaagaagctggtgttctctccgtgttggttgccttgatggcaggaaaggcagagatcaagtatgacccagaggtcatccagcccctcgagatagctcagttcatccaggacctgggttttgaggcagcagtcatggaggactacgcaggctccgatggcaacattgagctgacaatcacagggatgacctgcgcgtcctgtgtccacaacatagagtccaaactcacgaggacaaatggcatcacttatgcctccgttgcccttgccaccagcaaagcccttgttaagtttgacccggaaattatcggtccacgggatattatcaaaattattgaggaaattggctttcatgcttccctggcccagagaaaccccaacgctcatcacttggaccacaagatggaaataaagcagtggaagaagtctttcctgtgcagcctggtgtttggcatccctgtcatggccttaatgatctatatgctgatacccagcaacgagccccaccagtccatggtcctggaccacaacatcattccaggactgtccattctaaatctcatcttctttatcttgtgtacctttgtccagctcctcggtgggtggtacttctacgttcaggcctacaaatctctgagacacaggtcagccaacatggacgtgctcatcgtcctggccacaagcattgcttatgtttattctctggtcatcctggtggttgctgtggctgagaaggcggagaggagccctgtgacattcttcgacacgccccccatgctctttgtgttcattgccctgggccggtggctggaacacttggcaaagagcaaaacctcagaagccctggctaaactcatgtctctccaagccacagaagccaccgttgtgacccttggtgaggacaatttaatcatcagggaggagcaagtccccatggagctggtgcagcggggcgatatcgtcaaggtggtccctgggggaaagtttccagtggatgggaaagtcctggaaggcaataccatggctgatgagtccctcatcacaggagaagccatgccagtcactaagaaacccggaagcactgtaattgcggggtctataaatgcacatggctctgtgctcattaaagctacccacgtgggcaatgacaccactttggctcagattgtgaaactggtggaagaggctcagatgtcaaaggcacccattcagcagctggctgaccggtttagtggatattttgtcccatttatcatcatcatgtcaactttgacgttggtggtatggattgtaatcggttttatcgattttggtgttgttcagagatactttcctaaccccaacaagcacatctcccagacagaggtgatcatccggtttgctttccagacgtccatcacggtgctgtgcattgcctgcccctgctccctggggctggccacgcccacggctgtcatggtgggcaccggggtggccgcgcagaacggcatcctcatcaagggaggcaagcccctggagatggcgcacaagataaagactgtgatgtttgacaagactggcaccattacccatggcgtccccagggtcatgcgggtgctcctgctgggggatgtggccacactgcccctcaggaaggttctggctgtggtggggactgcggaggccagcagtgaacaccccttgggcgtggcagtcaccaaatactgtaaagaggaacttggaacagagaccttgggatactgcacggacttccaggcagtgccaggctgtggaattgggtgcaaagtcagcaacgtggaaggcatcctggcccacagtgagcgccctttgagtgcaccggccagtcacctgaatgaggctggcagccttcccgcagaaaaagatgcagtcccccagaccttctctgtgctgattggaaaccgtgagtggctgaggcgcaacggtttaaccatttctagcgatgtcagtgacgctatgacagaccacgagatgaaaggacagacagccatcctggtggctattgacggtgtgctctgtgggatgatcgcaatcgcagacgctgtcaagcaggaggctgccctggctgtgcacacgctgcagagcatgggtgtggacgtggttctgatcacgggggacaaccggaagacagccagagctattgccacccaggttggcatcaacaaagtctttgcagaggtgctgccttcgcacaaggtggccaaggtccaggagctccagaataaagggaagaaagtcgccatggtgggggatggggtcaatgactccccggccttggcccaggcagacatgggtgtggccattggcaccggcacggatgtggccatcgaggcagccgacgtcgtccttatcagaaatgatttgctggatgtggtggctagcattcacctttccaagaggactgtccgaaggatacgcatcaacctggtcctggcactgatttataacctggttgggatacccattgcagcaggtgtcttcatgcccatcggcattgtgctgcagccctggatgggctcagcggccatggcagcctcctctgtgtctgtggtgctctcatccctgcagctcaagtgctataagaagcctgacctggagaggtatgaggcacaggcgcatggccacatgaagcccctgacggcatcccaggtcagtgtgcacataggcatggatgacaggtggcgggactcccccagggccacaccatgggaccaggtcagctatgtcagccaggtgtcgctgtcctccctgacgtccgacaagccatctcggcacagcgctgcagcagacgatgatggggacaagtggtctctgctcctgaatggcagggatgaggagcagtacatctgatgacttcaggcaggcgggccggggcagggacttgcctccactcaccacaagctgagcaggacagccagcagcaggatgggctgagctagcctccagctttggggacttccgctccctggatatgtccagtcatcctgccctgcagcacgcggccttgtctgggtgcagctgggcttggcctggagaggacggccctgcctgcctcttggcctcacgggaccgtcagcatgggctttgtcttggactctagtccttggctggactgtagaaggtgagaggcgagtcaccctcctcacagacctctgcttggagtatttaggatgactgctgtgaaatggagaacagtttcatcaggaccaaaaaacctcactgggcctttccagagaactgcagacctcactgtcagggtctttctgatgacgcctgtctgtgtgcatcatgtttctgagaccacagtttacctcaggtgtgcctgttgctttcttcctgcatagtctgttcctttcttcgtacatagtctgttccttttctctcctgtgtgcttgtcagtggggacccctcgcaaccctgcctgtcacctgggagggtgggaccaatgtccttgtggtctttgctgctgctctcaggcgcttctccaatgctctggagtgtgcatttcagcttgaacctgcttcctggctcacacatccccagccagggagcttgccacactcttcttcaagttgaggagagttcttttttgcttaaagcccccttctccatggagtgttggcttctcaatagagtgttgttgctgaccagctggagtgagggcctcagagcctgacctgagagtccgtactcggcttcctgtggggtgtaggttctcgcgattcaggacgtccttccatatccctgcccagcctgtggtgcttgaaacgtttgccccatgggaaacgtatgtgtgcaggagcctccctgcacggcccaaggggcttcgttttcagtcttctgactgtcacctcgtggggttcagtagagaattcatgtgactagcgcctggccttgtgtggcttggaggaaatggtactgcccaaataggaggaaaacacagcctccctgagcctgcattctgcacgctgcccaggggcttcagaaaaggagtggccacagcaccccgaagggagcatctgtttacctggcagtggctctcagagcagcagaacgggttcagttttagactctgaagttggttgtgattgacagaaccctttgggagcaaactagtagagttggattaaattctgggtgaaacccttttctcccacacaaaatagttttagtgatttttttcattgtccattacttgccaggggcagttttagcagcacttttgatagattacgtctaatcctcccaaccaaccagcagggtagctattactgtccacattttacaggcaaggaaacaggctccaagaggctgaggactttgcccaggatgacatagccaatggacaagcagtgtctgtcagctgtgaaggcttcactcttattgtccttctaccttgaatagaagttttcctgataagaataaacgaggaaaaggtccttgcctcctggaagaacaaatctaccaggtgatctattcattgtttcaactcagaatgcacttgattcaggaggtcatctgaccttcaccttggatggttagtttcactttttacatatagtttttgcagggttttattttataaaatccaagcgcgctgttgattgtgttttccttgttttcagcccccccactccagcccgcagcacatttccgctgtccgtcagtaattgtgtcctctctttatgcttgcttggggaatgttgttttctgactaggctgatcattatctaaagaatctaattctgttgatttttaaaacttttaggaccataaacgttgtgttcatatatggacatggaaatatttatataattttatagaaaataaccttttagatggtcaaagtgtaaggagtttttttgtcagataatcatttctacttcaaaaacatttcatgcaatattagaataaagttcctgtcattcctct

SEQ ID NO: 109819 - DNA, 3252 bp, Homo sapiens
  Payload ID: 1561
  Gene Symbol: ATP7B
  Gene Name: ATPase, Cu++ transporting, beta polypeptide
  ENST ID: ENST00000400370
  CDS Start-End: 75-3182
cgctctcctccaccgaccaggtgaccttttgctctgagccagatcagagaagaattcggtgtccgtgcgggacgatgcctgagcaggagagacagatcacagccagagaaggggccagtcggaaaatcttatctaagctttctttgcctacccgtgcctgggaaccagcaatgaagaagagttttgcttttgacaatgttggctatgaaggtggtctggatggcctgggcccttcttctcaggtggccaccagcacagtcaggatcttgggcatgacttgccagtcatgtgtgaagtccattgaggacaggatttccaatttgaaaggcatcatcagcatgaaggtttccctggaacaaggcagtgccactgtgaaatatgtgccatcggttgtgtgcctgcaacaggtttgccatcaaattggggacatgggcttcgaggccagcattgcagaaggaaaggcagcctcctggccctcaaggtccttgcctgcccaggaggctgtggtcaagctccgggtggagggcatgacctgccagtcctgtgtcagctccattgaaggcaaggtccggaaactgcaaggagtagtgagagtcaaagtctcactcagcaaccaagaggccgtcatcacttatcagccttatctcattcagcccgaagacctcagggaccatgtaaatgacatgggatttgaagctgccatcaagagcaaagtggctcccttaagcctgggaccaattgatattgagcggttacaaagcactaacccaaagagacctttatcttctgctaaccagaattttaataattctgagaccttggggcaccaaggaagccatgtggtcaccctccaactgagaatagatggaatgcattgtaagtcttgcgtcttgaatattgaagaaaatattggccagctcctaggggttcaaagtattcaagtgtccttggagaacaaaactgcccaagtaaagtatgacccttcttgtaccagcccagtggctctgcagagggctatcgaggcacttccacctgggaattttaaagtttctcttcctgatggagccgaagggagtgggacagatcacaggtcttccagttctcattcccctggctccccaccgagaaaccaggtccagggcacatgcagtaccactctgattgccattgccggcatgacctgtgcatcctgtgtccattccattgaaggcatgatctcccaactggaaggggtgcagcaaatatcggtgtctttggccgaagggactgcaacagttctttataatccctctgtaattagcccagaagaactcagagctgctatagaagacatgggatttgaggcttcagtcgtttctggagaagccatgccagtcactaagaaacccggaagcactgtaattgcggggtctataaatgcacatggctctgtgctcattaaagctacccacgtgggcaatgacaccactttggctcagattgtgaaactggtggaagaggctcagatgtcaaaggcacccattcagcagctggctgaccggtttagtggatattttgtcccatttatcatcatcatgtcaactttgacgttggtggtatggattgtaatcggttttatcgattttggtgttgttcagagatactttcctaaccccaacaagcacatctcccagacagaggtgatcatccggtttgctttccagacgtccatcacggtgctgtgcattgcctgcccctgctccctggggctggccacgcccacggctgtcatggtgggcaccggggtggccgcgcagaacggcatcctcatcaagggaggcaagcccctggagatggcgcacaagataaagactgtgatgtttgacaagactggcaccattacccatggcgtccccagggtcatgcgggtgctcctgctgggggatgtggccacactgcccctcaggaaggttctggctgtggtggggactgcggaggccagcagtgaacaccccttgggcgtggcagtcaccaaatactgtaaagaggaacttggaacagagaccttgggatactgcacggacttccaggcagtgccaggctgtggaattgggtgcaaagtcagcaacgtggaaggcatcctggcccacagtgagcgccctttgagtgcaccggccagtcacctgaatgaggctggcagccttcccgcagaaaaagatgcagtcccccagaccttctctgtgctgattggaaaccgtgagtggctgaggcgcaacggtttaaccatttctagcgatgtcagtgacgctatgacagaccacgagatgaaaggacagacagccatcctggtggctattgacggtgtgctctgtgggatgatcgcaatcgcagacgctgtcaagcaggaggctgccctggctgtgcacacgctgcagagcatgggtgtggacgtggttctgatcacgggggacaaccggaagacagccagagctattgccacccaggttggcatcaacaaagtctttgcagaggtgctgccttcgcacaaggtggccaaggtccaggagctccagaataaagggaagaaagtcgccatggtgggggatggggtcaatgactccccggccttggcccaggcagacatgggtgtggccattggcaccggcacggatgtggccatcgaggcagccgacgtcgtccttatcagaaatgatttgctggatgtggtggctagcattcacctttccaagaggactgtccgaaggatacgcatcaacctggtcctggcactgatttataacctggttgggatacccattgcagcaggtgtcttcatgcccatcggcattgtgctgcagccctggatgggctcagcggccatggcagcctcctctgtgtctgtggtgctctcatccctgcagctcaagtgctataagaagcctgacctggagaggtatgaggcacaggcgcatggccacatgaagcccctgacggcatcccaggtcagtgtgcacataggcatggatgacaggtggcgggactcccccagggccacaccatgggaccaggtcagctatgtcagccaggtgtcgctgtcctccctgacgtccgacaagccatctcggcacagcgctgcagcagacgatgatggggacaagtggtctctgctcctgaatggcagggatgaggagcagtacatctgatgacttcaggcaggcgggccggggcagggacttgcctccactcaccacaagctgagcaggacagccagca

SEQ ID NO: 109820 - DNA, 4340 bp, Homo sapiens
  Payload ID: 1561
  Gene Symbol: ATP7B
  Gene Name: ATPase, Cu++ transporting, beta polypeptide
  ENST ID: ENST00000418097
  CDS Start-End: 75-4277
cgctctcctccaccgaccaggtgaccttttgctctgagccagatcagagaagaattcggtgtccgtgcgggacgatgcctgagcaggagagacagatcacagccagagaaggggccagtcggaaaatcttatctaagctttctttgcctacccgtgcctgggaaccagcaatgaagaagagttttgcttttgacaatgttggctatgaaggtggtctggatggcctgggcccttcttctcaggtggccaccagcacagtcaggatcttgggcatgacttgccagtcatgtgtgaagtccattgaggacaggatttccaatttgaaaggcatcatcagcatgaaggtttccctggaacaaggcagtgccactgtgaaatatgtgccatcggttgtgtgcctgcaacaggtttgccatcaaattggggacatgggcttcgaggccagcattgcagaaggaaaggcagcctcctggccctcaaggtccttgcctgcccaggaggctgtggtcaagctccgggtggagggcatgacctgccagtcctgtgtcagctccattgaaggcaaggtccggaaactgcaaggagtagtgagagtcaaagtctcactcagcaaccaagaggccgtcatcacttatcagccttatctcattcagcccgaagacctcagggaccatgtaaatgacatgggatttgaagctgccatcaagagcaaagtggctcccttaagcctgggaccaattgatattgagcggttacaaagcactaacccaaagagacctttatcttctgctaaccagaattttaataattctgagaccttggggcaccaaggaagccatgtggtcaccctccaactgagaatagatggaatgcattgtaagtcttgcgtcttgaatattgaagaaaatattggccagctcctaggggttcaaagtattcaagtgtccttggagaacaaaactgcccaagtaaagtatgacccttcttgtaccagcccagtggctctgcagagggctatcgaggcacttccacctgggaattttaaagtttctcttcctgatggagccgaagggagtgggacagatcacaggtcttccagttctcattcccctggctccccaccgagaaaccaggtccagggcacatgcagtaccactctgattgccattgccggcatgacctgtgcatcctgtgtccattccattgaaggcatgatctcccaactggaaggggtgcagcaaatatcggtgtctttggccgaagggactgcaacagttctttataatccctctgtaattagcccagaagaactcagagctgctatagaagacatgggatttgaggcttcagtcgtttctgaaagctgttctactaaccctcttggaaaccacagtgctgggaattccatggtgcaaactacagatggtacacctacatctgtgcaggaagtggctccccacactgggaggctccctgcaaaccatgccccggacatcttggcaaagtccccacaatcaaccagagcagtggcaccgcagaagtgcttcttacagatcaaaggcatgacctgtgcatcctgtgtgtctaacatagaaaggaatctgcagaaagaagctggtgttctctccgtgttggttgccttgatggcaggaaaggcagagatcaagtatgacccagaggtcatccagcccctcgagatagctcagttcatccaggacctgggttttgaggcagcagtcatggaggactacgcaggctccgatggcaacattgagctgacaatcacagggatgacctgcgcgtcctgtgtccacaacatagagtccaaactcacgaggacaaatggcatcacttatgcctccgttgcccttgccaccagcaaagcccttgttaagtttgacccggaaattatcggtccacgggatattatcaaaattattgaggaaattggctttcatgcttccctggcccagagaaaccccaacgctcatcacttggaccacaagatggaaataaagcagtggaagaagtctttcctgtgcagcctggtgtttggcatccctgtcatggccttaatgatctatatgctgatacccagcaacgagccccaccagtccatggtcctggaccacaacatcattccaggactgtccattctaaatctcatcttctttatcttgtgtacctttgtccagctcctcggtgggtggtacttctacgttcaggcctacaaatctctgagacacaggtcagccaacatggacgtgctcatcgtcctggccacaagcattgcttatgtttattctctggtcatcctggtggttgctgtggctgagaaggcggagaggagccctgtgacattcttcgacacgccccccatgctctttgtgttcattgccctgggccggtggctggaacacttggcaaagagcaaaacctcagaagccctggctaaactcatgtctctccaagccacagaagccaccgttgtgacccttggtgaggacaatttaatcatcagggaggagcaagtccccatggagctggtgcagcggggcgatatcgtcaaggtggtccctgggggaaagtttccagtggatgggaaagtcctggaaggcaataccatggctgatgagtccctcatcacaggagaagccatgccagtcactaagaaacccggaagcactgtaattgcggggtctataaatgcacatggctctgtgctcattaaagctacccacgtgggcaatgacaccactttggctcagattgtgaaactggtggaagaggctcagatgtcaaaggcacccattcagcagctggctgaccggtttagtggatattttgtcccatttatcatcatcatgtcaactttgacgttggtggtatggattgtaatcggttttatcgattttggtgttgttcagagatactttcctataaagactgtgatgtttgacaagactggcaccattacccatggcgtccccagggtcatgcgggtgctcctgctgggggatgtggccacactgcccctcaggaaggttctggctgtggtggggactgcggaggccagcagtgaacaccccttgggcgtggcagtcaccaaatactgtaaagaggaacttggaacagagaccttgggatactgcacggacttccaggcagtgccaggctgtggaattgggtgcaaagtcagcaacgtggaaggcatcctggcccacagtgagcgccctttgagtgcaccggccagtcacctgaatgaggctggcagccttcccgcagaaaaagatgcagtcccccagaccttctctgtgctgattggaaaccgtgagtggctgaggcgcaacggtttaaccatttctagcgatgtcagtgacgctatgacagaccacgagatgaaaggacagacagccatcctggtggctattgacggtgtgctctgtgggatgatcgcaatcgcagacgctgtcaagcaggaggctgccctggctgtgcacacgctgcagagcatgggtgtggacgtggttctgatcacgggggacaaccggaagacagccagagctattgccacccaggttggcatcaacaaagtctttgcagaggtgctgccttcgcacaaggtggccaaggtccaggagctccagaataaagggaagaaagtcgccatggtgggggatggggtcaatgactccccggccttggcccaggcagacatgggtgtggccattggcaccggcacggatgtggccatcgaggcagccgacgtcgtccttatcagaaatgatttgctggatgtggtggctagcattcacctttccaagaggactgtccgaaggatacgcatcaacctggtcctggcactgatttataacctggttgggatacccattgcagcaggtgtcttcatgcccatcggcattgtgctgcagccctggatgggctcagcggccatggcagcctcctctgtgtctgtggtgctctcatccctgcagctcaagtgctataagaagcctgacctggagaggtatgaggcacaggcgcatggccacatgaagcccctgacggcatcccaggtcagtgtgcacataggcatggatgacaggtggcgggactcccccagggccacaccatgggaccaggtcagctatgtcagccaggtgtcgctgtcctccctgacgtccgacaagccatctcggcacagcgctgcagcagacgatgatggggacaagtggtctctgctcctgaatggcagggatgaggagcagtacatctgatgacttcaggcaggcgggccggggcagggacttgcctccactcaccacaagctgagcaggaca

SEQ ID NO: 109821 - DNA, 6404 bp, Homo sapiens
  Payload ID: 1561
  Gene Symbol: ATP7B
  Gene Name: ATPase, Cu++ transporting, beta polypeptide
  ENST ID: ENST00000448424
  CDS Start-End: 158-4321
ttcccggacccctgtttgctttagagccgagccgcgccgatgccctcacactctgcgcctcctctcccgggactttaacaccccgctctcctccaccgaccaggtgaccttttgctctgagccagatcagagaagaattcggtgtccgtgcgggacgatgcctgagcaggagagacagatcacagccagagaaggggccagtcggaaaatcttatctaagctttctttgcctacccgtgcctgggaaccagcaatgaagaagagttttgcttttgacaatgttggctatgaaggtggtctggatggcctgggcccttcttctcaggtggccaccagcacagtcaggatcttgggcatgacttgccagtcatgtgtgaagtccattgaggacaggatttccaatttgaaaggcatcatcagcatgaaggtttccctggaacaaggcagtgccactgtgaaatatgtgccatcggttgtgtgcctgcaacaggtttgccatcaaattggggacatgggcttcgaggccagcattgcagaaggaaaggcagcctcctggccctcaaggtccttgcctgcccaggaggctgtggtcaagctccgggtggagggcatgacctgccagtcctgtgtcagctccattgaaggcaaggtccggaaactgcaaggagtagtgagagtcaaagtctcactcagcaaccaagaggccgtcatcacttatcagccttatctcattcagcccgaagacctcagggaccatgtaaatgacatgggatttgaagctgccatcaagagcaaagtggctcccttaagcctgggaccaattgatattgagcggttacaaagcactaacccaaagagacctttatcttctgctaaccagaattttaataattctgagaccttggggcaccaaggaagccatgtggtcaccctccaactgagaatagatggaatgcattgtaagtcttgcgtcttgaatattgaagaaaatattggccagctcctaggggttcaaagtattcaagtgtccttggagaacaaaactgcccaagtaaagtatgacccttcttgtaccagcccagtggctctgcagagggctatcgaggcacttccacctgggaattttaaagtttctcttcctgatggagccgaagggagtgggacagatcacaggtcttccagttctcattcccctggctccccaccgagaaaccaggtccagggcacatgcagtaccactctgattgccattgccggcatgacctgtgcatcctgtgtccattccattgaaggcatgatctcccaactggaaggggtgcagcaaatatcggtgtctttggccgaagggactgcaacagttctttataatccctctgtaattagcccagaagaactcagagctgctatagaagacatgggatttgaggcttcagtcgtttctgaaagctgttctactaaccctcttggaaaccacagtgctgggaattccatggtgcaaactacagatggtacacctacatctgtgcaggaagtggctccccacactgggaggctccctgcaaaccatgccccggacatcttggcaaagtccccacaatcaaccagagcagtggcaccgcagaagtgcttcttacagatcaaaggcatgacctgtgcatcctgtgtgtctaacatagaaaggaatctgcagaaagaagctggtgttctctccgtgttggttgccttgatggcaggaaaggcagagatcaagtatgacccagaggtcatccagcccctcgagatagctcagttcatccaggacctgggttttgaggcagcagtcatggaggactacgcaggctccgatggcaacattgagctgacaatcacagggatgacctgcgcgtcctgtgtccacaacatagagtccaaactcacgaggacaaatggcatcacttatgcctccgttgcccttgccaccagcaaagcccttgttaagtttgacccggaaattatcggtccacgggatattatcaaaattattgaggaaattggctttcatgcttccctggcccagagaaaccccaacgctcatcacttggaccacaagatggaaataaagcagtggaagaagtctttcctgtgcagcctggtgtttggcatccctgtcatggccttaatgatctatatgctgatacccagcaacgagccccaccagtccatggtcctggaccacaacatcattccaggactgtccattctaaatctcatcttctttatcttgtgtacctttgtccagagcaaaacctcagaagccctggctaaactcatgtctctccaagccacagaagccaccgttgtgacccttggtgaggacaatttaatcatcagggaggagcaagtccccatggagctggtgcagcggggcgatatcgtcaaggtggtccctgggggaaagtttccagtggatgggaaagtcctggaaggcaataccatggctgatgagtccctcatcacaggagaagccatgccagtcactaagaaacccggaagcactgtaattgcggggtctataaatgcacatggctctgtgctcattaaagctacccacgtgggcaatgacaccactttggctcagattgtgaaactggtggaagaggctcagatgtcaaaggcacccattcagcagctggctgaccggtttagtggatattttgtcccatttatcatcatcatgtcaactttgacgttggtggtatggattgtaatcggttttatcgattttggtgttgttcagagatactttcctaaccccaacaagcacatctcccagacagaggtgatcatccggtttgctttccagacgtccatcacggtgctgtgcattgcctgcccctgctccctggggctggccacgcccacggctgtcatggtgggcaccggggtggccgcgcagaacggcatcctcatcaagggaggcaagcccctggagatggcgcacaagataaagactgtgatgtttgacaagactggcaccattacccatggcgtccccagggtcatgcgggtgctcctgctgggggatgtggccacactgcccctcaggaaggttctggctgtggtggggactgcggaggccagcagtgaacaccccttgggcgtggcagtcaccaaatactgtaaagaggaacttggaacagagaccttgggatactgcacggacttccaggcagtgccaggctgtggaattgggtgcaaagtcagcaacgtggaaggcatcctggcccacagtgagcgccctttgagtgcaccggccagtcacctgaatgaggctggcagccttcccgcagaaaaagatgcagtcccccagaccttctctgtgctgattggaaaccgtgagtggctgaggcgcaacggtttaaccatttctagcgatgtcagtgacgctatgacagaccacgagatgaaaggacagacagccatcctggtggctattgacggtgtgctctgtgggatgatcgcaatcgcagacgctgtcaagcaggaggctgccctggctgtgcacacgctgcagagcatgggtgtggacgtggttctgatcacgggggacaaccggaagacagccagagctattgccacccaggttggcatcaacaaagtctttgcagaggtgctgccttcgcacaaggtggccaaggtccaggagctccagaataaagggaagaaagtcgccatggtgggggatggggtcaatgactccccggccttggcccaggcagacatgggtgtggccattggcaccggcacggatgtggccatcgaggcagccgacgtcgtccttatcagaaatgatttgctggatgtggtggctagcattcacctttccaagaggactgtccgaaggatacgcatcaacctggtcctggcactgatttataacctggttgggatacccattgcagcaggtgtcttcatgcccatcggcattgtgctgcagccctggatgggctcagcggccatggcagcctcctctgtgtctgtggtgctctcatccctgcagctcaagtgctataagaagcctgacctggagaggtatgaggcacaggcgcatggccacatgaagcccctgacggcatcccaggtcagtgtgcacataggcatggatgacaggtggcgggactcccccagggccacaccatgggaccaggtcagctatgtcagccaggtgtcgctgtcctccctgacgtccgacaagccatctcggcacagcgctgcagcagacgatgatggggacaagtggtctctgctcctgaatggcagggatgaggagcagtacatctgatgacttcaggcaggcgggccggggcagggacttgcctccactcaccacaagctgagcaggacagccagcagcaggatgggctgagctagcctccagctttggggacttccgctccctggatatgtccagtcatcctgccctgcagcacgcggccttgtctgggtgcagctgggcttggcctggagaggacggccctgcctgcctcttggcctcacgggaccgtcagcatgggctttgtcttggactctagtccttggctggactgtagaaggtgagaggcgagtcaccctcctcacagacctctgcttggagtatttaggatgactgctgtgaaatggagaacagtttcatcaggaccaaaaaacctcactgggcctttccagagaactgcagacctcactgtcagggtctttctgatgacgcctgtctgtgtgcatcatgtttctgagaccacagtttacctcaggtgtgcctgttgctttcttcctgcatagtctgttcctttcttcgtacatagtctgttccttttctctcctgtgtgcttgtcagtggggacccctcgcaaccctgcctgtcacctgggagggtgggaccaatgtccttgtggtctttgctgctgctctcaggcgcttctccaatgctctggagtgtgcatttcagcttgaacctgcttcctggctcacacatccccagccagggagcttgccacactcttcttcaagttgaggagagttcttttttgcttaaagcccccttctccatggagtgttggcttctcaatagagtgttgttgctgaccagctggagtgagggcctcagagcctgacctgagagtccgtactcggcttcctgtggggtgtaggttctcgcgattcaggacgtccttccatatccctgcccagcctgtggtgcttgaaacgtttgccccatgggaaacgtatgtgtgcaggagcctccctgcacggcccaaggggcttcgttttcagtcttctgactgtcacctcgtggggttcagtagagaattcatgtgactagcgcctggccttgtgtggcttggaggaaatggtactgcccaaataggaggaaaacacagcctccctgagcctgcattctgcacgctgcccaggggcttcagaaaaggagtggccacagcaccccgaagggagcatctgtttacctggcagtggctctcagagcagcagaacgggttcagttttagactctgaagttggttgtgattgacagaaccctttgggagcaaactagtagagttggattaaattctgggtgaaacccttttctcccacacaaaatagttttagtgatttttttcattgtccattacttgccaggggcagttttagcagcacttttgatagattacgtctaatcctcccaaccaaccagcagggtagctattactgtccacattttacaggcaaggaaacaggctccaagaggctgaggactttgcccaggatgacatagccaatggacaagcagtgtctgtcagctgtgaaggcttcactcttattgtccttctaccttgaatagaagttttcctgataagaataaacgaggaaaaggtccttgcctcctggaagaacaaatctaccaggtgatctattcattgtttcaactcagaatgcacttgattcaggaggtcatctgaccttcaccttggatggttagtttcactttttacatatagtttttgcagggttttattttataaaatccaagcgcgctgttgattgtgttttccttgttttcagcccccccactccagcccgcagcacatttccgctgtccgtcagtaattgtgtcctctctttatgcttgcttggggaatgttgttttctgactaggctgatcattatctaaagaatctaattctgttgatttttaaaacttttaggaccataaacgttgtgttcatatatggacatggaaatatttatataattttatagaaaataaccttttagatggtcaaagtgtaaggagtttttttgtcagataatcatttctacttcaaaaacatttcatgcaatattagaataaagttcctgtcattcctcta

SEQ ID NO: 109822 - DNA, 4321 bp, Homo sapiens
  Payload ID: 1561
  Gene Symbol: ATP7B
  Gene Name: ATPase, Cu++ transporting, beta polypeptide
  ENST ID: ENST00000634308
  CDS Start-End: 73-2757
ctctcctccaccgaccaggtgaccttttgctctgagccagatcagagaagaattcggtgtccgtgcgggacgatgcctgagcaggagagacagatcacagccagagaaggggccagtcggaaaatcttatctaagctttctttgcctacccgtgcctgggaaccagcaatgaagaagagttttgcttttgacaatgttggctatgaaggtggtctggatggcctgggcccttcttctcaggtggccaccagcacagtcaggatcttgggcatgacttgccagtcatgtgtgaagtccattgaggacaggatttccaatttgaaaggcatcatcagcatgaaggtttccctggaacaaggcagtgccactgtgaaatatgtgccatcggttgtgtgcctgcaacaggtttgccatcaaattggggacatgggcttcgaggccagcattgcagaaggaaaggcagcctcctggccctcaaggtccttgcctgcccaggaggctgtggtcaagctccgggtggagggcatgacctgccagtcctgtgtcagctccattgaaggcaaggtccggaaactgcaaggagtagtgagagtcaaagtctcactcagcaaccaagaggccgtcatcacttatcagccttatctcattcagcccgaagacctcagggaccatgtaaatgacatgggatttgaagctgccatcaagagcaaagtggctcccttaagcctgggaccaattgatattgagcggttacaaagcactaacccaaagagacctttatcttctgctaaccagaattttaataattctgagaccttggggcaccaaggaagccatgtggtcaccctccaactgagaatagatggaatgcattgtaagtcttgcgtcttgaatattgaagaaaatattggccagctcctaggggttcaaagtattcaagtgtccttggagaacaaaactgcccaagtaaagtatgacccttcttgtaccagcccagtggctctgcagagggctatcgaggcacttccacctgggaattttaaagtttctcttcctgatggagccgaagggagtgggacagatcacaggtcttccagttctcattcccctggctccccaccgagaaaccaggtccagggcacatgcagtaccactctgattgccattgccggcatgacctgtgcatcctgtgtccattccattgaaggcatgatctcccaactggaaggggtgcagcaaatatcggtgtctttggccgaagggactgcaacagttctttataatccctctgtaattagcccagaagaactcagagctgctatagaagacatgggatttgaggcttcagtcgtttctgaaagctgttctactaaccctcttggaaaccacagtgctgggaattccatggtgcaaactacagatggtacacctacatctgtgcaggaagtggctccccacactgggaggctccctgcaaaccatgccccggacatcttggcaaagtccccacaatcaaccagagcagtggcaccgcagaagtgcttcttacagatcaaaggcatgacctgtgcatcctgtgtgtctaacatagaaaggaatctgcagaaagaagctggtgttctctccgtgttggttgccttgatggcaggaaaggcagagatcaagtatgacccagaggtcatccagcccctcgagatagctcagttcatccaggacctgggttttgaggcagcagtcatggaggactacgcaggctccgatggcaacattgagctgacaatcacagggatgacctgcgcgtcctgtgtccacaacatagagtccaaactcacgaggacaaatggcatcacttatgcctccgttgcccttgccaccagcaaagcccttgttaagtttgacccggaaattatcggtccacgggatattatcaaaattattgaggaaattggctttcatgcttccctggcccagagaaaccccaacgctcatcacttggaccacaagatggaaataaagcagtggaagaagtctttcctgtgcagcctggtgtttggcatccctgtcatggccttaatgatctatatgctgatacccagcaacgagccccaccagtccatggtcctggaccacaacatcattccaggactgtccattctaaatctcatcttctttatcttgtgtacctttgtccagagcaaaacctcagaagccctggctaaactcatgtctctccaagccacagaagccaccgttgtgacccttggtgaggacaatttaatcatcagggaggagcaagtccccatggagctggtgcagcggggcgatatcgtcaaggtggtccctgggggaaagtttccagtggatgggaaagtcctggaaggcaataccatggctgatgagtccctcatcacaggagaagccatgccagtcactaagaaacccggaagcactgtaattgcggggtctataaatgcacatggctctgtgctcattaaagctacccacgtgggcaatgacaccactttggctcagattgtgaaactggtggaagaggctcagatgtcaaaggcacccattcagcagctggctgaccggtttagtggatattttgtcccatttatcatcatcatgtcaactttgacgttggtggtatggattgtaatcggttttatcgattttggtgttgttcagagatactttcctggaggatgctggcaaatgagaaccccaacaagcacatctcccagacagaggtgatcatccggtttgctttccagacgtccatcacggtgctgtgcattgcctgcccctgctccctggggctggccacgcccacggctgtcatggtgggcaccggggtggccgcgcagaacggcatcctcatcaagggaggcaagcccctggagatggcgcacaagataaagactgtgatgtttgacaagactggcaccattacccatggcgtccccagggtcatgcgggtgctcctgctgggggatgtggccacactgcccctcaggaaggttctggctgtggtggggactgcggaggccagcagtgaacaccccttgggcgtggcagtcaccaaatactgtaaagaggaacttggaacagagaccttgggatactgcacggacttccaggcagtgccaggctgtggaattgggtgcaaagtcagcaacgtggaaggcatcctggcccacagtgagcgccctttgagtgcaccggccagtcacctgaatgaggctggcagccttcccgcagaaaaagatgcagtcccccagaccttctctgtgctgattggaaaccgtgagtggctgaggcgcaacggtttaaccatttctagcgatgtcagtgacgctatgacagaccacgagatgaaaggacagacagccatcctggtggctattgacggtgtgctctgtgggatgatcgcaatcgcagacgctgtcaagcaggaggctgccctggctgtgcacacgctgcagagcatgggtgtggacgtggttctgatcacgggggacaaccggaagacagccagagctattgccacccaggttggcatcaacaaagtctttgcagaggtgctgccttcgcacaaggtggccaaggtccaggagctccagaataaagggaagaaagtcgccatggtgggggatggggtcaatgactccccggccttggcccaggcagacatgggtgtggccattggcaccggcacggatgtggccatcgaggcagccgacgtcgtccttatcagaaatgatttgctggatgtggtggctagcattcacctttccaagaggactgtccgaaggatacgcatcaacctggtcctggcactgatttataacctggttgggatacccattgcagcaggtgtcttcatgcccatcggcattgtgctgcagccctggatgggctcagcggccatggcagcctcctctgtgtctgtggtgctctcatccctgcagctcaagtgctataagaagcctgacctggagaggtatgaggcacaggcgcatggccacatgaagcccctgacggcatcccaggtcagtgtgcacataggcatggatgacaggtggcgggactcccccagggccacaccatgggaccaggtcagctatgtcagccaggtgtcgctgtcctccctgacgtccgacaagccatctcggcacagcgctgcagcagacgatgatggggacaagtggtctctgctcctgaatggcagggatgaggagcagtacatctgatgacttcaggcaggcgggccggggcagggacttgcctccactcaccacaagctgagcaggacagc

SEQ ID NO: 109823 - DNA, 4398 bp, Homo sapiens
  Payload ID: 1561
  Gene Symbol: ATP7B
  Gene Name: ATPase, Cu++ transporting, beta polypeptide
  ENST ID: ENST00000634844
  CDS Start-End: 75-4328
cgctctcctccaccgaccaggtgaccttttgctctgagccagatcagagaagaattcggtgtccgtgcgggacgatgcctgagcaggagagacagatcacagccagagaaggggccagtcggaaaatcttatctaagctttctttgcctacccgtgcctgggaaccagcaatgaagaagagttttgcttttgacaatgttggctatgaaggtggtctggatggcctgggcccttcttctcaggtggccaccagcacagtcaggatcttgggcatgacttgccagtcatgtgtgaagtccattgaggacaggatttccaatttgaaaggcatcatcagcatgaaggtttccctggaacaaggcagtgccactgtgaaatatgtgccatcggttgtgtgcctgcaacaggtttgccatcaaattggggacatgggcttcgaggccagcattgcagaaggaaaggcagcctcctggccctcaaggtccttgcctgcccaggaggctgtggtcaagctccgggtggagggcatgacctgccagtcctgtgtcagctccattgaaggcaaggtccggaaactgcaaggagtagtgagagtcaaagtctcactcagcaaccaagaggccgtcatcacttatcagccttatctcattcagcccgaagacctcagggaccatgtaaatgacatgggatttgaagctgccatcaagagcaaagtggctcccttaagcctgggaccaattgatattgagcggttacaaagcactaacccaaagagacctttatcttctgctaaccagaattttaataattctgagaccttggggcaccaaggaagccatgtggtcaccctccaactgagaatagatggaatgcattgtaagtcttgcgtcttgaatattgaagaaaatattggccagctcctaggggttcaaagtattcaagtgtccttggagaacaaaactgcccaagtaaagtatgacccttcttgtaccagcccagtggctctgcagagggctatcgaggcacttccacctgggaattttaaagtttctcttcctgatggagccgaagggagtgggacagatcacaggtcttccagttctcattcccctggctccccaccgagaaaccaggtccagggcacatgcagtaccactctgattgccattgccggcatgacctgtgcatcctgtgtccattccattgaaggcatgatctcccaactggaaggggtgcagcaaatatcggtgtctttggccgaagggactgcaacagttctttataatccctctgtaattagcccagaagaactcagagctgctatagaagacatgggatttgaggcttcagtcgtttctgaaagctgttctactaaccctcttggaaaccacagtgctgggaattccatggtgcaaactacagatggtacacctacatctgtgcaggaagtggctccccacactgggaggctccctgcaaaccatgccccggacatcttggcaaagtccccacaatcaaccagagcagtggcaccgcagaagtgcttcttacagatcaaaggcatgacctgtgcatcctgtgtgtctaacatagaaaggaatctgcagaaagaagctggtgttctctccgtgttggttgccttgatggcaggaaaggcagagatcaagtatgacccagaggtcatccagcccctcgagatagctcagttcatccaggacctgggttttgaggcagcagtcatggaggactacgcaggctccgatggcaacattgagctgacaatcacagggatgacctgcgcgtcctgtgtccacaacatagagtccaaactcacgaggacaaatggcatcacttatgcctccgttgcccttgccaccagcaaagcccttgttaagtttgacccggaaattatcggtccacgggatattatcaaaattattgaggaaattggctttcatgcttccctggcccagagaaaccccaacgctcatcacttggaccacaagatggaaataaagcagtggaagaagtctttcctgtgcagcctggtgtttggcatccctgtcatggccttaatgatctatatgctgatacccagcaacgagccccaccagtccatggtcctggaccacaacatcattccaggactgtccattctaaatctcatcttctttatcttgtgtacctttgtccaggcggagaggagccctgtgacattcttcgacacgccccccatgctctttgtgttcattgccctgggccggtggctggaacacttggcaaagagcaaaacctcagaagccctggctaaactcatgtctctccaagccacagaagccaccgttgtgacccttggtgaggacaatttaatcatcagggaggagcaagtccccatggagctggtgcagcggggcgatatcgtcaaggtggtccctgggggaaagtttccagtggatgggaaagtcctggaaggcaataccatggctgatgagtccctcatcacaggagaagccatgccagtcactaagaaacccggaagcactgtaattgcggggtctataaatgcacatggctctgtgctcattaaagctacccacgtgggcaatgacaccactttggctcagattgtgaaactggtggaagaggctcagatgtcaaaggcacccattcagcagctggctgaccggtttagtggatattttgtcccatttatcatcatcatgtcaactttgacgttggtggtatggattgtaatcggttttatcgattttggtgttgttcagagatactttcctaaccccaacaagcacatctcccagacagaggtgatcatccggtttgctttccagacgtccatcacggtgctgtgcattgcctgcccctgctccctggggctggccacgcccacggctgtcatggtgggcaccggggtggccgcgcagaacggcatcctcatcaagggaggcaagcccctggagatggcgcacaagataaagactgtgatgtttgacaagactggcaccattacccatggcgtccccagggtcatgcgggtgctcctgctgggggatgtggccacactgcccctcaggaaggttctggctgtggtggggactgcggaggccagcagtgaacaccccttgggcgtggcagtcaccaaatactgtaaagaggaacttggaacagagaccttgggatactgcacggacttccaggcagtgccaggctgtggaattgggtgcaaagtcagcaacgtggaaggcatcctggcccacagtgagcgccctttgagtgcaccggccagtcacctgaatgaggctggcagccttcccgcagaaaaagatgcagtcccccagaccttctctgtgctgattggaaaccgtgagtggctgaggcgcaacggtttaaccatttctagcgatgtcagtgacgctatgacagaccacgagatgaaaggacagacagccatcctggtggctattgacggtgtgctctgtgggatgatcgcaatcgcagacgctgtcaagcaggaggctgccctggctgtgcacacgctgcagagcatgggtgtggacgtggttctgatcacgggggacaaccggaagacagccagagctattgccacccaggttggcatcaacaaagtctttgcagaggtgctgccttcgcacaaggtggccaaggtccaggagctccagaataaagggaagaaagtcgccatggtgggggatggggtcaatgactccccggccttggcccaggcagacatgggtgtggccattggcaccggcacggatgtggccatcgaggcagccgacgtcgtccttatcagaaatgatttgctggatgtggtggctagcattcacctttccaagaggactgtccgaaggatacgcatcaacctggtcctggcactgatttataacctggttgggatacccattgcagcaggtgtcttcatgcccatcggcattgtgctgcagccctggatgggctcagcggccatggcagcctcctctgtgtctgtggtgctctcatccctgcagctcaagtgctataagaagcctgacctggagaggtatgaggcacaggcgcatggccacatgaagcccctgacggcatcccaggtcagtgtgcacataggcatggatgacaggtggcgggactcccccagggccacaccatgggaccaggtcagctatgtcagccaggtgtcgctgtcctccctgacgtccgacaagccatctcggcacagcgctgcagcagacgatgatggggacaagtggtctctgctcctgaatggcagggatgaggagcagtacatctgatgacttcaggcaggcgggccggggcagggacttgcctccactcaccacaagctgagcaggacagccagca

SEQ ID NO: 109824 - DNA, 2328 bp, Homo sapiens
  Payload ID: 1561
  Gene Symbol: ATP7B
  Gene Name: ATPase, Cu++ transporting, beta polypeptide
  ENST ID: ENST00000634296
  CDS Start-End: 1-128
ttgaggaaattggctttcatgcttccctggcccagagaaaccccaacgctcatcacttggaccacaagatggaaataaagcactcctcggtgggtggtacttctacgttcaggcctacaaatctctgagacacaggtcagccaacatggacgtgctcatcgtcctggccacaagcattgcttatgtttattctctggtcatcctggtggttgctgtggctgagaaggcggagaggagccctgtgacattcttcgacacgccccccatgctctttgtgttcattgccctgggccggtggctggaacacttggcaaagagcaaaacctcagaagccctggctaaactcatgtctctccaagccacagaagccaccgttgtgacccttggtgaggacaatttaatcatcagggaggagcaagtccccatggagctggtgcagcggggcgatatcgtcaaggtggtccctgggggaaagtttccagtggatgggaaagtcctggaaggcaataccatggctgatgagtccctcatcacaggagaagccatgccagtcactaagaaacccggaagcactgtaattgcggggtctataaatgcacatggctctgtgctcattaaagctacccacgtgggcaatgacaccactttggctcagattgtgaaactggtggaagaggctcagatgtcaaaggcacccattcagcagctggctgaccggtttagtggatattttgtcccatttatcatcatcatgtcaactttgacgttggtggtatggattgtaatcggttttatcgattttggtgttgttcagagatactttcctaaccccaacaagcacatctcccagacagaggtgatcatccggtttgctttccagacgtccatcacggtgctgtgcattgcctgcccctgctccctggggctggccacgcccacggctgtcatggtgggcaccggggtggccgcgcagaacggcatcctcatcaagggaggcaagcccctggagatggcgcacaaggaacttggaacagagaccttgggatactgcacggacttccaggcagtgccaggctgtggaattgggtgcaaagtcagcaacgtggaaggcatcctggcccacagtgagcgccctttgagtgcaccggccagtcacctgaatgaggctggcagccttcccgcagaaaaagatgcagtcccccagaccttctctgtgctgattggaaaccgtgagtggctgaggcgcaacggtttaaccatttctagcgatgtcagtgacgctatgacagaccacgagatgaaaggacagacagccatcctggtggctattgacggtgtgctctgtgggatgatcgcaatcgcagacgctgtcaagcaggaggctgccctggctgtgcacacgctgcagagcatgggtgtggacgtggttctgatcacgggggacaaccggaagacagccagagctattgccacccaggttggcatcaacaaagtctttgcagaggtgctgccttcgcacaaggtggccaaggtccaggagctccagaataaagggaagaaagtcgccatggtgggggatggggtcaatgactccccggccttggcccaggcagacatgggtgtggccattggcaccggcacggatgtggccatcgaggcagccgacgtcgtccttatcagaaatgatttgctggatgtggtggctagcattcacctttccaagaggactgtccgaaggatacgcatcaacctggtcctggcactgatttataacctggttgggatacccattgcagcaggtgtcttcatgcccatcggcattgtgctgcagccctggatgggctcagcggccatggcagcctcctctgtgtctgtggtgctctcatccctgcagctcaagtgctataagaagcctgacctggagaggtatgaggcacaggcgcatggccacatgaagcccctgacggcatcccaggtcagtgtgcacataggcatggatgacaggtggcgggactcccccagggccacaccatgggaccaggtcagctatgtcagccaggtgtcgctgtcctccctgacgtccgacaagccatctcggcacagcgctgcagcagacgatgatggggacaagtggtctctgctcctgaatggcagggatgaggagcagtacatctgatgacttcaggcaggcgggccggggcagggacttgcctccactcaccacaagctgagcaggacagccagcagcaggatgggctgagctagcctccagctttggggacttccgctccctggatatgtccagtcatcctgccctgcagcacgcgg

SEQ ID NO: 109825 - DNA, 1649 bp, Homo sapiens
  Payload ID: 1562
  Gene Symbol: ATP6V0E2
  Gene Name: ATPase, H+ transporting V0 subunit e2
  Uniprot ID: Q8NHE4
  ENST ID: ENST00000425642
  CDS Start-End: 24-269
gcctgggcatcctgcgcccggccatgacggcgcactcattcgccctcccggtcatcatcttcaccacgttctggggcctcgtcggcatcgccgggccctggttcgtgccgaagggacccaaccgcggagtgatcatcaccatgctggtcgccaccgccgtctgctgttacctcttctggctcatcgccatcctggcgcagctgaaccccctgttcgggccccagctgaagaatgagaccatctggtacgtgcgcttcctgtgggagtgacccgccgcccccgacccaggtgcccagctctcggaatgactgtggctccactgtccctgacaaccccttcgtccggaccctcccccacacaactatgtctggtcaccagctccctcctgctggcacccagagacccggacccgcagggcctgcctggttcctggaagtcttcccagtcttcccagccagcccgggccctggggagccctgggcacagcagcggccgaggggatgtcctgctccaatacccgcactgctctggagtttgccctctttcccaaggagatgctgctggggagctggtatgggtggggtctttccctttacagacggggcagatgccaggactcagcccatcctgaggaggacacgtgtcctcatggagagggtgctccggcccaggcgggggagtcagtgcccagtcagcagctctgccaccatcctgctgggaactgggggggcctctattgggttataggcaaggccttttctctggcatggaattgttaattttctgacacgtctagatgtgaaatttctgaaaatgttgaagcagagaaacattcacacacaaaaagcaacatagtcatgtgggtccagatggcctcagtcctagatgttggcaccctttgctgtgtctcctcagagtatcctgttccgcctcctgccacctggacctccctcagtggatgtcttccctcccccgaccccagcctgtcagtccgagcacagtgcaggtttggctctgacttgggcttttggctgcagtgggggtggatttcagagcctctcatggcagcatctaagtgaccagagctgggatgagagaggggaaggggcaatgtgagtggcgctatgggacgggccagccctgctcctgagccagccccgccctctgccccctggccctgggctctgtgctagggatggtgaagaatgggggcgtgccagcctggcaggagtgggaagcaacacgcaggggtcccggacctctccagccttgccctcacgcttacccgagctcccagtgtggttagcacagagctcacccaccttgcctggctcccagctggggcctgtcctcactggtgctccaggggaagaaacgacagcctcacttctgtatggactgctgatgtggcctgccatcctgttcagcgggcattgtctttggagcagcaggagaataggatgcctctcactcacatgccagttcctggctggccagctgctcagggctcaggctggggcctcccattgacatcctccccctacactccctctctgagcctccgtcgcccctcctgttgggtaagggtgttgagtgtgacttgtgctgaaaacctggttcatatataataaataatggtgatgaaaaga

SEQ ID NO: 109826 - DNA, 2722 bp, Homo sapiens
  Payload ID: 1562
  Gene Symbol: ATP6V0E2
  Gene Name: ATPase, H+ transporting V0 subunit e2
  Uniprot ID: Q8NHE4
  ENST ID: ENST00000456496
  CDS Start-End: 952-1344
gttgctagagataccgcctggaggccactgatctgtaaaagggatctctacagaagatagggatttttgatcgccagagaagaagggatatgtgagatccaaacgccgaaggaggaaagcaggctccgtggtctcttccagccctgatggaagaaactaccgagccttattatactaggtgctttccacatgcctattcatttaatcctccagcaaccttgtaagaagggccatcccattttatatttaaacaaaccttaactactgacgcaaggagtcaaggatctaatcccaaagcctctgcctggttcgctgcagatggatgtccgcgaggacgccagccctccgcctcccgccgggtccctgaacgccggcccggccggtccaacctcattccgcttcccgccatcgaaacgcgaagcccccgccttcccccaaacgtctcagcgccgctggggcctttctggctgcgccgcctccgaccccaggccccggtccgcgcccgccgctcgctagtcctgggagtgaggagaacgcgtgctgaggacccggccagagggacagcggggaccgccctcccgctgcgtctctgaaagcgaggccgttcctcccgcgtccgacccccgcggggccgtcaggttcggggcggcccaggctgcgggtccgcagggcgcttcgggccgagccggcgcggcgcgtgaagggcaggggacgccccgaaagaccgctggggtgggaccccaagctccaggggtctttggaaataagaatgcggcgtgacgttggctgtgcgggcgcggggctgacgcggaccctataacccatcgccgaaaccgggcggccgcgcccctattcctcggcatttctctctgtccgcggccctgctcagccaatcagcgagtgggctcctaggcaggtcctgagtgacagcgcggcgggctggatcaggagatgcgcgtgcgcggcccggcccggctgatcgcttcgggtgctcgactcctgttgcgcatgctcagcgcgctgcccggctggggacccgcgcacctgcagcgcccgctgctcggccctgcatcctgcctgggcatcctgcgcccggccatgacggcgcactcattcgccctcccggtcatcatcttcaccacgttctggggcctcgtcggcatcgccgggccctggttcgtgccgaagggacccaaccgcggagtgatcatcaccatgctggtcgccaccgccgtctgctgttacctcttctggctcatcgccatcctggcgcagctgaaccccctgttcgggccccagctgaagaatgagaccatctggtacgtgcgcttcctgtgggagtgacccgccgcccccgacccaggtgcccagctctcggaatgactgtggctccactgtccctgacaaccccttcgtccggaccctcccccacacaactatgtctggtcaccagctccctcctgctggcacccagagacccggacccgcagggcctgcctggttcctggaagtcttcccagtcttcccagccagcccgggccctggggagccctgggcacagcagcggccgaggggatgtcctgctccaatacccgcactgctctggagtttgccctctttcccaaggagatgctgctggggagctggtatgggtggggtctttccctttacagacggggcagatgccaggactcagcccatcctgaggaggacacgtgtcctcatggagagggtgctccggcccaggcgggggagtcagtgcccagtcagcagctctgccaccatcctgctgggaactgggggggcctctattgggttataggcaaggccttttctctggcatggaattgttaattttctgacacgtctagatgtgaaatttctgaaaatgttgaagcagagaaacattcacacacaaaaagcaacatagtcatgtgggtccagatggcctcagtcctagatgttggcaccctttgctgtgtctcctcagagtatcctgttccgcctcctgccacctggacctccctcagtggatgtcttccctcccccgaccccagcctgtcagtccgagcacagtgcaggtttggctctgacttgggcttttggctgcagtgggggtggatttcagagcctctcatggcagcatctaagtgaccagagctgggatgagagaggggaaggggcaatgtgagtggcgctatgggacgggccagccctgctcctgagccagccccgccctctgccccctggccctgggctctgtgctagggatggtgaagaatgggggcgtgccagcctggcaggagtgggaagcaacacgcaggggtcccggacctctccagccttgccctcacgcttacccgagctcccagtgtggttagcacagagctcacccaccttgcctggctcccagctggggcctgtcctcactggtgctccaggggaagaaacgacagcctcacttctgtatggactgctgatgtggcctgccatcctgttcagcgggcattgtctttggagcagcaggagaataggatgcctctcactcacatgccagttcctggctggccagctgctcagggctcaggctggggcctcccattgacatcctccccctacactccctctctgagcctccgtcgcccctcctgttgggtaagggtgttgagtgtgacttgtgctgaaaacctggttcatatataataaataatggtgatgaaaa

SEQ ID NO: 109827 - DNA, 2605 bp, Homo sapiens
  Payload ID: 1562
  Gene Symbol: ATP6V0E2
  Gene Name: ATPase, H+ transporting V0 subunit e2
  ENST ID: ENST00000421974
  CDS Start-End: 952-1593
gttgctagagataccgcctggaggccactgatctgtaaaagggatctctacagaagatagggatttttgatcgccagagaagaagggatatgtgagatccaaacgccgaaggaggaaagcaggctccgtggtctcttccagccctgatggaagaaactaccgagccttattatactaggtgctttccacatgcctattcatttaatcctccagcaaccttgtaagaagggccatcccattttatatttaaacaaaccttaactactgacgcaaggagtcaaggatctaatcccaaagcctctgcctggttcgctgcagatggatgtccgcgaggacgccagccctccgcctcccgccgggtccctgaacgccggcccggccggtccaacctcattccgcttcccgccatcgaaacgcgaagcccccgccttcccccaaacgtctcagcgccgctggggcctttctggctgcgccgcctccgaccccaggccccggtccgcgcccgccgctcgctagtcctgggagtgaggagaacgcgtgctgaggacccggccagagggacagcggggaccgccctcccgctgcgtctctgaaagcgaggccgttcctcccgcgtccgacccccgcggggccgtcaggttcggggcggcccaggctgcgggtccgcagggcgcttcgggccgagccggcgcggcgcgtgaagggcaggggacgccccgaaagaccgctggggtgggaccccaagctccaggggtctttggaaataagaatgcggcgtgacgttggctgtgcgggcgcggggctgacgcggaccctataacccatcgccgaaaccgggcggccgcgcccctattcctcggcatttctctctgtccgcggccctgctcagccaatcagcgagtgggctcctaggcaggtcctgagtgacagcgcggcgggctggatcaggagatgcgcgtgcgcggcccggcccggctgatcgcttcgggtgctcgactcctgttgcgcatgctcagcgcgctgcccggctggggacccgcgcacctgcagcgcccgctgctcggccctgcatcctgcctgggcatcctgcgcccggccatgacggcgcactcattcgccctcccggtcatcatcttcaccacgttctggggcctcgtcggcatcgccgggccctggttcgtgccgaagggacccaaccgcggagtgatcatcaccatgctggtcgccaccgccgtctgctgttacctcttgtgcccagctctcggaatgactgtggctccactgtccctgacaaccccttcgtccggaccctcccccacacaactatgtctggtcaccagctccctcctgctggcacccagagacccggacccgcagggcctgcctggttcctggaagtcttcccagtcttcccagccagcccgggccctggggagccctgggcacagcagcggccgaggggatgtcctgctccaatacccgcactgctctggagtttgccctctttcccaaggagatgctgctggggagctggtatgggtggggtctttccctttacagacggggcagatgccaggactcagcccatcctgaggaggacacgtgtcctcatggagagggtgctccggcccaggcgggggagtcagtgcccagtcagcagctctgccaccatcctgctgggaactgggggggcctctattgggttataggcaaggccttttctctggcatggaattgttaattttctgacacgtctagatgtgaaatttctgaaaatgttgaagcagagaaacattcacacacaaaaagcaacatagtcatgtgggtccagatggcctcagtcctagatgttggcaccctttgctgtgtctcctcagagtatcctgttccgcctcctgccacctggacctccctcagtggatgtcttccctcccccgaccccagcctgtcagtccgagcacagtgcaggtttggctctgacttgggcttttggctgcagtgggggtggatttcagagcctctcatggcagcatctaagtgaccagagctgggatgagagaggggaaggggcaatgtgagtggcgctatgggacgggccagccctgctcctgagccagccccgccctctgccccctggccctgggctctgtgctagggatggtgaagaatgggggcgtgccagcctggcaggagtgggaagcaacacgcaggggtcccggacctctccagccttgccctcacgcttacccgagctcccagtgtggttagcacagagctcacccaccttgcctggctcccagctggggcctgtcctcactggtgctccaggggaagaaacgacagcctcacttctgtatggactgctgatgtggcctgccatcctgttcagcgggcattgtctttggagcagcaggagaataggatgcctctcactcacatgccagttcctggctggccagctgctcagggctcaggctggggcctcccattgacatcctccccctacactccctctctgagcctccgtcgcccctcctgttgggtaagggtgttgagtgtgacttgtgctgaaaacctggttcatatataataaataatggtgatg

SEQ ID NO: 109828 - DNA, 1666 bp, Homo sapiens
  Payload ID: 1562
  Gene Symbol: ATP6V0E2
  Gene Name: ATPase, H+ transporting V0 subunit e2
  Uniprot ID: Q8NHE4
  ENST ID: ENST00000479613
  CDS Start-End: 91-654
atgctcagcgcgctgcccggctggggacccgcgcacctgcagcgcccgctgctcggccctgcatcctgcctgggcatcctgcgcccggccatgacggcgcactcattcgccctcccggtcatcatcttcaccacgttctggggcctcgtcggcatcgccgggccctggttcgtgccgaagggacccaaccgcggagtgatcatcaccatgctggtcgccaccgccgtctgctgttacctcttctggctcatcgccatcctggcgcagctgaaccccctgttcgggccccagctgaagaatgagaccatctggtgcccagctctcggaatgactgtggctccactgtccctgacaaccccttcgtccggaccctcccccacacaactatgtctggtcaccagctccctcctgctggcacccagagacccggacccgcagggcctgcctggttcctggaagtcttcccagtcttcccagccagcccgggccctggggagccctgggcacagcagcggccgaggggatgtcctgctccaatacccgcactgctctggagtttgccctctttcccaaggagatgctgctggggagctggtatgggtggggtctttccctttacagacggggcagatgccaggactcagcccatcctgaggaggacacgtgtcctcatggagagggtgctccggcccaggcgggggagtcagtgcccagtcagcagctctgccaccatcctgctgggaactgggggggcctctattgggttataggcaaggccttttctctggcatggaattgttaattttctgacacgtctagatgtgaaatttctgaaaatgttgaagcagagaaacattcacacacaaaaagcaacatagtcatgtgggtccagatggcctcagtcctagatgttggcaccctttgctgtgtctcctcagagtatcctgttccgcctcctgccacctggacctccctcagtggatgtcttccctcccccgaccccagcctgtcagtccgagcacagtgcaggtttggctctgacttgggcttttggctgcagtgggggtggatttcagagcctctcatggcagcatctaagtgaccagagctgggatgagagaggggaaggggcaatgtgagtggcgctatgggacgggccagccctgctcctgagccagccccgccctctgccccctggccctgggctctgtgctagggatggtgaagaatgggggcgtgccagcctggcaggagtgggaagcaacacgcaggggtcccggacctctccagccttgccctcacgcttacccgagctcccagtgtggttagcacagagctcacccaccttgcctggctcccagctggggcctgtcctcactggtgctccaggggaagaaacgacagcctcacttctgtatggactgctgatgtggcctgccatcctgttcagcgggcattgtctttggagcagcaggagaataggatgcctctcactcacatgccagttcctggctggccagctgctcagggctcaggctggggcctcccattgacatcctccccctacactccctctctgagcctccgtcgcccctcctgttgggtaagggtgttgagtgtgacttgtgctgaaaacctggttcatatataataaataatggtgatg

SEQ ID NO: 109829 - DNA, 495 bp, Homo sapiens
  Payload ID: 1562
  Gene Symbol: ATP6V0E2
  Gene Name: ATPase, H+ transporting V0 subunit e2
  ENST ID: ENST00000464683
  CDS Start-End: 91-330
atgctcagcgcgctgcccggctggggacccgcgcacctgcagcgcccgctgctcggccctgcatcctgcctgggcatcctgcgcccggccatgacggcgcactcattcgccctcccggtcatcatcttcaccacgttctggggcctcgtcggcatcgccgggccctggttcgtgccgaagggacccaaccgcggagtgatcatcaccatgctggtcgccaccgccgtctgctgttacctcttttttcaggctgcaccctacacccatgaaattacaactctcgagatctgcacttgggaattcctgttgttcatgaatgcccccaggtgactggaatgcagccatcttagaaccactagctggctcatcgccatcctggcgcagctgaaccccctgttcgggccccagctgaagaatgagaccatctggtacgtgcgcttcctgtgggagtgacccgccgcccccgacccaggtgcccagctctcggaatgactg

SEQ ID NO: 109830 - DNA, 1766 bp, Homo sapiens
  Payload ID: 1562
  Gene Symbol: ATP6V0E2
  Gene Name: ATPase, H+ transporting V0 subunit e2
  Uniprot ID: Q8NHE4
  ENST ID: ENST00000471877
  CDS Start-End: 80-325
gctgcccggctggggacccgcgcacctgcagcgcccgctgctcggccctgcatcctgcctgggcatcctgcgcccggccatgacggcgcactcattcgccctcccggtcatcatcttcaccacgttctggggcctcgtcggcatcgccgggccctggttcgtgccgaagggacccaaccgcggagtgatcatcaccatgctggtcgccaccgccgtctgctgttacctcttctggctcatcgccatcctggcgcagctgaaccccctgttcgggccccagctgaagaatgagaccatctggtacgtgcgcttcctgtgggagtgacccgccgcccccgacccagcgcttcaccccaaggcaagaccctaacctgggccctaacctggacggagggagggaaagggtgcccagctctcggaatgactgtggctccactgtccctgacaaccccttcgtccggaccctcccccacacaactatgtctggtcaccagctccctcctgctggcacccagagacccggacccgcagggcctgcctggttcctggaagtcttcccagtcttcccagccagcccgggccctggggagccctgggcacagcagcggccgaggggatgtcctgctccaatacccgcactgctctggagtttgccctctttcccaaggagatgctgctggggagctggtatgggtggggtctttccctttacagacggggcagatgccaggactcagcccatcctgaggaggacacgtgtcctcatggagagggtgctccggcccaggcgggggagtcagtgcccagtcagcagctctgccaccatcctgctgggaactgggggggcctctattgggttataggcaaggccttttctctggcatggaattgttaattttctgacacgtctagatgtgaaatttctgaaaatgttgaagcagagaaacattcacacacaaaaagcaacatagtcatgtgggtccagatggcctcagtcctagatgttggcaccctttgctgtgtctcctcagagtatcctgttccgcctcctgccacctggacctccctcagtggatgtcttccctcccccgaccccagcctgtcagtccgagcacagtgcaggtttggctctgacttgggcttttggctgcagtgggggtggatttcagagcctctcatggcagcatctaagtgaccagagctgggatgagagaggggaaggggcaatgtgagtggcgctatgggacgggccagccctgctcctgagccagccccgccctctgccccctggccctgggctctgtgctagggatggtgaagaatgggggcgtgccagcctggcaggagtgggaagcaacacgcaggggtcccggacctctccagccttgccctcacgcttacccgagctcccagtgtggttagcacagagctcacccaccttgcctggctcccagctggggcctgtcctcactggtgctccaggggaagaaacgacagcctcacttctgtatggactgctgatgtggcctgccatcctgttcagcgggcattgtctttggagcagcaggagaataggatgcctctcactcacatgccagttcctggctggccagctgctcagggctcaggctggggcctcccattgacatcctccccctacactccctctctgagcctccgtcgcccctcctgttgggtaagggtgttgagtgtgacttgtgctgaaaacctggttcatatataataaataatggtgatgaaaagat

SEQ ID NO: 109831 - DNA, 513 bp, Homo sapiens
  Payload ID: 1562
  Gene Symbol: ATP6V0E2
  Gene Name: ATPase, H+ transporting V0 subunit e2
  Uniprot ID: Q8NHE4
  ENST ID: ENST00000464662
  CDS Start-End: 74-319
cggctggggacccgcgcacctgcagcgcccgctgctcggccctgcatcctgcctgggcatcctgcgcccggccatgacggcgcactcattcgccctcccggtcatcatcttcaccacgttctggggcctcgtcggcatcgccgggccctggttcgtgccgaagggacccaaccgcggagtgatcatcaccatgctggtcgccaccgccgtctgctgttacctcttctggctcatcgccatcctggcgcagctgaaccccctgttcgggccccagctgaagaatgagaccatctggtacgtgcgcttcctgtgggagtgacccgccgcccccgacccaggtactgtgtgggcgaggggtgtgggtggggaagaggggaaagacaaggctttcccacacccagggcaggcctcggtcatattattttggatgcggccaacccagcagatggcagggcctgtgttcccagggtgacgaagggcccagggagccatccacactccggcaggcacatg

SEQ ID NO: 109832 - DNA, 893 bp, Homo sapiens
  Payload ID: 1562
  Gene Symbol: ATP6V0E2
  Gene Name: ATPase, H+ transporting V0 subunit e2
  Uniprot ID: Q8NHE4
  ENST ID: ENST00000606024
  CDS Start-End: 80-574
gctgcccggctggggacccgcgcacctgcagcgcccgctgctcggccctgcatcctgcctgggcatcctgcgcccggccatgacggcgcactcattcgccctcccggtcatcatcttcaccacgttctggggcctcgtcggcatcgccgggccctggttcgtgccgaagggacccaaccgcggagtgatcatcaccatgctggtcgccaccgccgtctgctgttacctcttgtgcccagctctcggaatgactgtggctccactgtccctgacaaccccttcgtccggaccctcccccacacaactatgtctggtcaccagctccctcctgctggcacccagagacccggacccgcagggcctgcctggttcctggaagtcttcccagtcttcccagccagcccgggccctggggagccctgggcacagcagcggccgaggggatgtcctgctccaatacccgcactgctctggagtttgccctctttcccaaggagatgctgctggggagctggtatgggtggggtctttccctttacagacggggcagatgccaggactcagcccatcctgaggaggacacgtgtcctcatggagagggtgctccggcccaggcgggggagtcagtgcccagtcagcagctctgccaccatcctgctgggaactgggggggcctctattgggttataggcaaggccttttctctggcatggaattgttaattttctgacacgtctagatgtgaaatttctgaaaatgttgaagcagagaaacattcacacacaaaaagcaacatagtcatgtgggtccagatggcctcagtcctagatgttggcaccctttgctgtgtctcctcagagtatcctgttccgcctcctgccacctggacctcc

SEQ ID NO: 109833 - DNA, 2727 bp, Homo sapiens
  Payload ID: 1562
  Gene Symbol: ATP6V0E2
  Gene Name: ATPase, H+ transporting V0 subunit e2
  Uniprot ID: Q8NHE4
  ENST ID: ENST00000615196
  CDS Start-End: 952-1344
gttgctagagataccgcctggaggccactgatctgtaaaagggatctctacagaagatagggatttttgatcgccagagaagaagggatatgtgagatccaaacgccgaaggaggaaagcaggctccgtggtctcttccagccctgatggaagaaactaccgagccttattatactaggtgctttccacatgcctattcatttaatcctccagcaaccttgtaagaagggccatcccattttatatttaaacaaaccttaactactgacgcaaggagtcaaggatctaatcccaaagcctctgcctggttcgctgcagatggatgtccgcgaggacgccagccctccgcctcccgccgggtccctgaacgccggcccggccggtccaacctcattccgcttcccgccatcgaaacgcgaagcccccgccttcccccaaacgtctcagcgccgctggggcctttctggctgcgccgcctccgaccccaggccccggtccgcgcccgccgctcgctagtcctgggagtgaggagaacgcgtgctgaggacccggccagagggacagcggggaccgccctcccgctgcgtctctgaaagcgaggccgttcctcccgcgtccgacccccgcggggccgtcaggttcggggcggcccaggctgcgggtccgcagggcgcttcgggccgagccggcgcggcgcgtgaagggcaggggacgccccgaaagaccgctggggtgggaccccaagctccaggggtctttggaaataagaatgcggcgtgacgttggctgtgcgggcgcggggctgacgcggaccctataacccatcgccgaaaccgggcggccgcgcccctattcctcggcatttctctctgtccgcggccctgctcagccaatcagcgagtgggctcctaggcaggtcctgagtgacagcgcggcgggctggatcaggagatgcgcgtgcgcggcccggcccggctgatcgcttcgggtgctcgactcctgttgcgcatgctcagcgcgctgcccggctggggacccgcgcacctgcagcgcccgctgctcggccctgcatcctgcctgggcatcctgcgcccggccatgacggcgcactcattcgccctcccggtcatcatcttcaccacgttctggggcctcgtcggcatcgccgggccctggttcgtgccgaagggacccaaccgcggagtgatcatcaccatgctggtcgccaccgccgtctgctgttacctcttctggctcatcgccatcctggcgcagctgaaccccctgttcgggccccagctgaagaatgagaccatctggtacgtgcgcttcctgtgggagtgacccgccgcccccgacccaggtgcccagctctcggaatgactgtggctccactgtccctgacaaccccttcgtccggaccctcccccacacaactatgtctggtcaccagctccctcctgctggcacccagagacccggacccgcagggcctgcctggttcctggaagtcttcccagtcttcccagccagcccgggccctggggagccctgggcacagcagcggccgaggggatgtcctgctccaatacccgcactgctctggagtttgccctctttcccaaggagatgctgctggggagctggtatgggtggggtctttccctttacagacggggcagatgccaggactcagcccatcctgaggaggacacgtgtcctcatggagagggtgctccggcccaggcgggggagtcagtgcccagtcagcagctctgccaccatcctgctgggaactgggggggcctctattgggttataggcaaggccttttctctggcatggaattgttaattttctgacacgtctagatgtgaaatttctgaaaatgttgaagcagagaaacattcacacacaaaaagcaacatagtcatgtgggtccagatggcctcagtcctagatgttggcaccctttgctgtgtctcctcagagtatcctgttccgcctcctgccacctggacctccctcagtggatgtcttccctcccccgaccccagcctgtcagtccgagcacagtgcaggtttggctctgacttgggcttttggctgcagtgggggtggatttcagagcctctcatggcagcatctaagtgaccagagctgggatgagagaggggaaggggcaatgtgagtggcgctatgggacgggccagccctgctcctgagccagccccgccctctgccccctggccctgggctctgtgctagggatggtgaagaatgggggcgtgccagcctggcaggagtgggaagcaacacgcaggggtcccggacctctccagccttgccctcacgcttacccgagctcccagtgtggttagcacagagctcacccaccttgcctggctcccagctggggcctgtcctcactggtgctccaggggaagaaacgacagcctcacttctgtatggactgctgatgtggcctgccatcctgttcagcgggcattgtctttggagcagcaggagaataggatgcctctcactcacatgccagttcctggctggccagctgctcagggctcaggctggggcctcccattgacatcctccccctacactccctctctgagcctccgtcgcccctcctgttgggtaagggtgttgagtgtgacttgtgctgaaaacctggttcatatataataaataatggtgatgaaaagatta

SEQ ID NO: 109834 - DNA, 2565 bp, Homo sapiens
  Payload ID: 1562
  Gene Symbol: ATP6V0E2
  Gene Name: ATPase, H+ transporting V0 subunit e2
  ENST ID: ENST00000611515
  CDS Start-End: 952-1593
gttgctagagataccgcctggaggccactgatctgtaaaagggatctctacagaagatagggatttttgatcgccagagaagaagggatatgtgagatccaaacgccgaaggaggaaagcaggctccgtggtctcttccagccctgatggaagaaactaccgagccttattatactaggtgctttccacatgcctattcatttaatcctccagcaaccttgtaagaagggccatcccattttatatttaaacaaaccttaactactgacgcaaggagtcaaggatctaatcccaaagcctctgcctggttcgctgcagatggatgtccgcgaggacgccagccctccgcctcccgccgggtccctgaacgccggcccggccggtccaacctcattccgcttcccgccatcgaaacgcgaagcccccgccttcccccaaacgtctcagcgccgctggggcctttctggctgcgccgcctccgaccccaggccccggtccgcgcccgccgctcgctagtcctgggagtgaggagaacgcgtgctgaggacccggccagagggacagcggggaccgccctcccgctgcgtctctgaaagcgaggccgttcctcccgcgtccgacccccgcggggccgtcaggttcggggcggcccaggctgcgggtccgcagggcgcttcgggccgagccggcgcggcgcgtgaagggcaggggacgccccgaaagaccgctggggtgggaccccaagctccaggggtctttggaaataagaatgcggcgtgacgttggctgtgcgggcgcggggctgacgcggaccctataacccatcgccgaaaccgggcggccgcgcccctattcctcggcatttctctctgtccgcggccctgctcagccaatcagcgagtgggctcctaggcaggtcctgagtgacagcgcggcgggctggatcaggagatgcgcgtgcgcggcccggcccggctgatcgcttcgggtgctcgactcctgttgcgcatgctcagcgcgctgcccggctggggacccgcgcacctgcagcgcccgctgctcggccctgcatcctgcctgggcatcctgcgcccggccatgacggcgcactcattcgccctcccggtcatcatcttcaccacgttctggggcctcgtcggcatcgccgggccctggttcgtgccgaagggacccaaccgcggagtgatcatcaccatgctggtcgccaccgccgtctgctgttacctcttgtgcccagctctcggaatgactgtggctccactgtccctgacaaccccttcgtccggaccctcccccacacaactatgtctggtcaccagctccctcctgctggcacccagagacccggacccgcagggcctgcctggttcctggaagtcttcccagtcttcccagccagcccgggccctggggagccctgggcacagcagcggccgaggggatgtcctgctccaatacccgcactgctctggagtttgccctctttcccaaggagatgctgctggggagctggtatgggtggggtctttccctttacagacggggcagatgccaggactcagcccatcctgaggaggacacgtgtcctcatggagagggtgctccggcccaggcgggggagtcagtgcccagtcagcagctctgccaccatcctgctgggaactgggggggcctctattgggttataggcaaggccttttctctggcatggaattgttaattttctgacacgtctagatgtgaaatttctgaaaatgttgaagcagagaaacattcacacacaaaaagcaacatagtcatgtgggtccagatggcctcagtcctagatgttggcaccctttgctgtgtctcctcagagtatcctgttccgcctcctgccacctggacctccctcagtggatgtcttccctcccccgaccccagcctgtcagtccgagcacagtgcaggtttggctctgacttgggcttttggctgcagtgggggtggatttcagagcctctcatggcagcatctaagtgaccagagctgggatgagagaggggaaggggcaatgtgagtggcgctatgggacgggccagccctgctcctgagccagccccgccctctgccccctggccctgggctctgtgctagggatggtgaagaatgggggcgtgccagcctggcaggagtgggaagcaacacgcaggggtcccggacctctccagccttgccctcacgcttacccgagctcccagtgtggttagcacagagctcacccaccttgcctggctcccagctggggcctgtcctcactggtgctccaggggaagaaacgacagcctcacttctgtatggactgctgatgtggcctgccatcctgttcagcgggcattgtctttggagcagcaggagaataggatgcctctcactcacatgccagttcctggctggccagctgctcagggctcaggctggggcctcccattgacatcctccccctacactccctctctgagcctccgtcgcccctcctgttgggtaagggtgttgagtgtgacttg

SEQ ID NO: 109835 - DNA, 1080 bp, Homo sapiens
  Payload ID: 1563
  Gene Symbol: ATP6V1G1
  Gene Name: ATPase, H+ transporting, lysosomal 13kDa, V1 subunit G1
  Uniprot ID: O75348
  ENST ID: ENST00000374050
  CDS Start-End: 94-450
gcaagcgcagattgtgggcggctgtgtcagctgacccaaggggccttcgaggtgccttaggccgcttgccttgctctcagaatcgctgccgccatggctagtcagtctcaggggattcagcagctgctgcaggccgagaagcgggcagccgagaaggtgtccgaggcccgcaaaagaaagaaccggaggctgaagcaggccaaagaagaagctcaggctgaaattgaacagtaccgcctgcagagggagaaagaattcaaggccaaggaagctgcggcattgggatcccgtggcagttgcagcactgaagtggagaaggagacccaggagaagatgaccatcctccagacatacttccggcagaacagggatgaagtcttggacaacctcttggcttttgtctgtgacattcggccagaaatccatgaaaactaccgcataaatggatagaagagagaagcacctgtgctgtggagtggcattttagatgccctcacgaatatgaagcttagcacagctctagttacattcttatgatatggcattaaattatttccatatattatataataggtccttccactttttggagagtagcaaatctagcttttttgtacagacttagaaattatctaaagatttcatctttttacctcatatttcttaggaatttaatggttatatgttgtctttttttcctatgtcttttggctcaagcaacatgtatatcagtgttgactttttctttcttagatctagtttaaaaaaaaaaaaaaccacataacaattctttgaagaaaggaagggattaaataatttttttccctaacactttcttgaaggtcaggggctttatctatgaaaaagtagtaaatagttctttgtaacctgtgtgaagcagcagccagccttaaagtagtccattcttgctaatggttagaacagtgaatactagtggaattgtttgggctgcttttagtttctcttaatcaaaattactagatgatagaattcaagaacttgttacatgtattacttggtgtatcgataatcatttaaaagtaaagactctgtcatgca

SEQ ID NO: 109836 - DNA, 1588 bp, Homo sapiens
  Payload ID: 1564
  Gene Symbol: ATP6V1G2
  Gene Name: ATPase, H+ transporting, lysosomal 13kDa, V1 subunit G2
  Uniprot ID: O95670
  ENST ID: ENST00000303892
  CDS Start-End: 286-642
cctgttgtaagcccgcagctttgggcctggtctctgctgctcccaggcggcccctttgggtactgcctgagcaagaagtgctggagaggaggaccagtcatcaataggaggatgagattgggagagacactcggtgcaggaggctgagtgagcaggggagcactaagacccaggggtagtggaggactgcagcaacgagctggaggaggagaagtaagcggtggggggtgggagccatctggtactttgacagcattcaaaacagcatcggccataacaacagaaatggccagtcagtcccaaggtatccagcagcttctgcaagctgagaagcgggcagctgagaaggtggcagatgccagaaagaggaaggcccggcgactgaagcaggcaaaggaggaggcacagatggaggtggagcaataccgcagagagcgagagcacgaattccagagcaagcagcaggcggccatgggctcccaggggaacctgtctgctgaggtggagcaggctacaaggcgccaggtgcagggcatgcagagctcccagcagagaaaccgagagcgtgtcctggcccagcttcttggcatggtctgcgacgtcaggccccaggtccaccccaactaccggatttctgcctagggccaccgtagggcctgactccttctgccagttccctccctcaaagaaatcctccaatcaaaatcacctcccaccataatccctgtcttctttccatcccctagaaatcctgggaggcaggatccaataattttcctgtgacacttataaatatcctgctcacatctgaatctccttgttgttctttaaccctcactgggactttgtaaacttccaagtcattctcacctaaaccctctgtgaaatttgtaatatggggaagtaggaatgtggaaaacatcctgacttcagtgtctggccgatgtgggtccctctcttgaccctgtcacttgctggctgtgaaaccaggacaagctacttaacttggtagcctcgatgtcctcctctgtgaaactgggatgataataatgcctaccttgtgagggttgcttcaatgattaggaatcattctgtaaagtctagcacagttccttgcatgttgtagcagtgattcagtaagtagcaaccctgtgatactattaccaccacctgctcactggtcaaaacctacacagctgtttcctcacgtccatcactggctctctaattccacttgttcattctgtgaccctagttattttctgaaaaattggttcttctcttttcccagagaccttctgatctccaaaaagaggagatgactacatttagcccctctcttataattccaggtagataactgcattttgtagcctctctttgtttttcttttgctgatctttgtctttattagattttcctcctttcctatttccccaaagacttatcagatgctcattgctttctaagatctaaaatgatactgtgttccctcatatgcatgcccttcctttctatatccttgacaccttactttcccattgtaacaataaaaaaagtatcaataaaataattattggcaaataaa

SEQ ID NO: 109837 - DNA, 1261 bp, Homo sapiens
  Payload ID: 1564
  Gene Symbol: ATP6V1G2
  Gene Name: ATPase, H+ transporting, lysosomal 13kDa, V1 subunit G2
  Uniprot ID: O95670
  ENST ID: ENST00000376151
  CDS Start-End: 79-315
ggagaagtaagcggtggggggtgggagccatctggtactttgacagcattcaaaacagcatcggccataacaacagaaatggccagtcagtcccaaggtatccagcagcttctgcaagctgagaagcgggcagctgagaaggtggcagatgccagaaagaggaaggcccggcgactgaagcaggctacaaggcgccaggtgcagggcatgcagagctcccagcagagaaaccgagagcgtgtcctggcccagcttcttggcatggtctgcgacgtcaggccccaggtccaccccaactaccggatttctgcctagggccaccgtagggcctgactccttctgccagttccctccctcaaagaaatcctccaatcaaaatcacctcccaccataatccctgtcttctttccatcccctagaaatcctgggaggcaggatccaataattttcctgtgacacttataaatatcctgctcacatctgaatctccttgttgttctttaaccctcactgggactttgtaaacttccaagtcattctcacctaaaccctctgtgaaatttgtaatatggggaagtaggaatgtggaaaacatcctgacttcagtgtctggccgatgtgggtccctctcttgaccctgtcacttgctggctgtgaaaccaggacaagctacttaacttggtagcctcgatgtcctcctctgtgaaactgggatgataataatgcctaccttgtgagggttgcttcaatgattaggaatcattctgtaaagtctagcacagttccttgcatgttgtagcagtgattcagtaagtagcaaccctgtgatactattaccaccacctgctcactggtcaaaacctacacagctgtttcctcacgtccatcactggctctctaattccacttgttcattctgtgaccctagttattttctgaaaaattggttcttctcttttcccagagaccttctgatctccaaaaagaggagatgactacatttagcccctctcttataattccaggtagataactgcattttgtagcctctctttgtttttcttttgctgatctttgtctttattagattttcctcctttcctatttccccaaagacttatcagatgctcattgctttctaagatctaaaatgatactgtgttccctcatatgcatgcccttcctttctatatccttgacaccttactttcccattgtaacaataaaaaaagtatcaataaaataattattggcaaataaa

SEQ ID NO: 109838 - DNA, 1351 bp, Homo sapiens
  Payload ID: 1564
  Gene Symbol: ATP6V1G2
  Gene Name: ATPase, H+ transporting, lysosomal 13kDa, V1 subunit G2
  Uniprot ID: O95670
  ENST ID: ENST00000383503
  CDS Start-End: 49-405
tctggtactttgacagcattcaaaacagcatcggccataacaacagaaatggccagtcagtcccaaggtatccagcagcttctgcaagctgagaagcgggcagctgagaaggtggcagatgccagaaagaggaaggcccggcgactgaagcaggcaaaggaggaggcacagatggaggtggagcaataccgcagagagcgagagcacgaattccagagcaagcagcaggcggccatgggctcccaggggaacctgtctgctgaggtggagcaggctacaaggcgccaggtgcagggcatgcagagctcccagcagagaaaccgagagcgtgtcctggcccagcttcttggcatggtctgcgacgtcaggccccaggtccaccccaactaccggatttctgcctagggccaccgtagggcctgactccttctgccagttccctccctcaaagaaatcctccaatcaaaatcacctcccaccataatccctgtcttctttccatcccctagaaatcctgggaggcaggatccaataattttcctgtgacacttataaatatcctgctcacatctgaatctccttgttgttctttaaccctcactgggactttgtaaacttccaagtcattctcacctaaaccctctgtgaaatttgtaatatggggaagtaggaatgtggaaaacatcctgacttcagtgtctggccgatgtgggtccctctcttgaccctgtcacttgctggctgtgaaaccaggacaagctacttaacttggtagcctcgatgtcctcctctgtgaaactgggatgataataatgcctaccttgtgagggttgcttcaatgattaggaatcattctgtaaagtctagcacagttccttgcatgttgtagcagtgattcagtaagtagcaaccctgtgatactattaccaccacctgctcactggtcaaaacctacacagctgtttcctcacgtccatcactggctctctaattccacttgttcattctgtgaccctagttattttctgaaaaattggttcttctcttttcccagagaccttctgatctccaaaaagaggagatgactacatttagcccctctcttataattccaggtagataactgcattttgtagcctctctttgtttttcttttgctgatctttgtctttattagattttcctcctttcctatttccccaaagacttatcagatgctcattgctttctaagatctaaaatgatactgtgttccctcatatgcatgcccttcctttctatatccttgacaccttactttcccattgtaacaataaaaaaagtatcaataaaataattattggcaaataaa

SEQ ID NO: 109839 - DNA, 609 bp, Homo sapiens
  Payload ID: 1564
  Gene Symbol: ATP6V1G2
  Gene Name: ATPase, H+ transporting, lysosomal 13kDa, V1 subunit G2
  ENST ID: ENST00000415099
  CDS Start-End: 1-477
ggcgggcagcagcatgcagtgccgtgtccccatggcggtcctggtgggcagggtcagccccgagccgaagcagcaggcacagggcaggggcatcgtggcgggcacaggcccggtgcagtggtgggggctgcccagcatctacatcgaggcctgggtgtcgctggaggagggcctgggcccggaccagccgtcctgcagacaaggaaggcccggcgactgaagcaggcaaaggaggaggcacagatggaggtggagcaataccgcagagagcgagagcacgaattccagagcaagcagcaggcggccatgggctcccaggggaacctgtctgctgaggtggagcaggctacaaggcgccaggtgcagggcatgcagagctcccagcagagaaaccgagagcgtgtcctggcccagcttcttggcatggtctgcgacgtcaggccccaggtccaccccaactaccggatttctgcctagggccaccgtagggcctgactccttctgccagttccctccctcaaagaaatcctccaatcaaaatcacctcccaccataatccctgtcttctttccatcccctagaaatcctgggaggcaggatccaataatt

SEQ ID NO: 109840 - DNA, 1351 bp, Homo sapiens
  Payload ID: 1564
  Gene Symbol: ATP6V1G2
  Gene Name: ATPase, H+ transporting, lysosomal 13kDa, V1 subunit G2
  Uniprot ID: O95670
  ENST ID: ENST00000441959
  CDS Start-End: 49-405
tctggtactttgacagcattcaaaacagcatcggccataacaacagaaatggccagtcagtcccaaggtatccagcagcttctgcaagctgagaagcgggcagctgagaaggtggcagatgccagaaagaggaaggcccggcgactgaagcaggcaaaggaggaggcacagatggaggtggagcaataccgcagagagcgagagcacgaattccagagcaagcagcaggcggccatgggctcccaggggaacctgtctgctgaggtggagcaggctacaaggcgccaggtgcagggcatgcagagctcccagcagagaaaccgagagcgtgtcctggcccagcttcttggcatggtctgcgacgtcaggccccaggtccaccccaactaccggatttctgcctagggccaccgtagggcctgactccttctgccagttccctccctcaaagaaatcctccaatcaaaatcacctcccaccataatccctgtcttctttccatcccctagaaatcctgggaggcaggatccaataattttcctgtgacacttataaatatcctgctcacatctgaatctccttgttgttctttaaccctcactgggactttgtaaacttccaagtcattctcacctaaaccctctgtgaaatttgtaatatggggaagtaggaatgtggaaaacatcctgacttcagtgtctggccgatgtgggtccctctcttgaccctgtcacttgctggctgtgaaaccaggacaagctacttaacttggtagcctcgatgtcctcctctgtgaaactgggatgataataatgcctaccttgtgagggttgcttcaatgattaggaatcattctgtaaagtctagcagagttccttgcatgttgtagcagtgattcagtaagtagcaaccctgtgatactattaccaccacctgctcactggtcaaaacctacacagctgtttcctcacgtccatcactggctctctaattccacttgttcattctgtgaccctagttattttctgaaaaattggttcttctcttttcccagagaccttctgatctccaaaaagaggagatgactacatttagcccctctcttataattccaggtagataactgcattttgtagcctctctttgtttttcttttgctgatctttgtctttattagattttcctcctttcctatttccccaaagacttatcagatgctcattgctttctaagatctaaaatgatactgtgttccctcatatgcatgcccttcctttctatatccttgacaccttactttcccattgtaacaataaaaaaagtatcaataaaataattattggcaaataaa

SEQ ID NO: 109841 - DNA, 1261 bp, Homo sapiens; identical to SEQ ID NO: 109837
  Payload ID: 1564
  Gene Symbol: ATP6V1G2
  Gene Name: ATPase, H+ transporting, lysosomal 13kDa, V1 subunit G2
  Uniprot ID: O95670
  ENST ID: ENST00000452453
  CDS Start-End: 79-315

SEQ ID NO: 109842 - DNA, 1261 bp, Homo sapiens; identical to SEQ ID NO: 109837
  Payload ID: 1564
  Gene Symbol: ATP6V1G2
  Gene Name: ATPase, H+ transporting, lysosomal 13kDa, V1 subunit G2
  Uniprot ID: O95670
  ENST ID: ENST00000447174
  CDS Start-End: 79-315

SEQ ID NO: 109843 - DNA, 1351 bp, Homo sapiens; identical to SEQ ID NO: 109838
  Payload ID: 1564
  Gene Symbol: ATP6V1G2
  Gene Name: ATPase, H+ transporting, lysosomal 13kDa, V1 subunit G2
  Uniprot ID: O95670
  ENST ID: ENST00000449748
  CDS Start-End: 49-405

SEQ ID NO: 109844 - DNA, 1351 bp, Homo sapiens; identical to SEQ ID NO: 109838
  Payload ID: 1564
  Gene Symbol: ATP6V1G2
  Gene Name: ATPase, H+ transporting, lysosomal 13kDa, V1 subunit G2
  Uniprot ID: O95670
  ENST ID: ENST00000444088
  CDS Start-End: 49-405

SEQ ID NO: 109845 - DNA, 1261 bp, Homo sapiens; identical to SEQ ID NO: 109837
  Payload ID: 1564
  Gene Symbol: ATP6V1G2
  Gene Name: ATPase, H+ transporting, lysosomal 13kDa, V1 subunit G2
  Uniprot ID: O95670
  ENST ID: ENST00000421596
  CDS Start-End: 79-315

SEQ ID NO: 109846 - DNA, 1261 bp, Homo sapiens; identical to SEQ ID NO: 109837
  Payload ID: 1564
  Gene Symbol: ATP6V1G2
  Gene Name: ATPase, H+ transporting, lysosomal 13kDa, V1 subunit G2
  Uniprot ID: O95670
  ENST ID: ENST00000434217
  CDS Start-End: 79-315

SEQ ID NO: 109847 - DNA, 1351 bp, Homo sapiens; identical to SEQ ID NO: 109838
  Payload ID: 1564
  Gene Symbol: ATP6V1G2
  Gene Name: ATPase, H+ transporting, lysosomal 13kDa, V1 subunit G2
  Uniprot ID: O95670
  ENST ID: ENST00000454889
  CDS Start-End: 49-405

SEQ ID NO: 109848 - DNA, 1261 bp, Homo sapiens; identical to SEQ ID NO: 109837
  Payload ID: 1564
  Gene Symbol: ATP6V1G2
  Gene Name: ATPase, H+ transporting, lysosomal 13kDa, V1 subunit G2
  Uniprot ID: O95670
  ENST ID: ENST00000448779
  CDS Start-End: 79-315

SEQ ID NO: 109849 - DNA, 1351 bp, Homo sapiens; identical to SEQ ID NO: 109838
  Payload ID: 1564
  Gene Symbol: ATP6V1G2
  Gene Name: ATPase, H+ transporting, lysosomal 13kDa, V1 subunit G2
  Uniprot ID: O95670
  ENST ID: ENST00000454370
  CDS Start-End: 49-405

SEQ ID NO: 109850 - DNA, 1261 bp, Homo sapiens
  Payload ID: 1564
  Gene Symbol: ATP6V1G2
  Gene Name: ATPase, H+ transporting, lysosomal 13kDa, V1 subunit G2
  Uniprot ID: O95670
  ENST ID: ENST00000443657
  CDS Start-End: 79-315
ggagaagtaagcggtggggggtgggagccatctggtactttgacagcattcaaaacagcatcggccataacaacagaaatggccagtcagtcccaaggtatccagcagcttctgcaagctgagaagcgggcagctgagaaggtggcagatgccagaaagaggaaggcccggcgactgaagcaggctacaaggcgccaggtgcagggcatgcagagctcccagcagagaaaccgagagcgtgtcctggcccagcttcttggcatggtctgcgacgtcaggccccaggtccaccccaactaccggatttctgcctagggccaccgtagggcctgactccttctgccagttccctccctcaaagaaatcctccaatcaaaatcacctcccaccataatccctgtcttctttccatcccctagaaatcctgggaggcaggatccaataattttcctgtgacacttataaatatcctgctcacatctgaatctccttgttgttctttaaccctcactgggactttgtaaacttccaagtcattctcacctaaaccctctgtgaaatttgtaatatggggaagtaggaatgtggaaaacatcctgacttcagtgtctggccgatgtgggtccctctcttgaccctgtcacttgctggctgtgaaaccaggacaagctacttaacttggtagcctcgatgtcctcctctgtgaaactgggatgataataatgcctaccttgtgagggttgcttcaatgattaggaatcattctgtaaagtctagcagagttccttgcatgttgtagcagtgattcagtaagtagcaaccctgtgatactattaccaccacctgctcactggtcaaaacctacacagctgtttcctcacgtccatcactggctctctaattccacttgttcattctgtgaccctagttattttctgaaaaattggttcttctcttttcccagagaccttctgatctccaaaaagaggagatgactacatttagcccctctcttataattccaggtagataactgcattttgtagcctctctttgtttttcttttgctgatctttgtctttattagattttcctcctttcctatttccccaaagacttatcagatgctcattgctttctaagatctaaaatgatactgtgttccctcatatgcatgcccttcctttctatatccttgacaccttactttcccattgtaacaataaaaaaagtatcaataaaataattattggcaaataaa

SEQ ID NO: 109851 - DNA, 662 bp, Homo sapiens
  Payload ID: 1564
  Gene Symbol: ATP6V1G2
  Gene Name: ATPase, H+ transporting, lysosomal 13kDa, V1 subunit G2
  Uniprot ID: O95670
  ENST ID: ENST00000483251
  CDS Start-End: 259-492
ctaacctgttgtaagcccgcagctttgggcctggtctctgctgctcccaggcggcccctttgggtactgcctgagcaagaagtgctggagaggaggaccagtcatcaataggaggatgagattgggagagacactcggtgcaggaggctgagtgagcaggggagcactaagacccaggggtagtggaggactgcagcaacgagctggaggaggagaaggaaggcccggcgactgaagcaggcaaaggaggaggcacagatggaggtggagcaataccgcagagagcgagagcacgaattccagagcaagcagcaggcggccatgggctcccaggggaacctgtctgctgaggtggagcaggctacaaggcgccaggtgcagggcatgcagagctcccagcagagaaaccgagagcgtgtcctggcccagcttcttggcatggtctgcgacgtcaggccccaggtccaccccaactaccggatttctgcctagggccaccgtagggcctgactccttctgccagttccctccctcaaagaaatcctccaatcaaaatcacctcccaccataatccctgtcttctttccatcccctagaaatcctgggaggcaggatccaataattttcctgtgacacttataaatatcctgctcacatctgaa

SEQ ID NO: 109852 - DNA, 630 bp, Homo sapiens
  Payload ID: 1565
  Gene Symbol: ATP6V1G3
  Gene Name: ATPase, H+ transporting, lysosomal 13kDa, V1 subunit G3
  Uniprot ID: Q96LB4
  ENST ID: ENST00000281087
  CDS Start-End: 107-463
tttataagtagatgcaacacctcatttatacctccttatctcatacagaagagctaagattggcagaaatgatttcacagaagccacttgcttggagcagactaccatgacaagccagtctcaggggatccaccagcttcttcaggcagaaaaacgggccaaggacaagctagaggaagccaagaagagaaaaggaaagcgattgaagcaagccaaggaggaagcaatggtagaaattgaccagtacagaatgcagagagataaagagtttcgactaaaacaatctaagataatgggctctcagaataatctctcagatgaaatagaagaacaaacactagggaagatacaagaacttaatggacactacaataagtatatggaaagtgtgatgaaccagctcttgagcatggtctgtgacatgaaaccagaaatccatgtgaactacagagccaccaactaaatgtacatcacagttttcaagaaaaaaaaaggtgtgtgagtgccacctggttgcttatggcttcgtatttttatgttgagaaatttgaaatgagaaccttaaatttacatttacaggaaatgtgacataactcatacatcggcactgaattaaacaaaacaaaatac

SEQ ID NO: 109853 - DNA, 678 bp, Homo sapiens
  Payload ID: 1565
  Gene Symbol: ATP6V1G3
  Gene Name: ATPase, H+ transporting, lysosomal 13kDa, V1 subunit G3
  Uniprot ID: Q96LB4
  ENST ID: ENST00000309309
  CDS Start-End: 107-286
tttataagtagatgcaacacctcatttatacctccttatctcatacagaagagctaagattggcagaaatgatttcacagaagccacttgcttggagcagactaccatgacaagccagtctcaggggatccaccagcttcttcaggcagaaaaacgggccaaggacaagctagaggaagccaagaagattctgcatctacttttcctaaaacgaagagactgggactgcttctggaaaaggaaagcgattgaagcaagccaaggaggaagcaatggtagaaattgaccagtacagaatgcagagagataaagagtttcgactaaaacaatctaagataatgggctctcagaataatctctcagatgaaatagaagaacaaacactagggaagatacaagaacttaatggacactacaataagtatatggaaagtgtgatgaaccagctcttgagcatggtctgtgacatgaaaccagaaatccatgtgaactacagagccaccaactaaatgtacatcacagttttcaagaaaaaaaaaggtgtgtgagtgccacctggttgcttatggcttcgtatttttatgttgagaaatttgaaatgagaaccttaaatttacatttacaggaaatgtgacataactcatacatcggcactgaattaaacaaaacaaaatacaa

SEQ ID NO: 109854 - DNA, 630 bp, Homo sapiens; identical to SEQ ID NO: 109852
  Payload ID: 1565
  Gene Symbol: ATP6V1G3
  Gene Name: ATPase, H+ transporting, lysosomal 13kDa, V1 subunit G3
  Uniprot ID: Q96LB4
  ENST ID: ENST00000367381
  CDS Start-End: 107-463

SEQ ID NO: 109855 - DNA, 611 bp, Homo sapiens
  Payload ID: 1565
  Gene Symbol: ATP6V1G3
  Gene Name: ATPase, H+ transporting, lysosomal 13kDa, V1 subunit G3
  Uniprot ID: Q96LB4
  ENST ID: ENST00000367382
  CDS Start-End: 86-442
tgagttatatgttaatttctaaaagaataaatgaacccattacttcccagatttcacagaagccacttgcttggagcagactaccatgacaagccagtctcaggggatccaccagcttcttcaggcagaaaaacgggccaaggacaagctagaggaagccaagaagagaaaaggaaagcgattgaagcaagccaaggaggaagcaatggtagaaattgaccagtacagaatgcagagagataaagagtttcgactaaaacaatctaagataatgggctctcagaataatctctcagatgaaatagaagaacaaacactagggaagatacaagaacttaatggacactacaataagtatatggaaagtgtgatgaaccagctcttgagcatggtctgtgacatgaaaccagaaatccatgtgaactacagagccaccaactaaatgtacatcacagttttcaagaaaaaaaaaggtgtgtgagtgccacctggttgcttatggcttcgtatttttatgttgagaaatttgaaatgagaaccttaaatttacatttacaggaaatgtgacataactcatacatcggcactgaattaaacaaaacaaaatacaa

SEQ ID NO: 109856 - DNA, 449 bp, Homo sapiens
  Payload ID: 1565
  Gene Symbol: ATP6V1G3
  Gene Name: ATPase, H+ transporting, lysosomal 13kDa, V1 subunit G3
  Uniprot ID: Q96LB4
  ENST ID: ENST00000489986
  CDS Start-End: 25-399
gccacttgcttggagcagactaccatgacaagccagtctcaggggatccaccagcttcttcaggcagaaaaacgggccaaggacaagctagaggaagccaagaagaagactgggactgcttctggaaaaggaaagcgattgaagcaagccaaggaggaagcaatggtagaaattgaccagtacagaatgcagagagataaagagtttcgactaaaacaatctaagataatgggctctcagaataatctctcagatgaaatagaagaacaaacactagggaagatacaagaacttaatggacactacaataagtatatggaaagtgtgatgaaccagctcttgagcatggtctgtgacatgaaaccagaaatccatgtgaactacagagccaccaactaaatgtacatcacagttttcaagaaaaaaaaaggtgtgtgagtgccacctgg

SEQ ID NO: 109857 - DNA, 449 bp, Homo sapiens; identical to SEQ ID NO: 109856
  Payload ID: 1565
  Gene Symbol: ATP6V1G3
  Gene Name: ATPase, H+ transporting, lysosomal 13kDa, V1 subunit G3
  Uniprot ID: Q96LB4
  ENST ID: ENST00000575971
  CDS Start-End: 25-399

SEQ ID NO: 109858 - DNA, 611 bp, Homo sapiens; identical to SEQ ID NO: 109855
  Payload ID: 1565
  Gene Symbol: ATP6V1G3
  Gene Name: ATPase, H+ transporting, lysosomal 13kDa, V1 subunit G3
  Uniprot ID: Q96LB4
  ENST ID: ENST00000573121
  CDS Start-End: 86-442

SEQ ID NO: 109859 - DNA, 678 bp, Homo sapiens; identical to SEQ ID NO: 109853
  Payload ID: 1565
  Gene Symbol: ATP6V1G3
  Gene Name: ATPase, H+ transporting, lysosomal 13kDa, V1 subunit G3
  Uniprot ID: Q96LB4
  ENST ID: ENST00000571439
  CDS Start-End: 107-286

SEQ ID NO: 109860 - DNA, 704 bp, Homo sapiens
  Payload ID: 1566
  Gene Symbol: ATP6V1F
  Gene Name: ATPase, H+ transporting, lysosomal 14kDa, V1 subunit F
  Uniprot ID: Q16864
  ENST ID: ENST00000249289
  CDS Start-End: 80-439
gccgacggggcgccgtacggcggaggcggggtttcagtggcttctggtgctctagggtgagctctgcccggctgcagggatggcggggaggggtaagctcatcgcagtgatcggagacgaggacacggtgactggtttcctgctgggcggcataggggagcttaacaagaaccgccatcccaatttcctggtggtggagaaggatacaaccatcaatgagatcgaagacactttccggcaatttctaaaccgggatgacattggcatcatcctcatcaaccagtacatcgcagagatggtgcggcatgccctggacgcccaccagcagtccatccccgctgtcctggagatcccctccaaggagcacccatatgacgccgccaaggactccatcctgcgcagggccaggggcatgttcactgccgaagacctgcgctaggggactcctcatagccctcagcccttccctcgtttccaggcctctccccaggcttgccatcagccttctttactttttgagcctctgatttccaattccctgctccttcccactccattaagaggctaggtgaggcgcttctaggttgctggggctctgctggttaaggaacaggaagcctgaccatctccctccactacctcttccctgtgctgttacacagtgtcattgttgatgttaaattaaagtcatattcttgcttctc

SEQ ID NO: 109861 - DNA, 711 bp, Homo sapiens
  Payload ID: 1566
  Gene Symbol: ATP6V1F
  Gene Name: ATPase, H+ transporting, lysosomal 14kDa, V1 subunit F
  Uniprot ID: Q16864
  ENST ID: ENST00000492758
  CDS Start-End: 2-445
gatggcggggaggggtaagctcatcgcagtgatcggagacgaggacacggtgactggtttcctgctgggcggcataggggagcttaacaagaaccgccatcccaatttcctggtggtggagaaggatacaaccatcaatgagatcgaagacactttccgttcacttggaagccttccgggcagtgttgtagaagccaaccctaatcagcgtgaccctccgctttgggatgaaattgattctaggcaatttctaaaccgggatgacattggcatcatcctcatcaaccagtacatcgcagagatggtgcggcatgccctggacgcccaccagcagtccatccccgctgtcctggagatcccctccaaggagcacccatatgacgccgccaaggactccatcctgcgcagggccaggggcatgttcactgccgaagacctgcgctaggggactcctcatagccctcagcccttccctcgtttccaggcctctccccaggcttgccatcagccttctttactttttgagcctctgatttccaattccctgctccttcccactccattaagaggctaggtgaggcgcttctaggttgctggggctctgctggttaaggaacaggaagcctgaccatctccctccactacctcttccctgtgctgttacacagtgtcattgttgatgttaaattaaagtcatattcttgcttctct

SEQ ID NO: 109862 - DNA, 1175 bp, Homo sapiens
  Payload ID: 1567
  Gene Symbol: ATP6V0C
  Gene Name: ATPase, H+ transporting, lysosomal 16kDa, V0 subunit c
  Uniprot ID: P27449
  ENST ID: ENST00000330398
  CDS Start-End: 235-702
acgcgtctcccccacggtgcgaagtggtacggctcgcaggggcggggcccaggtcatgtgacgcggccgcggccgccattttgttctgcggtgctggtatttagagcgcagcggctgacgggccggatcgccttcgccgccgcccgcccgcaaaccttcgtgcccggcccgtcctcgcccccgcctccgccaccgcctcggcccgcagagcttgccccctccccacccgcagacatgtccgagtccaagagcggccccgagtatgcttcgtttttcgccgtcatgggcgcctcggccgccatggtcttcagcgccctgggcgctgcctatggcacagccaagagcggtaccggcattgcggccatgtctgtcatgcggccggagcagatcatgaagtccatcatcccagtggtcatggctggcatcatcgccatctacggcctggtggtggcagtcctcatcgccaactccctgaatgacgacatcagcctctacaagagcttcctccagctgggcgccggcctgagcgtgggcctgagcggcctggcagccggctttgccatcggcatcgtgggggacgctggcgtgcggggcaccgcccagcagccccgactattcgtgggcatgatcctgattctcatcttcgccgaggtgctcggcctctacggtctcatcgtcgccctcatcctctccacaaagtagaccctctccgagcccaccagccacagaatattatgtaaagaccacccctcctcattccagaacgaacagcctgacacatacgcacggggccgccgcccccagtagttggtcttgtacatgcgcagtgtcctagtgcccatcgtctgtttccccggccttgcccccgcccgccccgtgccgtggacatctgggcccactcatcgcccctccaggcccccggcgccccaccccctagagtgctctgtgtatgcggatgatttagaattgtcatttctctttactggatgtttatttataaagatctggcctgttcctgcgtctgcggagcggcccttgtctcccagctatctataaccttagctagagtgtcgccttgtgggttcctgttgctgagacttcctggatggagccgccctcaccgccgggcccgtggccctgcgcggagctgtgtccaataaagttcttggatgtga

SEQ ID NO: 109863 - DNA, 477 bp, Homo sapiens
  Payload ID: 1567
  Gene Symbol: ATP6V0C
  Gene Name: ATPase, H+ transporting, lysosomal 16kDa, V0 subunit c
  ENST ID: ENST00000568562
  CDS Start-End: 129-320
cgcagcggctgacgggccggatcgccttcgccgccgcccgcccgcaaaccttcgtgcccggcccgtcctcgcccccgcctccgccaccgcctcggcccgcagagcttgccccctccccacccgcagacatgtccgagtccaagagcggccccgaccctgggcgctgcctatggcacagccaagagcggtaccggcattgcggccatgtctgtcatgcggccggagcagatcatgaagtccatcatcccagtggtcatggctggcatcatcgccatctacggcctggtggtggcagtcctcatcgccaactccctgaatgacgacatcagcctctacaagagcttcctccagctgggcgccggcctgagcgtgggcctgagcggcctggcagccggctttgccatcggcatcgtgggggacgctggcgtgcggggcaccgcccagcagccccgactattcgtgggcatgatcctgatt

SEQ ID NO: 109864 - DNA, 1081 bp, Homo sapiens
  Payload ID: 1567
  Gene Symbol: ATP6V0C
  Gene Name: ATPase, H+ transporting, lysosomal 16kDa, V0 subunit c
  ENST ID: ENST00000564973
  CDS Start-End: 270-608
cacgtagaggaaggaggagtggctgtcctggcctccttttgcttgcccgtggctgttcctcctgggtcctcttgccctgggctggatgccttcttcggctccccctctgcatgtgataacttggggtggcccttggagctgtgccaaagctacacctcggggtcctagtctcaactggcctgcgtactgctgtgggctcaccccgccttcctcccacagccctgggcgctgcctatggcacagccaagagcggtaccggcattgcggccatgtctgtcatgcggccggagcagatcatgaagtccatcatcccagtggtcatggctggcatcatcgccatctacggcctggtggtggcagtcctcatcgccaactccctgaatgacgacatcagcctctacaagagcttcctccagctgggcgccggcctgagcgtgggcctgagcggcctggcagccggctttgccatcggcatcgtgggggacgctggcgtgcggggcaccgcccagcagccccgactattcgtgggcatgatcctgattctcatcttcgccgaggtgctcggcctctacggtctcatcgtcgccctcatcctctccacaaagtagaccctctccgagcccaccagccacagaatattatgtaaagaccacccctcctcattccagaacgaacagcctgacacatacgcacggggccgccgcccccagtagttggtcttgtacatgcgcagtgtcctagtgcccatcgtctgtttccccggccttgcccccgcccgccccgtgccgtggacatctgggcccactcatcgcccctccaggcccccggcgccccaccccctagagtgctctgtgtatgcggatgatttagaattgtcatttctctttactggatgtttatttataaagatctggcctgttcctgcgtctgcggagcggcccttgtctcccagctatctataaccttagctagagtgtcgccttgtgggttcctgttgctgagacttcctggatggagccgccctcaccgccgggcccgtggccctgcgcggagctgtgtccaataaagttcttggatgtga

SEQ ID NO: 109865 - DNA, 668 bp, Homo sapiens
  Payload ID: 1567
  Gene Symbol: ATP6V0C
  Gene Name: ATPase, H+ transporting, lysosomal 16kDa, V0 subunit c
  ENST ID: ENST00000565223
  CDS Start-End: 155-493
ggggcgcccgggcctcgtgtgacagcgggcgggggtcggcgccccgagggctgcggggagccgccgggggtccggggcgcagggcgtgcgggcctggccggggtccctgggcgctgcctatggcacagccaagagcggtaccggcattgcggccatgtctgtcatgcggccggagcagatcatgaagtccatcatcccagtggtcatggctggcatcatcgccatctacggcctggtggtggcagtcctcatcgccaactccctgaatgacgacatcagcctctacaagagcttcctccagctgggcgccggcctgagcgtgggcctgagcggcctggcagccggctttgccatcggcatcgtgggggacgctggcgtgcggggcaccgcccagcagccccgactattcgtgggcatgatcctgattctcatcttcgccgaggtgctcggcctctacggtctcatcgtcgccctcatcctctccacaaagtagaccctctccgagcccaccagccacagaatattatgtaaagaccacccctcctcattccagaacgaacagcctgacacatacgcacggggccgccgcccccagtagttggtcttgtacatgcgcagtgtcctagtgcccatcgtctgtttccccggccttgcccccgcccgccccg

SEQ ID NO: 109866 - DNA, 944 bp, Homo sapiens
  Payload ID: 1568
  Gene Symbol: ATP6V0B
  Gene Name: ATPase, H+ transporting, lysosomal 21kDa, V0 subunit b
  Uniprot ID: Q99437
  ENST ID: ENST00000236067
  CDS Start-End: 186-662
gggcgggcggacagactgcgggacggacggtggacgctgggacgcgtttgtagctccggccccgccgttccgacccccgccgccgtcgccgccatgacggggctagcactgctctactccggggtcttcgtggccttctgggcctgcgcgctggccgtgggttcctgacggagacttcgcccttcatgtggtccaacctgggcattggcctagctatctccctgtctgtggttggggcagcctggggcatctatattaccggctcctccatcattggtggaggagtgaaggcccccaggatcaagaccaagaacctggtcagcatcatcttctgtgaggctgtggccatctacggcatcatcatggcaattgtcattagcaacatggctgagcctttcagtgccacagaccccaaggccatcggccatcggaactaccatgcaggctactccatgtttggggctggcctcaccgtaggcctgtctaacctcttctgtggagtctgcgtgggcatcgtgggcagtggggctgccctggccgatgctcagaaccccagcctctttgtaaagattctcatcgtggagatctttggcagcgccattggcctctttggggtcatcgtcgcaattcttcagacctccagagtgaagatgggtgactagatgatatgtgtgggtggggccgtgcctcacttttatttattgctggttttcctgggacagctggagctgtgtcccttagcctttcagaggcttggtgttcagggccctccctgcactcccctcttgctgcgtgttgatttggaggcactgcagtccaggccgagtcctcagtgcggggagcaggctgctgctgctgactctgtgcagctgcgcacctgtgtcccccacctccaccctcaacccatcttcctagtgtttgtgaaataaacttggtatttgtct

SEQ ID NO: 109867 - DNA, 419 bp, Homo sapiens
  Payload ID: 1568
  Gene Symbol: ATP6V0B
  Gene Name: ATPase, H+ transporting, lysosomal 21kDa, V0 subunit b
  ENST ID: ENST00000498208
  CDS Start-End: 1-265
ggccgtgggtgaggccgggtcctggcgggcgggagcagcatcgcggccgagctggccgggtcggaactcggcggggaagtggcctgcggggaatactggccccccgcgcgctctgcacccgaggctctggggacttgcgcctgcgagggcctctgactccgacaaaggagacccggatttccagctgcttgaggaggggtgcgggcgggagtctgctacaccatttttgatttgggcttccgctttgatgtggcatggttcctgacggagacttcgcccttcatgtggtccaacctgggcattggcctagctatctccctgtctgtggttggggcagcctggggcatctatattaccggctcctccatcattggtggaggagtgaaggcccccaggatcaagaccaagaacctggtcag

SEQ ID NO: 109868 - DNA, 1298 bp, Homo sapiens
  Payload ID: 1568
  Gene Symbol: ATP6V0B
  Gene Name: ATPase, H+ transporting, lysosomal 21kDa, V0 subunit b
  Uniprot ID: Q99437
  ENST ID: ENST00000472174
  CDS Start-End: 394-1011
acaggctaggacgcacggctgccagagaggacgccttaggggcccgcgagcaggctcgggaataaaacagggctggcagggcgaggtggagagactcgagaaggaccggccagatgtcgaagttcctagagaggagggcgcccaagcctccgccgagacgcgtgactacaactaccacaatccccagcgcctgcggttccagcgtcgccttgctctagacgggcggcggcgctgcgcggggaaccggcgtggggtcacgtggtaccggcgcatcacgtgggcgagttaggtgacgctgcggggcgggcggacagactgcgggacggacggtggacgctgggacgcgtttgtagctccggccccgccgttccgacccccgccgccgtcgccgccatgacggggctagcactgctctactccggggtcttcgtggccttctgggcctgcgcgctggccgtgggagtctgctacaccatttttgatttgggcttccgctttgatgtggcatggttcctgacggagacttcgcccttcatgtggtccaacctgggcattggcctagctatctccctgtctgtggttggggcagcctggggcatctatattaccggctcctccatcattggtggaggagtgaaggcccccaggatcaagaccaagaacctggtcagcatcatcttctgtgaggctgtggccatctacggcatcatcatggcaattgtcattagcaacatggctgagcctttcagtgccacagaccccaaggccatcggccatcggaactaccatgcaggctactccatgtttggggctggcctcaccgtaggcctgtctaacctcttctgtggagtctgcgtgggcatcgtgggcagtggggctgccctggccgatgctcagaaccccagcctctttgtaaagattctcatcgtggagatctttggcagcgccattggcctctttggggtcatcgtcgcaattcttcagacctccagagtgaagatgggtgactagatgatatgtgtgggtggggccgtgcctcacttttatttattgctggttttcctgggacagctggagctgtgtcccttagcctttcagaggcttggtgttcagggccctccctgcactcccctcttgctgcgtgttgatttggaggcactgcagtccaggccgagtcctcagtgcggggagcaggctgctgctgctgactctgtgcagctgcgcacctgtgtcccccacctccaccctcaacccatcttcctagtgtttgtgaaataaacttggtatttgtctgggtc

SEQ ID NO: 109869 - DNA, 865 bp, Homo sapiens
  Payload ID: 1568
  Gene Symbol: ATP6V0B
  Gene Name: ATPase, H+ transporting, lysosomal 21kDa, V0 subunit b
  ENST ID: ENST00000471859
  CDS Start-End: 91-849
cgggcggacagactgcgggacggacggtggacgctgggacgcgtttgtagctccggccccgccgttccgacccccgccgccgtcgccgccatgacggggctagcactgctctactccggggtcttcgtggccttctgggcctgcgcgctggccgtgggtgaggccgggtcctggcgggcgggagcagcatcgcggccgagctggccgggtcggaactcggcggggaagtggcctgcggggaatactggccccccgcgcgctctgcacccgaggctctggggacttgcgcctgcgagggcctctgactccgacaaaggagacccggatttccagctgcttgaggaggggttcctgacggagacttcgcccttcatgtggtccaacctgggcattggcctagctatctccctgtctgtggttggggcagcctggggcatctatattaccggctcctccatcattggtggaggagtgaaggcccccaggatcaagaccaagaacctggtcagcatcatcttctgtgaggctgtggccatctacggcatcatcatggcaattgtcattagcaacatggctgagcctttcagtgccacagaccccaaggccatcggccatcggaactaccatgcaggctactccatgtttggggctggcctcaccgtaggcctgtctaacctcttctgtggagtctgcgtgggcatcgtgggcagtggggctgccctggccgatgctcagaaccccagcctctttgtaaagattctcatcgtggagatctttggcagcgccattggcctctttggggtcatcgtcgcaattcttcagacctccagagtgaagatgggtgactagatgatatgtgtgggtg

SEQ ID NO: 109870 - DNA, 411 bp, Homo sapiens
  Payload ID: 1568
  Gene Symbol: ATP6V0B
  Gene Name: ATPase, H+ transporting, lysosomal 21kDa, V0 subunit b
  ENST ID: ENST00000472505
  CDS Start-End: 154-411
acgcgcttccctgccactgggttagggaaggcttgccggaaggacgatttcggaggacagcaggtgttagccaggcagcggagcgagcgccaacaggcgcactggggcggagagacgccgtgagcaaggttcctgacggagacttcgcccttcatgtggtccaacctgggcattggcctagctatctccctgtctgtggttggggcagcctggggcatctatattaccggctcctccatcattggtggaggagtgaaggcccccaggatcaagaccaagaacctggtcagcatcatcttctgtgaggctgtggccatctacggcatcatcatggcaattgtcattagcaacatggctgagcctttcagtgccacagaccccaaggccatcggccatcggaactaccatgca

SEQ ID NO: 109871 - DNA, 825 bp, Homo sapiens
  Payload ID: 1568
  Gene Symbol: ATP6V0B
  Gene Name: ATPase, H+ transporting, lysosomal 21kDa, V0 subunit b
  Uniprot ID: Q99437
  ENST ID: ENST00000498664
  CDS Start-End: 61-537
gagctgaactgctttcttctctgcttccacaacaggttcctgacggagacttcgcccttcatgtggtccaacctgggcattggcctagctatctccctgtctgtggttggggcagcctggggcatctatattaccggctcctccatcattggtggaggagtgaaggcccccaggatcaagaccaagaacctggtcagcatcatcttctgtgaggctgtggccatctacggcatcatcatggcaattgtcattagcaacatggctgagcctttcagtgccacagaccccaaggccatcggccatcggaactaccatgcaggctactccatgtttggggctggcctcaccgtaggcctgtctaacctcttctgtggagtctgcgtgggcatcgtgggcagtggggctgccctggccgatgctcagaaccccagcctctttgtaaagattctcatcgtggagatctttggcagcgccattggcctctttggggtcatcgtcgcaattcttcagacctccagagtgaagatgggtgactagatgatatgtgtgggtggggccgtgcctcacttttatttattgctggttttcctgggacagctggagctgtgtcccttagcctttcagaggcttggtgttcagggccctccctgcactcccctcttgctgcgtgttgatttggaggcactgcagtccaggccgagtcctcagtgcggggagcaggctgctgctgctgactctgtgcagctgcgcacctgtgtcccccacctccaccctcaacccatcttcctagtgtttgtgaaataaacttggtatttgtctgggtca

SEQ ID NO: 109872 - DNA, 1685 bp, Homo sapiens
  Payload ID: 1568
  Gene Symbol: ATP6V0B
  Gene Name: ATPase, H+ transporting, lysosomal 21kDa, V0 subunit b
  ENST ID: ENST00000532642
  CDS Start-End: 98-883
tgcggggcgggcggacagactgcgggacggacggtggacgctgggacgcgtttgtagctccggccccgccgttccgacccccgccgccgtcgccgccatgacggggctagcactgctctactccggggtcttcgtggccttctgggcctgcgcgctggccgtgggagtctgctacaccatttttgatttgggcttccgctttgatgtggcatggttcctgacggagacttcgcccttcatgtggtccaacctgggcattggcctagctatctccctgtctgtggttggggcagcctggggcatctatattaccggctcctccatcattggtggaggagtgaaggcccccaggatcaagaccaagaacctggtcagcatcatcttctgtgaggctgtggccatctacggcatcatcatggcaattgtcattagcaacatggctgagcctttcagtgccacagaccccaaggccatcggccatcggaactaccatgcaggctactccatgtttggggctggcctcaccgtaggcctgtctaacctcttctgtggagtctgcgtgggcatcgtgggcagtggggctgccctggccgatgctcagaaccccagcctctttgtaaagattctcatcgtggagatctttggcagcgccattggcctctttggggtcatcgtcgcaattcttcaggtgatgaatccccttgggaagcctctgtgtccttgtccccaacctagccttaccctccttctggagaagctgaagtgctctccttctctacctataactatagattcccccaaacagcttccacctcctcatttccatcttctggttttctcctacaggggctctctatttttgtctctgatttggtgtcactgacaacagccctgttctttttcccccctttctaatgcgttgtatctgtatagcacttagtcctccctctttctgttctctcattttatctgccatgcttttcatgtctccagtctgtatttgtgatctagactagaatggaattttgtctgtctatatcagtctgtcatggtgtgtttgactgtctctcggagctatgtgtatctccctctcacatgcctgtcagtaggacaccattgtctaaattgtgtgtgtctagtctgtctgacagtgtgtgagtttgtgactaaggatcagcctgagggtctgagtgtgactgtgggtgcttgactgagttgattcttagtgactagctttatccatatgccacttctctccgtctgtcccacagcgtaactctgtggttgtctgtccctgtctgccttgtctgtcacagtgtgtccatcctggttagtcatatatctcttgtggtctgtccatccaaccatgtgctagatgtcatcttctatcatttgtcactgccttacctattcctctgtccctgcctgatttctcctgttctttttttgcagacctccagagtgaagatgggtgactagatgatatgtgtgggtggggccgtgcctcacttttatttattgctggttttcctgggacagctggagctgtgtcccttagcctttcagaggcttggtgttcagggccctccctgcactcccctcttgctgcgtgttgatttggaggcactgcagtccaggccgagtcctcagtgcggggagcaggctgctgctgctgactctgtgca

SEQ ID NO: 109873 - DNA, 530 bp, Homo sapiens
  Payload ID: 1568
  Gene Symbol: ATP6V0B
  Gene Name: ATPase, H+ transporting, lysosomal 21kDa, V0 subunit b
  ENST ID: ENST00000461670
  CDS Start-End: 82-222
agactgcgggacggacggtggacgctgggacgcgtttgtagctccggccccgccgttccgacccccgccgccgtcgccgccatgacggggctagcactgctctactccggggtcttcgtggccttctgggcctgcgcgctggccgtggctgtactgtcacctgggggcagcctgaggacgccccttcagggaggtggcccttcagctcggcagctactttaggttgaagaacttctctctaccgagcagcccgtaaccccctttttctccctcactgctgcaggagtctgctacaccatttttgatttgggcttccgctttgatgtggcatggttcctgacggagacttcgcccttcatgtggtccaacctgggcattggcctagctatctccctgtctgtggttggggcagcctggggcatctatattaccggctcctccatcattggtggaggagtgaaggcccccaggatcaagaccaagaacctggtcagcatcatcttctgtgaggctgtggccatctacggcat

SEQ ID NO: 109874 - DNA, 1402 bp, Homo sapiens
  Payload ID: 1569
  Gene Symbol: ATP6V1E1
  Gene Name: ATPase, H+ transporting, lysosomal 31kDa, V1 subunit E1
  Uniprot ID: P36543
  ENST ID: ENST00000253413
  CDS Start-End: 184-864
tcccattggctgagaagggtcatgaggatgaactgtgcagtcacctggcaggaaccggaacccgcggttataaagtaaaggaacccgagatctgcgcaggggttccctttgccgatttctctcacctcacctttcaaacctaaactcgagcctactgttcaccggcctagcattgctctcgccatggctctcagcgatgctgacgtgcaaaagcagataaagcatatgatggctttcattgaacaagaagccaatgagaaagcagaagaaatagatgcaaaggcagaagaagagttcaacatagagaaaggtcggcttgtgcaaacccaaagactaaagattatggaatattatgagaagaaagagaaacagattgagcagcagaagaaaattcagatgtccaatttgatgaatcaagcgagactcaaagtcctcagagcaagagatgaccttatcacagacctactaaatgaagcaaaacagagactcagcaaggtggtaaaagatacaaccaggtaccaagtgctgctggatggactggttctccagggtttgtaccagttgctggagccccgaatgattgttcgttgcaggaaacaagatttccctctggtaaaggctgcagtgcagaaggcaattcctatgtacaaaattgccaccaaaaacgatgttgatgtccaaattgaccaggagtcctacctgcctgaagacatagctggtggagttgagatctataatggagatcgtaaaataaaggtttccaacaccctggaaagccggctggatctcatagcccagcagatgatgccagaagtccggggagccttgtttggtgcaaatgccaacaggaagtttttggactaagccttcaggaggtggagctcgtcgtcagctctcctgctgtgatgtggaagcttctgatatttgaagaaacacgaatgtctctgtagcttcctcttcactgccccagtattgctctgtatttatcagcgatgcccctctgtcactcatgccttgcctaattgttcacaatggtggaaagcttcatgtaatatgatcaggacccacctccagttcttctgaaagtgtgacagtgtccagccggttctgcagcactaggggagggggcagatggtggttgcatgggcttcctgggtctccactctccgtctggcctaaaggtgatgtatttggtgtttggccctgcagtccccactcttgaggcttaaggcgcatgtggcacaccactccttccagcagtagtcgctttactgttacctgtttaggcctagaagttttccctcatctgtaaatgtgatttaaaatctaagccatgaatatgctttatttattaaaagagttatgcggatttaatgtgatttctagtgtaaggcactacaaa

SEQ ID NO: 109875 - DNA, 1208 bp, Homo sapiens
  Payload ID: 1569
  Gene Symbol: ATP6V1E1
  Gene Name: ATPase, H+ transporting, lysosomal 31kDa, V1 subunit E1
  Uniprot ID: P36543
  ENST ID: ENST00000399796
  CDS Start-End: 113-703
aaagtaaaggaacccgagatctgcgcaggggttccctttgccgatttctctcacctcacctttcaaacctaaactcgagcctactgttcaccggcctagcattgctctcgccatggctctcagcgatgctgacgtgcaaaagcagataaagcatatgatggctttcattgaacaagaagccaatgagaaagcagaagaaatagatgcaaaggcagaagaagagttcaacatagagaaaggtcggcttgtgcaaacccaaagactaaagattatggaatattatgagaagaaagagaaacagattgagcagcagaagaaaattcagatgtccaatttgatgaatcaagcgagactcaaagtcctcagagcaagagatgaccttatcacaggtttgtaccagttgctggagccccgaatgattgttcgttgcaggaaacaagatttccctctggtaaaggctgcagtgcagaaggcaattcctatgtacaaaattgccaccaaaaacgatgttgatgtccaaattgaccaggagtcctacctgcctgaagacatagctggtggagttgagatctataatggagatcgtaaaataaaggtttccaacaccctggaaagccggctggatctcatagcccagcagatgatgccagaagtccggggagccttgtttggtgcaaatgccaacaggaagtttttggactaagccttcaggaggtggagctcgtcgtcagctctcctgctgtgatgtggaagcttctgatatttgaagaaacacgaatgtctctgtagcttcctcttcactgccccagtattgctctgtatttatcagcgatgcccctctgtcactcatgccttgcctaattgttcacaatggtggaaagcttcatgtaatatgatcaggacccacctccagttcttctgaaagtgtgacagtgtccagccggttctgcagcactaggggagggggcagatggtggttgcatgggcttcctgggtctccactctccgtctggcctaaaggtgatgtatttggtgtttggccctgcagtccccactcttgaggcttaaggcgcatgtggcacaccactccttccagcagtagtcgctttactgttacctgtttaggcctagaagttttccctcatctgtaaatgtgatttaaaatctaagccatgaatatgctttatttattaaaagagttatgcgga

SEQ ID NO: 109876 - DNA, 994 bp, Homo sapiens
  Payload ID: 1569
  Gene Symbol: ATP6V1E1
  Gene Name: ATPase, H+ transporting, lysosomal 31kDa, V1 subunit E1
  Uniprot ID: P36543
  ENST ID: ENST00000399798
  CDS Start-End: 115-729
ataaagtaaaggaacccgagatctgcgcaggggttccctttgccgatttctctcacctcacctttcaaacctaaactcgagcctactgttcaccggcctagcattgctctcgccatggctctcagcgatgctgacgtgcaaaagcaggcagaagaagagttcaacatagagaaaggtcggcttgtgcaaacccaaagactaaagattatggaatattatgagaagaaagagaaacagattgagcagcagaagaaaattcagatgtccaatttgatgaatcaagcgagactcaaagtcctcagagcaagagatgaccttatcacagacctactaaatgaagcaaaacagagactcagcaaggtggtaaaagatacaaccaggtaccaagtgctgctggatggactggttctccagggtttgtaccagttgctggagccccgaatgattgttcgttgcaggaaacaagatttccctctggtaaaggctgcagtgcagaaggcaattcctatgtacaaaattgccaccaaaaacgatgttgatgtccaaattgaccaggagtcctacctgcctgaagacatagctggtggagttgagatctataatggagatcgtaaaataaaggtttccaacaccctggaaagccggctggatctcatagcccagcagatgatgccagaagtccggggagccttgtttggtgcaaatgccaacaggaagtttttggactaagccttcaggaggtggagctcgtcgtcagctctcctgctgtgatgtggaagcttctgatatttgaagaaacacgaatgtctctgtagcttcctcttcactgccccagtattgctctgtatttatcagcgatgcccctctgtcactcatgccttgcctaattgttcacaatggtggaaagcttcatgtaatatgatcaggacccacctccagttcttctgaaagtgtgacagtgtccagccggttctgcagcactaggggagggggc

SEQ ID NO: 109877 - DNA, 800 bp, Homo sapiens
  Payload ID: 1569
  Gene Symbol: ATP6V1E1
  Gene Name: ATPase, H+ transporting, lysosomal 31kDa, V1 subunit E1
  ENST ID: ENST00000413576
  CDS Start-End: 190-800
cgagatctgcgcaggggttccctttgccgatttctctcacctcacctttcaaacctaaactcgagcctactgttcaccggcctagcattgctctcgccatggctctcagcgatgctgacgtgcaaaagcagataaagcatatgatggctttcattgaacaagaagccaatgagaaagcagaagaaatagatgcaaagtagagacggggtttcaccgtgttggccaggatggtctcaatctcttgaccttgtgatccgcctacctcgtcctccccaagtgctgggattacaggcagaagaagagttcaacatagagaaaggtcggcttgtgcaaacccaaagactaaagattatggaatattatgagaagaaagagaaacagattgagcagcagaagaaaattcagatgtccaatttgatgaatcaagcgagactcaaagtcctcagagcaagagatgaccttatcacagacctactaaatgaagcaaaacagagactcagcaaggtggtaaaagatacaaccaggtaccaagtgctgctggatggactggttctccagggtttgtaccagttgctggagccccgaatgattgttcgttgcaggaaacaagatttccctctggtaaaggctgcagtgcagaaggcaattcctatgtacaaaattgccaccaaaaacgatgttgatgtccaaattgaccaggagtcctacctgcctgaagacatagctggtggagttgagatctataatggagatcgtaaaataaaggtttccaacaccctggaaagccggctggatctcat

SEQ ID NO: 109878 - DNA, 1979 bp, Homo sapiens
  Payload ID: 1570
  Gene Symbol: ATP6V1E2
  Gene Name: ATPase, H+ transporting, lysosomal 31kDa, V1 subunit E2
  Uniprot ID: Q96A05
  ENST ID: ENST00000306448
  CDS Start-End: 1115-1795
ggagaggagggtcaccaactccaggcagggctgctaagtttattacaaacaggcaagactagaatatgtttccactttagtgagtggaaacctaatcattcataggtatcctgtacacacagaacaactatgatgaagagtgaggcctaaatcagaggagacgaggacaataatagtagtagtggtcatgatgataataataactaccagacatgaagattaaccatgcctaacattgtgttaaacgtctcacttctttcatttaatccttacaataatccaatgatgtagctgctattatttttattatacagatgaagaaactgagggcttgaggggtatactgctttgccaaagtcgtacaaatggtaagtgcagaaccaggatctgaattccgtcagtctgactgcagagtccacgccgacaccgtggaagctggtgatgcccattaggccctgtctgggcatgaagaggatgccctccctcatgagctggaacacagcatcccctgttgtgggtgtggctctcttaaagaccatctggtgaattttgcttgtgctggtttcttattaaacaaccttcagatttggcttcacgtgcaactcacatagagggaaaggagaccatgatccgccaacatgacagctgtatttttcattagtaaattagcaaactggctgcctgggtcaccatgcatacctgttaaggtgagcccgccccagagctaaaggctaccatgtgccaacttaactgagattctgagtgtgcaaggataacccccgtcatggccccgggtgccaaggaaatcccttttagcctcctcttggcagacttggccagccttccccagtgacagcctggctctttggattcaagctgcctggtcagactgcaagggtcatctgtacaaagaaggaagcaacagtgccaggttccagcgtgcgttccaagttccacattctgtgtgcagactcccaacgccagagcaaaggcaggcccctggcaggggactgctgagaaagtggaactccagagacactcctgaaattgtcctaagtcaaaggagccaaacggtgtacgagctccctctctgccgtcccctctgagagcagccatggccctgagtgatgtcgatgtgaaaaagcagattaagcacatgatggctttcattgagcaggaagccaatgagaaagcagaggaaatcgatgccaaggctgaggaagagtttaacattgagaaaggacgcctcgtgcaaacccaacgactgaagattatggagtattatgagaaaaaggagaagcagatagagcagcagaagaaaatcctgatgtccaccatgaggaatcaggcgaggctgaaagtcctgagagcccgaaatgacctcatctcagatttgctcagtgaggcgaagctgagactcagcaggattgtggaggacccagaggtctaccaggggctgctggataaactggtgctccagggtctgctccgactgctggaacctgtgatgattgtacgctgccggccacaagacctcctcctggtggaggctgctgtacaaaaagccatccccgagtacatgacaatttcccagaaacatgtggaggtccagattgataaagaggcatacctggctgtgaatgcagctggaggtgtggaggtctacagtggcaatcagagaataaaggtttcaaataccttggaaagccgactggatctctcagccaagcaaaagatgccagaaatacgaatggccttgtttggtgctaacaccaacagaaagttctttatataagcctctgggaagtgaagctagtgttgaaccactaaaccataaaagtttaagttttttggggaaaggaaactagtagtgtttcctcctctttgatgctctgatactgttctgtttttcttcacgaaataccctttggatagctaaagtgttaactttgaaataaagcccaaattaatgctcagaa

SEQ ID NO: 109879 - DNA, 1559 bp, Homo sapiens
  Payload ID: 1570
  Gene Symbol: ATP6V1E2
  Gene Name: ATPase, H+ transporting, lysosomal 31kDa, V1 subunit E2
  Uniprot ID: Q96A05
  ENST ID: ENST00000522587
  CDS Start-End: 715-1395
cgcggccctgccggcgcacccgagccccactccctgcgagggccgcgcggaggggcgcgcaggaggaggaggagccgaggaccgcggaggggaggaggggagtcgcctggggagccgagggctcctcgcgcaagtgcccgcagcgcccggaagcgtccaaaggccccgatgctgggagaagacgtggaggcctctcggggaaccacgacgacctccacgatgacgcaatagtcatgccaaattatacatgcatatttcacctccacccggaaggccagagccatcctctcggcctctaagtgcacaacggaactagaaatcaaggaggagagaccaaaagggaggcctgaactctcaaactccgaatctgatttccactctcccaggaagtcttcggaaatcactgtggattgtcaatacaggagtccatactgactgaatccctaattttggcctgtattcttctccctctgtgaaccatcttcttagaagtcactgaaccaagagtgccagaaaaccatcccaagactcacacagagttgttcttccatagtggatgttttggccactggacatcagaaccacattttgggtttgaagaatcttctacatgctgagaaagtggaactccagagacactcctgaaattgtcctaagtcaaaggagccaaacggtgtacgagctccctctctgccgtcccctctgagagcagccatggccctgagtgatgtcgatgtgaaaaagcagattaagcacatgatggctttcattgagcaggaagccaatgagaaagcagaggaaatcgatgccaaggctgaggaagagtttaacattgagaaaggacgcctcgtgcaaacccaacgactgaagattatggagtattatgagaaaaaggagaagcagatagagcagcagaagaaaatcctgatgtccaccatgaggaatcaggcgaggctgaaagtcctgagagcccgaaatgacctcatctcagatttgctcagtgaggcgaagctgagactcagcaggattgtggaggacccagaggtctaccaggggctgctggataaactggtgctccagggtctgctccgactgctggaacctgtgatgattgtacgctgccggccacaagacctcctcctggtggaggctgctgtacaaaaagccatccccgagtacatgacaatttcccagaaacatgtggaggtccagattgataaagaggcatacctggctgtgaatgcagctggaggtgtggaggtctacagtggcaatcagagaataaaggtttcaaataccttggaaagccgactggatctctcagccaagcaaaagatgccagaaatacgaatggccttgtttggtgctaacaccaacagaaagttctttatataagcctctgggaagtgaagctagtgttgaaccactaaaccataaaagtttaagttttttggggaaaggaaactagtagtgtttcctcctctttgatgctctgatactgttctgtttttcttcacgaaataccctttggatagctaaagtgttaactttgaaataaa

SEQ ID NO: 109880 - DNA, 1845 bp, Homo sapiens
  Payload ID: 1571
  Gene Symbol: ATP6V1D
  Gene Name: ATPase, H+ transporting, lysosomal 34kDa, V1 subunit D
  Uniprot ID: Q9Y5K8
  ENST ID: ENST00000216442
  CDS Start-End: 552-1295
gagaacaaggacgaatgtagatcatggaaggacctgaaaagtactgtttctcgctatcttagctttagctaagtaaccttcaaggcgcgagaaagacataggactccgattccttgcctctgaagaatgaatcctctttcaaagtttcagctaaccatgagatggcgctgtgaccaaagacgaaaggtggagaaagacaaggcgtgcacgcttcgctcctagtctttggcctggcgcgtgccgcgtattgcgcagccgcagggaagctggatggggaggggttgggaggcgaaccggaattgaggggtggttccgcggtgcgcgcgcctcgacatccgggcaacgcctctgttctgtcctcccccttcgtcgcctgtgacaaccggaagcggaagtgaaaatgggtgtccctgctgcctcttagcaacaagaggggtcaagtgacacaaccagctgactcccgtagaggaagacactgtggaggccagttctggagctattgcagcctcggttgcccggccggggacccgagccgaaaagttatcgtcagaatgtcgggcaaagaccgaattgaaatctttccctcgcgaatggcacagaccatcatgaaggctcgtttaaagggagcacagacaggtcgaaacctcctgaagaaaaaatctgatgccttaactcttcgatttcgacagatcctaaagaagataatagagactaaaatgttgatgggcgaagtgatgagagaagctgccttttcactagctgaagccaagttcacagcaggtgacttcagcactacagttatccaaaatgtcaataaagcgcaagtgaagattcgagcgaagaaagataatgtagcaggtgttactttgccagtatttgaacattaccatgaaggaactgacagttatgaactgactggtttagccagaggtggggaacagttggctaaattaaagaggaattatgccaaagcagtggaactactggtggaactagcttctctgcagacttcttttgttactttggatgaagctattaagataaccaacaggcgtgtaaatgccattgaacatgtcatcattccccggattgaacgtactcttgcttatatcatcacagagctggatgagagagagcgagaagagttctataggttaaagaaaatacaagagaagaaaaagattctaaaggaaaaatctgagaaggacttggagcaaaggagagcagctggagaggtgttggagcctgctaatcttctggctgaagagaaggacgaggatcttctatttgaataatctttcctgttctggttctttgagaaaccctaacactggcttcattttaattcacagtgtgtaggtttgatttgtgtggctatttattttttggcctaagaatttcactggttgtaaaatttacctagatgtctatttatgggattacttttgcagaatcataatttagcaaccatttatcatggatgaaagagatctgtaaaacctgcccaggaacttacagaatttactttgcagaagcgttatcatactccatttacatctgtgttacacgtgatctgcttaccaagcatattaggaaatacctcttaggaagcattagcggtctcaggccaattactgtggagcagctttcattcctacccacttgcaaaccttggcgctgttgtctgagattgctgcagccattcttgttaccatggtacttctcaaactttgtgaaaacctgcacttttccttgcatgacaggttcctgtcttgtctgtcatgggagccattctgccaatttaaatgcgactgtggtataaacagtaaaatgatttaaaagtaa

SEQ ID NO: 109881 - DNA, 678 bp, Homo sapiens
  Payload ID: 1571
  Gene Symbol: ATP6V1D
  Gene Name: ATPase, H+ transporting, lysosomal 34kDa, V1 subunit D
  ENST ID: ENST00000553408
  CDS Start-End: 1-135
gtgatgagagaagctgccttttcactagctgaagccaagttcacagcaggtgacttcagcactacagttatccaaaatgtcaataaagcgcaagtgaagattcgagcgaagaaagataatgtagcagcctgctgaactgtaaattctaccatctccactttgcagatgaggaaattgagactttgacaagtcaaagagcacagctggaatgcaagtcaagtatgatttgatttaatttgatctttatattttaagaattacgtactgcctttctaggaggcaaaaattagtttgaagtagggatccagattagtggttttccacatgtaggtaaattcaatgtaaagcaacaagccaaaggaccctagatttctcctgtggcttcttaaatacctggaatgtattggccttgttaaaatacttacaaaagtgcagatgactttatagtttagcatttgttaaaaagaaatcaagaaaacaatggacacataatttgttgtgtggagtcagttatctgaaacataggagaagaatatagatcaggaataggaatggaaagctgaactgtggtgacaggtgtatatatgtaagaaactttttgtttgttggtgtatgatttatgacctttgggagatgtacagcagaaaaaaaggagaaatgaagactggagaaacaaaa

SEQ ID NO: 109882 - DNA, 1085 bp, Homo sapiens
  Payload ID: 1571
  Gene Symbol: ATP6V1D
  Gene Name: ATPase, H+ transporting, lysosomal 34kDa, V1 subunit D
  ENST ID: ENST00000555431
  CDS Start-End: 137-715
gtagaggaagacactgtggaggccagttctggagctattgcagcctcggttgcccggccggggacccgagccgaaaagttatcgtcagaatgtcgggcaaagaccgaattgaaatctttccctcgcgaatactaaaatgttgatgggcgaagtgatgagagaagctgccttttcactagctgaagccaagttcacagcaggtgacttcagcactacagttatccaaaatgtcaataaagcgcaagtgaagattcgagcgaagaaagataatgtagcaggtgttactttgccagtatttgaacattaccatgaaggaactgacagttatgaactgactggtttagccagaggtggggaacagttggctaaattaaagaggaattatgccaaagcagtggaactactggtggaactagcttctctgcagacttcttttgttactttggatgaagctattaagataaccaacaggcgtgtaaatgccattgaacatgtcatcattccccggattgaacgtactcttgcttatatcatcacagagctggatgagagagagcgagaagagttctataggttaaagaaaatacaagagaagaaaaagattctaaaggaaaaatctgagaaggacttggagcaaaggagagcagctggagaggtgttggagcctgctaatcttctggctgaagagaaggacgaggatcttctatttgaataatctttcctgttctggttctttgagaaaccctaacactggcttcattttaattcacagtgtgtaggtttgatttgtgtggctatttattttttggcctaagaatttcactggttgtaaaatttacctagatgtctatttatgggattacttttgcagaatcataatttagcaaccatttatcatggatgaaagagatctgtaaaacctgcccaggaacttacagaatttactttgcagaagcgttatcatactccatttacatctgtgttacacgtgatctgcttaccaagcatattaggaaatacctcttaggaagcattagcggtctcaggccaattactgtggagcagctttcattcctacccacttg

SEQ ID NO: 109883 - DNA, 1102 bp, Homo sapiens
  Payload ID: 1571
  Gene Symbol: ATP6V1D
  Gene Name: ATPase, H+ transporting, lysosomal 34kDa, V1 subunit D
  ENST ID: ENST00000555474
  CDS Start-End: 106-552
caaccagctgactcccgtagaggaagacactgtggaggccagttctggagctattgcagcctcggttgcccggccggggacccgagccgaaaagttatcgtcagaatgtcgggcaaagaccgaattgaaatctttccctcgcgaatggcacagaccatcatgaaggctcgtttaaagggagcacagacaggtcgaaacctcctgaagaaaaaatctgatgccttaactcttcgatttcgacagatcctaaagaagataatagagacttcttttgttactttggatgaagctattaagataaccaacaggcgtgtaaatgccattgaacatgtcatcattccccggattgaacgtactcttgcttatatcatcacagagctggatgagagagagcgagaagagttctataggttaaagaaaatacaagagaagaaaaagattctaaaggaaaaatctgagaaggacttggagcaaaggagagcagctggagaggtgttggagcctgctaatcttctggctgaagagaaggacgaggatcttctatttgaataatctttcctgttctggttctttgagaaaccctaacactggcttcattttaattcacagtgtgtaggtttgatttgtgtggctatttattttttggcctaagaatttcactggttgtaaaatttacctagatgtctatttatgggattacttttgcagaatcataatttagcaaccatttatcatggatgaaagagatctgtaaaacctgcccaggaacttacagaatttactttgcagaagcgttatcatactccatttacatctgtgttacacgtgatctgcttaccaagcatattaggaaatacctcttaggaagcattagcggtctcaggccaattactgtggagcagctttcattcctacccacttgcaaaccttggcgctgttgtctgagattgctgcagccattcttgttaccatggtacttctcaaactttgtgaaaacctgcacttttccttgcatgacaggttcctgtcttgtctgtcatgggagccattctgccaatttaaatgcgactgtggtataaacagtaaaatgatttaaaagtaa

SEQ ID NO: 109884 - DNA, 582 bp, Homo sapiens
  Payload ID: 1571
  Gene Symbol: ATP6V1D
  Gene Name: ATPase, H+ transporting, lysosomal 34kDa, V1 subunit D
  ENST ID: ENST00000555012
  CDS Start-End: 365-582
agagtctgggtcctccgagaacaaggacgaatgtagatcatggaaggacctgaaaagtactgtttctcgctatcttagctttagctaagtaaccttcaaggcgcgagaaagacataggactccgattccttgcctctgaagaatgaatcctctttcaaagtttcagctaaccatgagatggcgctgtgaccaaagacgaaagcggaagtgaaaatgggtgtccctgctgcctcttagcaacaagaggggtcaagtgacacaaccagctgactcccgtagaggaagacactgtggaggccagttctggagctattgcagcctcggttgcccggccggggacccgagccgaaaagttatcgtcagaatgtcgggcaaagaccgaattgaaatctttccctcgcgaatggcacagaccatcatgaaggctcgtttaaagggagcacagacaggtcgaaacctcctgaagaaaaaatctgatgccttaactcttcgatttcgacagatcctaaagaagataatagagactaaaatgttgatgggcgaagtgatgagagaagctgccttttcactagctgaagccaa

SEQ ID NO: 109885 - DNA, 1750 bp, Homo sapiens
  Payload ID: 1571
  Gene Symbol: ATP6V1D
  Gene Name: ATPase, H+ transporting, lysosomal 34kDa, V1 subunit D
  Uniprot ID: Q9Y5K8
  ENST ID: ENST00000554087
  CDS Start-End: 94-837
tcccgtagaggaagacactgtggaggccagttctggagctattgcagcctcggttgcccggccggggacccgagccgaaaagttatcgtcagaatgtcgggcaaagaccgaattgaaatctttccctcgcgaatggcacagaccatcatgaaggctcgtttaaagggagcacagacaggtcgaaacctcctgaagaaaaaatctgatgccttaactcttcgatttcgacagatcctaaagaagataatagagactaaaatgttgatgggcgaagtgatgagagaagctgccttttcactagctgaagccaagttcacagcaggtgacttcagcactacagttatccaaaatgtcaataaagcgcaagtgaagattcgagcgaagaaagataatgtagcaggtgttactttgccagtatttgaacattaccatgaaggaactgacagttatgaactgactggtttagccagaggtggggaacagttggctaaattaaagaggaattatgccaaagcagtggaactactggtggaactagcttctctgcagacttcttttgttactttggatgaagctattaagataaccaacaggcgtgtaaatgccattgaacatgtcatcattccccggattgaacgtactcttgcttatatcatcacagagctggatgagagagagcgagaagagttctataggttaaagaaaatacaagagaagaaaaagattctaaaggaaaaatctgagaaggacttggagcaaaggagagcagctggagaggtgttggagcctgctaatcttctggctgaagagaaggacgaggatcttctatttgaataatctttcctgttctggttctttgagaaaccctaacactggcttcattttaattcacagtgtcctgctgaactgtaaattctaccatctccactttgcagatgaggaaattgagactttgacaagtcaaagagcacagctggaatgcaagtcaaatatgtacaaggatatccacaacactgttcgcagctacaagctgaggtacaaggtgcctcaaaagcttgagagaagcagaaatagaatagaatcctgacctgtgaaaacaatgactctgcaataaggtgcagagttggctggatcactataatatcctagggccaggcgcagtggctcacgcctgtaatcccagcactttgggaggccgaggtgggtggatcacgaggtcaggagatcaagaccatcctggctaacacggtgaaaccccatctctactaaaagtacaaaaaattagctgggtatggtggcgggcacctgtagccccagctactccgaaggctgaggcaggagaatggcgtgaacccaggaggcagagcttgcagtgagctgagatcgtgccactgcactccagcctgggcaacagtgcaagactccatctcaaaaaaaaaaaagcactataatatctaagaaatttggtttgtgtttattagtaaatatgctagatcatcaaagatttaatctagaccttaaaatttgaggtttccgtaggctttattattatatgatacctaatgtttaactgatattttaagccatgtaaacaaagaatacttctgaatgtttcactaaatttcttgagtttttttttttaacttaacctcactaggcctcaatattcagaatgtgaaacaggggagttggattggtgattgctgatatttttttccagctgtaaaataaaggcaatgggtccatttaa

SEQ ID NO: 109886 - DNA, 551 bp, Homo sapiens
  Payload ID: 1571
  Gene Symbol: ATP6V1D
  Gene Name: ATPase, H+ transporting, lysosomal 34kDa, V1 subunit D
  ENST ID: ENST00000556058
  CDS Start-End: 97-357
gactcccgtagaggaagacactgtggaggccagttctggagctattgcagcctcggttgcccggccggggacccgagccgaaaagttatcgtcagaatgtcgggcaaagaccgaattgaaatctttccctcgcgaatggcacagaccatcatgaaggctcgtttaaagggagcacagacaggtcgaaacctcctgaagaaaaaatctgatgccttaactcttcgatttcgacagatcctaaagaagataatagagactaaaatgttgatgggcgaagtgatgagagaagctgccttttcactagctgaagccaagttcacagcaggtgacttcaggtgttactttgccagtatttgaacattaccatgaaggaactgacagttatgaactgactggtttagccagaggtggggaacagttggctaaattaaagaggaattatgccaaagcagtggaactactggtggaactagcttctctgcagacttcttttgttactttggatgaagctattaagataaccaacaggcgtgtaaatgccattgaacatg

SEQ ID NO: 109887 - DNA, 784 bp, Homo sapiens
  Payload ID: 1571
  Gene Symbol: ATP6V1D
  Gene Name: ATPase, H+ transporting, lysosomal 34kDa, V1 subunit D
  ENST ID: ENST00000555625
  CDS Start-End: 1-462
cgagcgaagaaagataatgtagcaggtgttactttgccagtatttgaacattaccatgaaggaactgacagttatgaactgactggtttagccagaggtggggaacagttggctaaattaaagaggaattatgccaaagcagtggaactactggtggaactagcttctctgcagacttcttttgttactttggatgaagctattaagataaccaacaggcgtgtaaatgccattgaacatgtcatcattccccggattgaacgtactcttgcttatatcatcacagagctggatgagagagagcgagaagagttctataggttaaagaaaatacaagagaagaaaaagattctaaaggaaaaatctgagaaggacttggagcaaaggagagcagctggagaggtgttggagcctgctaatcttctggctgaagagaaggacgaggatcttctatttgaataatctttcctgttctggttctttgagaaaccctaacactggcttcattttaattcacagtgtgttcctgtcttgtctgtcatgggagccattctgccaatttaaatgcgactgtggtataaacagtaaaatgatttaaaaagtctcactcattctgtagcccaggctagagtgcagtggcagcaacatcagttcactgcaacgtccgcctcctcaattcaagagattctcctgcttcagtctcccgagtagctgggattacagcctgctgaactgtaaattctaccatctccactttgcagatgaggaaattgagactttgaca

SEQ ID NO: 109888 - DNA, 520 bp, Homo sapiens
  Payload ID: 1571
  Gene Symbol: ATP6V1D
  Gene Name: ATPase, H+ transporting, lysosomal 34kDa, V1 subunit D
  ENST ID: ENST00000555723
  CDS Start-End: 1-360
aagaagataatagagactaaaatgttgatgggcgaagtgatgagagaagctgccttttcactagctgaagccaagttcacagcaggtgacttcagcactacagttatccaaaatgtcaataaagcgcaagtgaagattcgagcgaagaaagataatgtagcaggtgttactttgccagtatttgaacattaccatgaaggaactgacagttatgaactgactggtttagccagaggtggggaacagttggctaaattaaagaggaattatgccaaagcagtggaactactggtggaactagcttctctgcaggttaaagaaaatacaagagaagaaaaagattctaaaggaaaaatctgagaaggacttggagcaaaggagagcagctggagaggtgttggagcctgctaatcttctggctgaagagaaggacgaggatcttctatttgaataatctttcctgttctggttctttgagaaaccctaacactggcttcattttaattcacagtgtgtaggt

SEQ ID NO: 109889 - DNA, 888 bp, Homo sapiens
  Payload ID: 1571
  Gene Symbol: ATP6V1D
  Gene Name: ATPase, H+ transporting, lysosomal 34kDa, V1 subunit D
  ENST ID: ENST00000554236
  CDS Start-End: 90-629
gtagaggaagacactgtggaggccagttctggagctattgcagcctcggttgcccggccggggacccgagccgaaaagttatcgtcagaatgtcgggcaaagaccgaattgaaatctttccctcgcgaatggcacagaccatcatgaaggctcgtttaaagggagcacagacaggtcgaaacctcctgaagaaaaaatctgatgccttaactcttcgatttcgacagatcctaaagaagataatagagactaaaatgttgatgggcgaagtgatgagagaagctgccttttcactagctgaagccaagttcacagcaggtgacttcagcactacagttatccaaaatgtcaataaagcgcaagtgaagattcgagcgaagaaagataatgtagcaggtgttactttgccagtatttgaacattaccatgaaggaactgacagttatgaactgactggtttagccagaggtggggaacagttggctaaattaaagaggaattatgccaaagcagtggaactactggtggaactagcttctctgcagtcatcattccccggattgaacgtactcttgcttatatcatcacagagctggatgagagagagcgagaagagttctataggttaaagaaaatacaagagaagaaaaagattctaaaggaaaaatctgagaaggacttggagcaaaggagagcagctggagaggtgttggagcctgctaatcttctggctgaagagaaggacgaggatcttctatttgaataatctttcctgttctggttctttgagaaaccctaacactggcttcattttaattcacagtgtgtaggtttgatttgtgtggctatttattttttggcctaagaatttcactggttgtaaaattt

SEQ ID NO: 109890 - DNA, 627 bp, Homo sapiens
  Payload ID: 1571
  Gene Symbol: ATP6V1D
  Gene Name: ATPase, H+ transporting, lysosomal 34kDa, V1 subunit D
  ENST ID: ENST00000553687
  CDS Start-End: 450-627
ctcttagcaacaagaggggtcaagtgacacaaccagctgactcccgtagaggaagacactgtggaggccagttctggagctattgcagcctcggttgcccggccggggacccgagccgaaaagttatcgtcagaatgtcgggcaaagaccgaattgaaatctttccctcgcgaatggacagggtcaggtgcagtggttcatgcccataatcccagcactttgggaagctgaggctggaggatttcatgagaccaggagttagaggctgcagcaagctatgatcataccactgcaatccagcctgggtgacagagcaagaccccatctcaaaaaataaggagtcgggccgggcatggtggctcatccctgtaatcccagtactttgggaggctgaagcaggcagatcacttaaagtcaagagttcgagatgagcctgggcacagaccatcatgaaggctcgtttaaagggagcacagacaggtcgaaacctcctgaagaaaaaatctgatgccttaactcttcgatttcgacagatcctaaagaagataatagagactaaaatgttgatgggcgaagtgatgagagaagctgccttttcactagctgaagccaagttcacagcaggtg

SEQ ID NO: 109891 - DNA, 1716 bp, Homo sapiens
  Payload ID: 1572
  Gene Symbol: ATP6V0D1
  Gene Name: ATPase, H+ transporting, lysosomal 38kDa, V0 subunit d1
  Uniprot ID: P61421
  ENST ID: ENST00000290949
  CDS Start-End: 152-1207
agagccacgcccccttatggtcacgtgaggcgcttgcgcgtcacctgacgcacttgacagcccgctgaggacgcagcgtcagctgacctggggagtcgcgattcgtgccggccggtcctggttctccggtcccgccgctcccgcagcagccatgtcgttcttcccggagctttactttaacgtggacaatggctacttggagggactggtgcgcggcctgaaggccggggtgctcagccaggccgactacctcaacctggtgcagtgcgagacgctagaggacttgaaactgcatctgcagagcactgattatggtaacttcctggccaacgaggcatcacctctgacggtgtcagtcatcgatgaccggctcaaggagaagatggtggtggagttccgccacatgaggaaccatgcctatgagccactcgccagcttcctagacttcattacttacagttacatgatcgacaacgtgatcctgctcatcacaggcacgctgcaccagcgctccatcgctgagctcgtgcccaagtgccacccactaggcagcttcgagcagatggaggccgtgaacattgctcagacacctgctgagctctacaatgccattctggtggacacgcctcttgcggcttttttccaggactgcatttcagagcaggaccttgacgagatgaacatcgagatcatccgcaacaccctctacaaggcctacctggagtccttctacaagttctgcaccctactgggcgggactacggctgatgccatgtgccccatcctggagtttgaagcagaccgccgcgccttcatcatcaccatcaattctttcggcacagagctgtccaaagaggaccgtgccaagctctttccacactgtgggcggctctaccctgagggcctggcgcagctggctcgggctgacgactatgaacaggtcaagaacgtggccgattactacccggagtacaagctgctcttcgagggtgcaggtagcaaccctggagacaagacgctggaggaccgattctttgagcacgaggtaaagctgaacaagttggccttcctgaaccagttccactttggtgtcttctatgccttcgtgaagctcaaggagcaggagtgtcgcaacatcgtgtggatcgctgaatgtatcgcccagcgccaccgcgccaaaatcgacaactacatccctatcttctagcgtcctggcccaaggctctcaattgcactctttgtgtgtgtgtgtgtgtgtgtgcgcgtgtgtgtgcgtgtgtgtgtatgtggtctgtgacaagcctgtggctcacctgcctgtccggggtgtagtacgctgtcctagcggctgcccagttctcctgaccctcttagagactgttcttaggcctgaaaaggggctgggcacccccccccaccaaggatggacgaagaccccctccagagcaaggaggccccctcagccctgtggttacagccgctgatgtatctaagaagcatgtcactttcatgttcctccctaactccctgacctgagaaccctggggcctgggggcagtttgagcctcctctcccttctgtgggtcgctcccagagccatggcccatgggaaggacagagtgtgtgtgtccttggggcctggggggatgttgctcctcagctccctccctcagccctgcccctctgagacaataaaactgccctctctaaggccaa

SEQ ID NO: 109892 - DNA, 1257 bp, Homo sapiens
  Payload ID: 1572
  Gene Symbol: ATP6V0D1
  Gene Name: ATPase, H+ transporting, lysosomal 38kDa, V0 subunit d1
  ENST ID: ENST00000426604
  CDS Start-End: 1-176
tttcctgcacttcaagggcttctctctccggcagcctgtggacttccctggagcacttgctggagcagagatcacaggaaggtcactctggccagcaagtagcactgttagaccagtcaagggctgaggaatggatggtgccacaagggatgccagagggacttgtccctgagtgatgacagtccagtgacagtgctgatggtccatgcctgtcagacttgaaactgcatctgcagagcactgattatggtaacttcctggccaacgaggcatcacctctgacggtgtcagtcatcgatgaccggctcaaggagaagatggtggtggagttccgccacatgaggaaccatgcctatgagccactcgccagcttcctagacttcattacttacagttacatgatcgacaacgtgatcctgctcatcacaggcacgctgcaccagcgctccatcgctgagctcgtgcccaagtgccacccactaggcagcttcgagcagatggaggccgtgaacattgctcagacacctgctgagctctacaatgccattctggtggacacgcctcttgcggcttttttccaggactgcatttcagagcaggaccttgacgagatgaacatcgagatcatccgcaacaccctctacaaggcctacctggagtccttctacaagttctgcaccctactgggcgggactacggctgatgccatgtgccccatcctggagtttgaagcagaccgccgcgccttcatcatcaccatcaattctttcggcacagagctgtccaaagaggaccgtgccaagctctttccacactgtgggcggctctaccctgagggcctggcgcagctggctcgggctgacgactatgaacaggtcaagaacgtggccgattactacccggagtacaagctgctcttcgagggtgcaggtagcaaccctggagacaagacgctggaggaccgattctttgagcacgaggtaaagctgaacaagttggccttcctgaaccagttccactttggtgtcttctatgccttcgtgaagctcaaggagcaggagtgtcgcaacatcgtgtggatcgctgaatgtatcgcccagcgccaccgcgccaaaatcgacaactacatccctatcttctagcgtcctggcccaaggctctcaattgcactctttgtgtgtgtgtgtgtgtgtgtgcgcgtgtgtgtgcgtgtgtgtgtatgtggtctgtgacaagcctgtggctcacctgcctgtc

SEQ ID NO: 109893 - DNA, 1262 bp, Homo sapiens
  Payload ID: 1572
  Gene Symbol: ATP6V0D1
  Gene Name: ATPase, H+ transporting, lysosomal 38kDa, V0 subunit d1
  ENST ID: ENST00000540149
  CDS Start-End: 32-1210
gttctccggtcccgccgctcccgcagcagccatgtcgttcttcccggagctttactttaacgtggacaatggctacttggagggactggtgcgcggcctgaaggccggggtgctcagccaggccgactacctcaacctggtgcagtgcgagacgctagaggacttgaaactgcatctgcagagcactgattatggtaacttcctggccaacgaggcatcacctctgacggtgtcagtcatcgatgaccggctcaaggagaagatggtggtggagttccgccacatgaggaaccatgcctatgagccactcgccagcttcctagacttcattacgcaggagtcagaggctgggacacctgaagggccagggaacatgcccaagctaggaagcaggccctctcctggccacaggcctcctttcctgagagtctccttgctgccctggcctccatcaagttacagttacatgatcgacaacgtgatcctgctcatcacaggcacgctgcaccagcgctccatcgctgagctcgtgcccaagtgccacccactaggcagcttcgagcagatggaggccgtgaacattgctcagacacctgctgagctctacaatgccattctggtggacacgcctcttgcggcttttttccaggactgcatttcagagcaggaccttgacgagatgaacatcgagatcatccgcaacaccctctacaaggcctacctggagtccttctacaagttctgcaccctactgggcgggactacggctgatgccatgtgccccatcctggagtttgaagcagaccgccgcgccttcatcatcaccatcaattctttcggcacagagctgtccaaagaggaccgtgccaagctctttccacactgtgggcggctctaccctgagggcctggcgcagctggctcgggctgacgactatgaacaggtcaagaacgtggccgattactacccggagtacaagctgctcttcgagggtgcaggtagcaaccctggagacaagacgctggaggaccgattctttgagcacgaggtaaagctgaacaagttggccttcctgaaccagttccactttggtgtcttctatgccttcgtgaagctcaaggagcaggagtgtcgcaacatcgtgtggatcgctgaatgtatcgcccagcgccaccgcgccaaaatcgacaactacatccctatcttctagcgtcctggcccaaggctctcaattgcactctttgtgtgtgtgtgtgtgtgtg

SEQ ID NO: 109894 - DNA, 821 bp, Homo sapiens
  Payload ID: 1572
  Gene Symbol: ATP6V0D1
  Gene Name: ATPase, H+ transporting, lysosomal 38kDa, V0 subunit d1
  ENST ID: ENST00000566322
  CDS Start-End: 1-215
ccctggagcacttgctggagcagagatcacaggaaggtcactctggccagcaagtagcactgttagaccagtcaagggctgaggtaatgctagggctgagggcacggggcctcacaggctgtgggggagaggcagaactccagcttcagggctacatggactgctgggtgaaggtgacagcgaaccattcaatttggaggacttcattctggtgatgacttgaaactgcatctgcagagcactgattatggtaacttcctggccaacgaggcatcacctctgacggtgtcagtcatcgatgaccggctcaaggagaagatggtggtggagttccgccacatgaggaaccatgcctatgagccactcgccagcttcctagacttcattacttacagttacatgatcgacaacgtgatcctgctcatcacaggcacgctgcaccagcgctccatcgctgagctcgtgcccaagtgccacccactaggcagcttcgagcagatggaggccgtgaacattgctcagacacctgctgagctctacaatgccattctggtggacacgcctcttgcggcttttttccaggactgcatttcagagcaggaccttgacgagatgaacatcgagatcatccgcaacaccctctacaaggcctacctggagtccttctacaagttctgcaccctactgggcgggactacggctgatgccatgtgccccatcctggagtttgaagcagaccgccgcgccttcatcatcaccatcaattctttcggcacagagctgtccaaagaggaccgtgccaagctctttccacactgtgg

SEQ ID NO: 109895 - DNA, 582 bp, Homo sapiens
  Payload ID: 1572
  Gene Symbol: ATP6V0D1
  Gene Name: ATPase, H+ transporting, lysosomal 38kDa, V0 subunit d1
  ENST ID: ENST00000564788
  CDS Start-End: 83-424
gacgcagcgtcagctgacctggggagtcgcgattcgtgccggccggtcctggttctccggtcccgccgctcccgcagcagccatgtcgttcttcccggagctttactttaacgtggacaatggctacttggagggactggtgcgcggcctgaaggccggggtgctcagccaggccgactacctcaacctggtgcagtgcgagacgctagaggacttgaaactgcatctgcagagcactgattatggtaacttcctggccaacgaggcatcacctctgacggtgtcagtcatcgatgaccggctcaaggagaagatggtggtggagttccgccacatgaggaaccatgcctatgagccactcgccagcttcctagacttcattaccggcttttttccaggactgcatttcagagcaggaccttgacgagatgaacatcgagatcatccgcaacaccctctacaaggcctacctggagtccttctacaagttctgcaccctactgggcgggactacggctgatgccatgtgccccatcctggagtttgaagcagaccgccgcgccttcatcatcaccatcaatt

SEQ ID NO: 109896 - DNA, 680 bp, Homo sapiens
  Payload ID: 1572
  Gene Symbol: ATP6V0D1
  Gene Name: ATPase, H+ transporting, lysosomal 38kDa, V0 subunit d1
  ENST ID: ENST00000564615
  CDS Start-End: 1-680
acttgaaactgcatctgcagagcactgattatggtaacttcctggccaacgaggcatcacctctgacggtgtcagtcatcgatgaccggctcaaggagaagatggtggtggagttccgccacatgaggaaccatgcctatgagccactcgccagcttcctagacttcattacttacagttacatgatcgacaacgtgatcctgctcatcacaggcacgctgcaccagcgctccatcgctgagctcgtgcccaagtgccacccactaggcagcttcgagcagatggaggccgtgaacattgctcagacacctgctgagctctacaatgccattctggtggacacgcctcttgcggcttttttccaggactgcatttcagagcaggaccttgacgagatgaacatcgagatcatccgcaacaccctctacaaggcctacctggagtccttctacaagttctgcaccctactgggcgggactacggctgatgccatgtgccccatcctggagagctgtccaaagaggaccgtgccaagctctttccacactgtgggcggctctaccctgagggcctggcgcagctggctcgggctgacgactatgaacaggtcaagaacgtggccgattactacccggagtacaagctgctcttcgagggtgcaggtagcaaccctggagaca

SEQ ID NO: 109897 - DNA, 853 bp, Homo sapiens
  Payload ID: 1572
  Gene Symbol: ATP6V0D1
  Gene Name: ATPase, H+ transporting, lysosomal 38kDa, V0 subunit d1
  ENST ID: ENST00000564191
  CDS Start-End: 1-348
atgtcgttcttcccggagctttactttaacgtggacaatggctacttggagggactggtgcgcggcctgaaggccggggtgctcagccaggccgactacctcaacctggtgcagtgcgagacgctagaggacttgaaactgcatctgcagagcactgattatggtaacttcctggccaacgaggcatcacctctgacggtgtcagtcatcgatgaccggctcaaggagaagatggtggtggagttccgccacatgaggaaccatgcctatgagccactcgccagcttcctagacttcattacgtgcctcaccttgaccttggaggaatttcccctaggcctcatttagctccctcataccctgagttcatctttggtgacagactggaggatagttgtggctactgcagcctaactgtggaatggggcttactgccttcactgcatccccacacagttacagttacatgatcgacaacgtgatcctgctcatcacaggcacgctgcaccagcgctccatcgctgagctcgtgcccaagtgccacccactaggcagcttcgagcagatggaggccgtgaacattgctcagacacctgctgagctctacaatgccattctggtggacacgcctcttgcggcttttttccaggactgcatttcagagcaggaccttgacgagatgaacatcgagatcatccgcaacaccctctacaaggcctacctggagtccttctacaagttctgcaccctactgggcgggactacggctgatgccatgtgccccatcctggagtttgaagcagaccgccgcgccttcatcatcaccatcaattctttcggcacagagctgtcc

SEQ ID NO: 109898 - DNA, 552 bp, Homo sapiens
  Payload ID: 1572
  Gene Symbol: ATP6V0D1
  Gene Name: ATPase, H+ transporting, lysosomal 38kDa, V0 subunit d1
  ENST ID: ENST00000568101
  CDS Start-End: 1-121
gcacttcaagggcttctctctccggcagcctgtggacttccctggagcacttgctggagcagagatcacaggaaggtcactctggccagcaagtagcactgttagaccagtcaagggctgagacttgaaactgcatctgcagagcactgattatggtaacttcctggccaacgaggcatcacctctgacggtgtcagtcatcgatgaccggctcaaggagaagatggtggtggagttccgccacatgaggaaccatgcctatgagccactcgccagcttcctagacttcattacttacagttacatgatcgacaacgtgatcctgctcatcacaggcacgctgcaccagcgctccatcgctgagctcgtgcccaagtgccacccactaggcagcttcgagcagatggaggccgtgaacattgctcagacacctgctgagctctacaatgccattctggtggacacgcctcttgcggcttttttccaggactgcatttcagagcaggaccttgacgagatgaacatcgagatcatccgcaacaccctctacaa

SEQ ID NO: 109899 - DNA, 1048 bp, Homo sapiens
  Payload ID: 1572
  Gene Symbol: ATP6V0D1
  Gene Name: ATPase, H+ transporting, lysosomal 38kDa, V0 subunit d1
  ENST ID: ENST00000563064
  CDS Start-End: 96-269
acagcccgctgaggacgcagcgtcagctgacctggggagtcgcgattcgtgccggccggtcctggttctccggtcccgccgctcccgcagcagccatgtcgttcttcccggagctttactttaacgtggacaatggctacttggagggactggtgcgcggcctgaaggccggggtgctcagccaggccgactacctcaacctggtgcagtgcgagacgctagagggaatggatggtgccacaagggatgccagagggacttgtccctgagtgatgacagtccagtgacagtgctgatggtccatgcctgtcagacttgaaactgcatctgcagagcactgattatggtaacttcctggccaacgaggcatcacctctgacggtgtcagtcatcgatgaccggctcaaggagaagatggtggtggagttccgccacatgaggaaccatgcctatgagccactcgccagcttcctagacttcattacttacagttacatgatcgacaacgtgatcctgctcatcacaggcacgctgcaccagcgctccatcgctgagctcgtgcccaagtgccacccactaggcagcttcgagcagatggaggccgtgaacattgctcagacacctgctgagctctacaatgccattctggtggacacgcctcttgcggcttttttccaggactgcatttcagagcaggaccttgacgagatgaacatcgagatcatccgcaacaccctctacaaggcctacctggagtccttctacaagttctgcaccctactgggcgggactacggctgatgccatgtgccccatcctggagtttgaagcagaccgccgcgccttcatcatcaccatcaattctttcggcacagagctgtccaaagaggaccgtgccaagctctttccacactgtgggcggctctaccctgagggcctggcgcagctggctcgggctgacgactatgaacaggtcaagaacgtggccgattactacccggagtacaagctgctcttcgagggtgcaggtagcaaccctggagacaaga

SEQ ID NO: 109900 - DNA, 768 bp, Homo sapiens
  Payload ID: 1572
  Gene Symbol: ATP6V0D1
  Gene Name: ATPase, H+ transporting, lysosomal 38kDa, V0 subunit d1
  ENST ID: ENST00000561852
  CDS Start-End: 63-206
ggggagtcgcgattcgtgccggccggtcctggttctccggtcccgccgctcccgcagcagccatgtcgttcttcccggagctttactttaacgtggacaatggctacttggagggactggtgcgcggcctgaaggccggggtgctcagccaggccgactacctcaacctggtgcagtgcgagacgctagaggttacagttacatgatcgacaacgtgatcctgctcatcacaggcacgctgcaccagcgctccatcgctgagctcgtgcccaagtgccacccactaggcagcttcgagcagatggaggccgtgaacattgctcagacacctgctgagctctacaatgccattctggtggacacgcctcttgcggcttttttccaggactgcatttcagagcaggaccttgacgagatgaacatcgagatcatccgcaacaccctctacaaggcctacctggagtccttctacaagttctgcaccctactgggcgggactacggctgatgccatgtgccccatcctggagtttgaagcagaccgccgcgccttcatcatcaccatcaattctttcggcacagagctgtccaaagaggaccgtgccaagctctttccacactgtgggcggctctaccctgagggcctggcgcagctggctcgggctgacgactatgaacaggtcaagaacgtggccgattactacccggagtacaagctgctcttcgagggtgcaggtagcaaccctggagacaagacgctggaggaccg

SEQ ID NO: 109901 - DNA, 905 bp, Homo sapiens
  Payload ID: 1572
  Gene Symbol: ATP6V0D1
  Gene Name: ATPase, H+ transporting, lysosomal 38kDa, V0 subunit d1
  ENST ID: ENST00000565835
  CDS Start-End: 1-698
tcttcccggagctttactttaacgtggacaatggctacttggagggactggtgcgcggcctgaaggccggggtgctcagccaggccgactacctcaacctggtgcagtgcgagacgctagaggcggcttttttccaggactgcatttcagagcaggaccttgacgagatgaacatcgagatcatccgcaacaccctctacaaggcctacctggagtccttctacaagttctgcaccctactgggcgggactacggctgatgccatgtgccccatcctggagtttgaagcagaccgccgcgccttcatcatcaccatcaattctttcggcacagagctgtccaaagaggaccgtgccaagctctttccacactgtgggcggctctaccctgagggcctggcgcagctggctcgggctgacgactatgaacaggtcaagaacgtggccgattactacccggagtacaagctgctcttcgagggtgcaggtagcaaccctggagacaagacgctggaggaccgattctttgagcacgaggtaaagctgaacaagttggccttcctgaaccagttccactttggtgtcttctatgccttcgtgaagctcaaggagcaggagtgtcgcaacatcgtgtggatcgctgaatgtatcgcccagcgccaccgcgccaaaatcgacaactacatccctatcttctagcgtcctggcccaaggctctcaattgcactctttgtgtgtgtgtgtgtgtgtgtgcgcgtgtgtgtgcgtgtgtgtgtatgtggtctgtgacaagcctgtggctcacctgcctgtccggggtgtagtacgctgtcctagcggctgcccagttctcctgaccctcttagagactgttcttaggcctgaaaaggggctgggcaccccccc

SEQ ID NO: 109902 - DNA, 1554 bp, Homo sapiens
  Payload ID: 1572
  Gene Symbol: ATP6V0D1
  Gene Name: ATPase, H+ transporting, lysosomal 38kDa, V0 subunit d1
  ENST ID: ENST00000602876
  CDS Start-End: 256-1080
ggtcccgccgctcccgcagcagccatgtcgttcttcccggagctttactttaacgtggacaatggctacttggagggactggtgcgcggcctgaaggccggggtgctcagccaggccgactacctcaacctggtgcagtgcgagacgctagaggacttgaaactgcatctgcagagcactgattatggtaacttcctggccaacgaggcatcacctctgacggtgtcagtcatcgatgaccggctcaaggagaagatggtggtggagttccgccacatgaggaaccatgcctatgagccactcgccagcttcctagacttcattacttacagttacatgatcgacaacgtgatcctgctcatcacaggcacgctgcaccagcgctccatcgctgagctcgtgcccaagtgccacccactaggcagcttcgagcagatggaggccgtgaacattgctcagacacctgctgagctctacaatgccattctggtggacacgcctcttgcggcttttttccaggactgcatttcagagcaggaccttgacgagatgaacatcgagatcatccgcaacaccctctacaaggcctacctggagtccttctacaagttctgcaccctactgggcgggactacggctgatgccatgtgccccatcctggagtttgaagcagaccgccgcgccttcatcatcaccatcaattctttcggcacagagctgtccaaagaggaccgtgccaagctctttccacactgtgggcggctctaccctgagggcctggcgcagctggctcgggctgacgactatgaacaggtcaagaacgtggccgattactacccggagtacaagctgctcttcgagggtgcaggtagcaaccctggagacaagacgctggaggaccgattctttgagcacgaggtaaagctgaacaagttggccttcctgaaccagttccactttggtgtcttctatgccttcgtgaagctcaaggagcaggagtgtcgcaacatcgtgtggatcgctgaatgtatcgcccagcgccaccgcgccaaaatcgacaactacatccctatcttctagcgtcctggcccaaggctctcaagtgtgtgtgcgtgtgtgtgtatgtggtctgtgacaagcctgtggctcacctgcctgtccggggtgtagtacgctgtcctagcggctgcccagttctcctgaccctcttagagactgttcttaggcctgaaaaggggctgggcacccccccccaccaaggatggacgaagaccccctccagagcaaggaggccccctcagccctgtggttacagccgctgatgtatctaagaagcatgtcactttcatgttcctccctaactccctgacctgagaaccctggggcctgggggcagtttgagcctcctctcccttctgtgggtcgctcccagagccatggcccatgggaaggacagagtgtgtgtgtccttggggcctggggggatgttgctcctcagctccctccctcagccctgcccctctgagacaataaaactgccctctctaaggccaa

SEQ ID NO: 109903 - DNA, 2446 bp, Homo sapiens
  Payload ID: 1573
  Gene Symbol: ATP6V0D2
  Gene Name: ATPase, H+ transporting, lysosomal 38kDa, V0 subunit d2
  Uniprot ID: Q8N8Y2
  ENST ID: ENST00000285393
  CDS Start-End: 143-1195
acaaaaaccctgactatcacctgatagattgcttgtgctgcctgataattactcgcacttttcccaggctagtgcaaatcttcaggggccgtccaggactacagagctgtttcaccctaccttggcttcaatctcttcccccatgctcgaaggtgcggagctgtacttcaacgtggaccatggctacctggagggcctggttcgaggatgcaaggccagcctcctgacccagcaagactatatcaacctggtccagtgtgagaccctagaagacctgaaaattcatctccagactactgattatggtaactttttggctaatcacacaaatcctcttactgtttccaaaattgacactgagatgaggaaaagactatgtggagaatttgagtatttccggaatcattccctggagcccctcagcacatttctcacctatatgacgtgcagttatatgatagacaatgtgattctgctgatgaatggtgcattgcagaaaaaatctgtgaaagaaattctggggaagtgccaccccttgggccgtttcacagaaatggaagctgtcaacattgcagagacaccttcagatctctttaatgccattctgatcgaaacgccattagctccattcttccaagactgcatgtctgaaaatgctctagatgaactgaatattgaattgctacgcaataaactatacaagtcttaccttgaggcattctataaattctgtaagaatcatggtgatgtcacagcagaagttatgtgtcccattcttgagtttgaggccgacagacgtgcttttatcatcactcttaactcctttggcactgaattgagcaaagaagaccgagagaccctctatccaaccttcggcaaactctatcctgaggggttgcggctgttggctcaagcagaagactttgaccagatgaagaacgtagcggatcattacggagtatacaaacctttatttgaagctgtaggtggcagtgggggaaagacattggaggacgtgttttacgagcgtgaggtacaaatgaatgtgctggcattcaacagacagttccactacggtgtgttttatgcatatgtaaagctgaaggaacaggaaattagaaatattgtgtggatagcagaatgtatttcacagaggcatcgaactaaaatcaacagttacattccaattttataacccaagtaaggttctcaaatgtagaaaattataaatgttaaaaggaagttattgaagaaaataaaagaaattatgttatattatctagactacacaaaagtaagccacactatatcttcatgagttgcaaatccatggaaacacagtaaaccagccctgaaacaaagcatttccttgttttcagtggtattagatcttgtttccacatgtctgtctcattcttcactgggccttacaggttagttttaattaactctatggtatttttcttattcttgtttgatcatgttaaaaattggacctaataaaagtattttattcttgcttttccatgcttctctacaggtccaaatactgaatgtctcctttactttttctcttttaaatttttttctagacagggtctcactctgtcacctaggctacagtgcagtggtgtgatcacagctcactgcagcctcgacttcccaggctcaagtgatcctcccagctctcagcctccaaagtagctggcactacaagtgtacacccccacacaaggctaagttttgtattttttgtagagacagggtttcaacatattatccaggctggtgtcgaattcctgggctccagggatccacagtcccccttggcctcccaaagtgttgggattacatgcatgagccactgtgctgggcttcatttacattttaactgtctgttccttgcctagattcacagaaatccaaagctgtatgtagtcaacatggttcacaagtgttggaaaatgtgttttttgttttgttttgttttgtttcgttttgttttgagacagagtttccctctgtcgcccaggctagagtgcaatggcgtgatctcggctcactgcaacctccacctcccagattcaagcaactctctgcctcagcctcccgagtagctgggattacaagcacccaccactacactcagctaattttttgtatttttagtagagccggggtttcaccatcttggccaggctgatcttgaactcctgagctcatgatccacccgcctcagcctcccaaagtgctgggattacaggccccttgttcagccactgcacctggccccttattttgtttttgttttctaatatactttgatgtaatcagcttgagaaagcaacacaatttcaaatcctatcttctagatgcaagcagtgttaaatttgttaataaatttgcttttcacacctttctttaaataaaaggtatatctctcttt

SEQ ID NO: 109904 - DNA, 504 bp, Homo sapiens
  Payload ID: 1573
  Gene Symbol: ATP6V0D2
  Gene Name: ATPase, H+ transporting, lysosomal 38kDa, V0 subunit d2
  ENST ID: ENST00000523635
  CDS Start-End: 375-504
taaaatcacagataaaataagttcctatggtgaggaatggaggcctccagctgacagagagcaaagaactgaggcctgcgacaactataggcgtgatcctgggaaccgattctcaacctcatctgagccttgagacgactgctgctctggccgacagcctgacggcaacctcctgagacagctctgagaggagattttccaggttcaagtcccgagacgaggtttcaccgtgctggccaagctggtctccacctcaggtgatctgccccgctaagcctccgcaagtgctgggattacaggctagtgcaaatcttcaggggccgtccaggactacagagctgtttcaccctaccttggcttcaatctcttcccccatgctcgaaggtgcggagctgtacttcaacgtggaccatggctacctggagggcctggttcgaggatgcaaggccagcctcctgacccagcaagactatatcaacctggtccagtgtgagaccctagaag

SEQ ID NO: 109905 - DNA, 448 bp, Homo sapiens
  Payload ID: 1573
  Gene Symbol: ATP6V0D2
  Gene Name: ATPase, H+ transporting, lysosomal 38kDa, V0 subunit d2
  ENST ID: ENST00000521564
  CDS Start-End: 341-448
aacctgggatgagatcctcgtttcagaaaatgatttgatcctcctgaaggcgctccctgctaaggatctaaactcaggagacgggatttcaccatgtttgccaggctggtcttgaactcctgacctgaagtgatctgcccacctcagcctcccaaagtgttgggattacagagcatctctcagggattcttaaaataaaataagtcactgtgaatacacaaaggaaatgaaaacatatacagagtgtgaaataacagccaaaaaggctagtgcaaatcttcaggggccgtccaggactacagagctgtttcaccctaccttggcttcaatctcttcccccatgctcgaaggtgcggagctgtacttcaacgtggaccatggctacctggagggcctggttcgaggatgcaaggccagcctcctgacccagcaagactatatcaacctg

SEQ ID NO: 109906 - DNA, 5612 bp, Homo sapiens
  Payload ID: 1574
  Gene Symbol: ATP6V1C1
  Gene Name: ATPase, H+ transporting, lysosomal 42kDa, V1 subunit C1
  Uniprot ID: P21283
  ENST ID: ENST00000395862
  CDS Start-End: 160-1308
gctgggctggcacgtgacttgttctgtgttcgcttgggtagaggaagccgtgaggccggagcttaggtcgggaagggatggatcgctgagccgatagcgtccgctaggctgtctgcctcgaatctctcttgatttttgaggaaatacctagtaacaaacatgactgagttctggcttatatctgctcctggggagaaaacctgtcagcaaacatgggagaaattgcatgcggcaacttcaaagaacaataatcttgctgtcacttccaagttcaatattcctgacttaaaggttggcacgttggatgtcttggttggcttgtcagatgaactggctaaactggatgcatttgtagaaggagtggttaagaaagtagctcaatacatggctgatgtattggaagatagcaaagacaaagttcaagagaatctgttggctaatggagtggacttggttacttatataacaaggttccagtgggacatggccaaatatccaatcaagcagtccctgaaaaatatttctgaaataattgccaagggagtaactcagattgataatgacctgaaatctcgagcatctgcatacaataacctgaaaggaaatcttcagaatttggaacgaaagaatgcaggaagtttgctaactagaagtctagcagaaattgtgaagaaggatgactttgttcttgattcagagtatctcgtcacattactggtagtagttcccaagttaaaccacaacgactggattaagcagtatgaaacactagccgaaatggtagttccaaggtctagcaatgttctttcagaggaccaagacagttacctgtgtaatgtcaccttgtttaggaaggcagttgatgacttcagacacaaagccagagaaaacaaattcattgttcgtgacttccagtataatgaagaggagatgaaagcagataaagaagaaatgaacaggctttctactgataagaaaaaacaatttggaccacttgtacggtggctgaaagtgaattttagtgaagcatttattgcatggattcacgtgaaagcattacgggttttcgttgagtctgttttaaggtatggcttgccagtgaacttccaagcaatgctacttcagcccaataagaaaactttgaagaaactgagagaagtattacatgaattgtataaacatctagacagcagtgcagcagctattattgatgctcctatggatattccaggtttaaacctgagtcaacaagaatactacccctatgtgtactacaagattgattgcaacttgctggaattcaagtgaaaatgggctcctcccccgacaatcctgtccttgtgtttgtgtgtgctaacagaaataagttgcagtatggtcgtacttttaactctagtatcctttgcttgcttcttacgccctttcctaggtgaattctcccacagtggtctgtatctcaacattttctttttaaaggaaaaaatatatatatatagtttctttttattgatcaggtctgtaaatgtgtactaaaaaaatcagagtttatttataaacaaaatagtttatttaaagagaaggtctcttccttattgatatcatggtatgcattaattccatttgttactattgtgcacaaaagccctgttcacaggggaatggtgtaaacatttatactgttttgttcactgtatttagtagacataactgttgaatagttactgaatcatgatgtaaagaatatgtgaccatcttcaggtatgggatttctgaacgtttcaaatttcaatcaatgagcactgtcaacacccacaggagagaataaaattacctgtgcaaaggtgtattgtggtgtgtgtaacttaagattacagttctgtttgagagttaaatgatgtcatagctcacttgctatgctgcttccaggattttgttatatgctgaggtgtaaccatttgtgttgtctgactttcgtatgatttaattgagccaaatttgggtcagaacacaaatttgaagatgacttttcagtatatgatgggtatttacatttgaacactagaattttaggtctctcaaataattaagaatagagccagttttgaataaagtctagcagaactatgcagctttagtcatttgttttgtctaagtctgtattttatgtgttgtcttcttaagatctataattttggcatttatgtcatttgtgacatagtctgaaaatagagacattgttggcctttaaaatctcagaaatgaatgacttaatttagtgtcctgaaagagcttttaaaagaggattttgtggcaatgtttctcttactacgtactcacaggtttgcaaatgggaaaaaagtttacatttcagtttaggggcatatctaagctatgctattccctttagaaaattagcctccaaaatcttttgtttcaaaatattatattatttcataaataatttcaagcaaatacagacatccacaatgtagaacatgagagaccccctccctcaatttccacctcccaagggaagtttatgtatttttctaggcccttttctatgtctttacatctctgtctcacacacacacacgtatacacacacacagtttatttttaataaaataggattataccacacacatcctgtcacttgcttttttgcttaagagtatatctaagagaatcctttgtgtcagtgaagctggagctacctcattcttttaactggctgcgtggcgttccattgagtgtctgtcatcatgtgtttagccgagtggatggatagtctgcttgtttttagtttttgctcttaacaaacactgctgcagtcagcatccttgcacagatttctttgtatacttgtattagtatttctgtaagatctgagaagtggaatttgtagggtcataggttatgtacacttaagtttttgacactcactgccaagtcatctgtcagaattctaaactaaagacatgtttggagtgtggatttatcttcagtttttctttggacaagaggaagctgtgaaagattttgctatcagaaaattttggttctttgtcttttgcacatgttctttgagtcttagtatctgtaacgtggcgctactctctctatcatgggggggcatgttttgacattaaattgacttttaagaaaaacatgtcactaacctgaagctcagccacacagtgacttttaaggttttatttagactttactgttgttctcatgagagtaggtacagactgcataaggtttagaatcccagcatatgtctgaaacgacgggactttcactgtgatttccaccagagaaattatagcagagtggctgagcatgtgctctgaggccaggccccagctctgctgctgacgagctgtgtggtcctgggcagagtggtctccgagttccagtccctcctctgtaaaatgggcatgattagagtgcccaccgcattagggatgttggggtgagtcagtgtgaccccacgtgcacagaaagtgctgcgagtggtgcatggtgagaggttgatgcaggtacttagcccttggggaacacaggtagttccttttcactgtgtttaatttgggaaaatccagatccacatcattgtagagtctgagggttagaaggaagtcattgtgtctaacataacaacagagcagtttgtgtcactgagctccagtctgtgctggattattgatattgttggtggcggtcaccattcctggaaagggactgtcccaagccacttaccttcccgaggagtctgctggttctccttgaggatagtgcttagataacagactcattaaacatttactgagtgtctgtcagggatcattcacatccacatcatcctcccggcccctccccgtgttgttcatggagggagtactggcggtccccattttcatgtatggagacttcaggtgaaagaagttaagtgaattctttgttgagtcacaaatcttgagccagtcagaatttgaacctaagatttttgactgctggttgtcacacttcccgccccacactcaactgttgtgtgaatgagccagacacattgcttaacctgagtccgagatggacaatggtataggaaagatattcggtatggagaatcagatgttaacttgtgttgctatttttgttttgttttgttttgttttgtttttgagacaaggtcttgctctgtcacccaggctagagtgcagtggcatgatcagggcttactgcagcctcaccctcgatttcctgggctcaagcaatcctcccacctcagcccccaagtagctgggcctacaggtgcgtgctaccacgcctggccaattttttaaattttagcacagatgaggtctcactatgttgcccgggctggtctcgaactcctgagctcaagggatcctcccgcctcagcctcccaaagtgctggtgttacaggcataagccaccacgcctggcctgtgttgctattatatttggcaggaacccagagtccagaacatttcatctatgatgggttagataatgtgtctagttgtttgcatgccaatttcagtagcctcagttattcaacctaggagatttttctacctctttactaccctgctgaagttgctcttcagcagaaaatctttgtggaacacattccacactttgaaatcttcgtggaacaaaagatatttgtggaaccaatctttgtggaacatattccagctttttgaatgagtgcatatccagtagtacctttaaagtaacactttgtacataacaaatactcagcaaatgtgaaactttatttgctcttacttcaaaattagtccaaaatgttggaaataaaatataagacattgatctagatatgaggtttttctccttcattctcagctgtcgaagaaatcaaagtagcatatgcacaaggttaaaaaccacatatacaaatactatagaacagcttataatgaaaaccttgcctgcctttataaaaaatgtgattatcttcttctgttaatgtcaataaaagatggtttgtcctagaaggtctataaatggtattatgttctggaggaaacctagcaaaaactttgctagtttagtacttgtctctaaattgatgttcacccatttcaatattgcacttattaatggtctttatttttctagcatagataacaattgattctttagattcatatatggaggtaattcttgctttctaaagaaaggaatatggcacattggaaccattttattcaccagtggatttacccttagagtatttttagatctgagctgatgacttgtgagagaaaaagggaacagagtaaagccatggaagccatgaacagtaagagactgccgcctggcatggtttcttcttctgcagaagatgaaactgaggagaaacaagacaacatccttcataccaggaatggtcaagataatgcaagaagaaaaaagctttcaaacaaatcagaaggcagtcaacaaacagaaagggggacattccttccctggcagttactcaaaactgaaattgcttattgtgtacaccggggcttgtacttggggaatttaataaaaatgctcattaccaa

SEQ ID NO: 109907 - DNA, 1501 bp, Homo sapiens
  Payload ID: 1574
  Gene Symbol: ATP6V1C1
  Gene Name: ATPase, H+ transporting, lysosomal 42kDa, V1 subunit C1
  ENST ID: ENST00000518857
  CDS Start-End: 146-1069
gctgggctggcacgtgacttgttctgtgttcgcttgggtagaggaagccgtgaggccggagcttaggtcgggaagggatggatcgctgagccgatagcgtccgctaggctgtctgcctcgagtggttaagaaagtagctcaatacatggctgatgtattggaagatagcaaagacaaagttcaagagaatctgttggctaatggagtggacttggttacttatataacaaggttccagtgggacatggccaaatatccaatcaagcagtccctgaaaaatatttctgaaataattgccaagggagtaactcagattgataatgacctgaaatctcgagcatctgcatacaataacctgaaaggaaatcttcagaatttggaacgaaagaatgcaggaagtttgctaactagaagtctagcagaaattgtgaagaaggatgactttgttcttgattcagagtatctcgtcacattactggtagtagttcccaagttaaaccacaacgactggattaagcagtatgaaacactagccgaaatggtagttccaaggtctagcaatgttctttcagaggaccaagacagttacctgtgtaatgtcaccttgtttaggaaggcagttgatgacttcagacacaaagccagagaaaacaaattcattgttcgtgacttccagtataatgaagaggagatgaaagcagataaagaagaaatgaacaggctttctactgataagaaaaaacaatttggaccacttgtacggtggctgaaagtgaattttagtgaagcatttattgcatggattcacgtgaaagcattacgggttttcgttgagtctgttttaaggtatggcttgccagtgaacttccaagcaatgctacttcagcccaataagaaaactttgaagaaactgagagaagtattacatgaattgtataaacatctagacagcagtgcagcagctattattgatgctcctatggatattccaggtttaaacctgagtcaacaagaatactacccctatgtgtactacaagattgattgcaacttgctggaattcaagtgaaaatgggctcctcccccgacaatcctgtccttgtgtttgtgtgtgctaacagaaataagttgcagtatggtcgtacttttaactctagtatcctttgcttgcttcttacgccctttcctaggtgaattctcccacagtggtctgtatctcaacattttctttttaaaggaaaaaatatatatatatagtttctttttattgatcaggtctgtaaatgtgtactaaaaaaatcagagtttatttataaacaaaatagtttatttaaagagaaggtctcttccttattgatatcatggtatgcattaattccatttgttactattgtgcacaaaagccctgttcacaggggaatggtgtaaacatttatactgttttgttcactgtatttagtagacataactgttgaatagttactgaatcatgatgtaaaga

SEQ ID NO: 109908 - DNA, 1484 bp, Homo sapiens
  Payload ID: 1574
  Gene Symbol: ATP6V1C1
  Gene Name: ATPase, H+ transporting, lysosomal 42kDa, V1 subunit C1
  ENST ID: ENST00000521514
  CDS Start-End: 232-1155
gtgttcgcttgggtagaggaagccgtgaggccggagcttaggtcgggaagggatggatcgctgagccgatagcgtccgctaggctgtctgcctcggtacctgttactgctgctacttcctcgtttgacaccttcctgggttggcacgttggatgtcttggttggcttgtcagatgaactggctaaactggatgcatttgtagaaggagtggttaagaaagtagctcaatacatggctgatgtattggaagatagcaaagacaaagttcaagagaatctgttggctaatggagtggacttggttacttatataacaaggttccagtgggacatggccaaatatccaatcaagcagtccctgaaaaatatttctgaaataattgccaagggagtaactcagattgataatgacctgaaatctcgagcatctgcatacaataacctgaaaggaaatcttcagaatttggaacgaaagaatgcaggaagtttgctaactagaagtctagcagaaattgtgaagaaggatgactttgttcttgattcagagtatctcgtcacattactggtagtagttcccaagttaaaccacaacgactggattaagcagtatgaaacactagccgaaatggtagttccaaggtctagcaatgttctttcagaggaccaagacagttacctgtgtaatgtcaccttgtttaggaaggcagttgatgacttcagacacaaagccagagaaaacaaattcattgttcgtgacttccagtataatgaagaggagatgaaagcagataaagaagaaatgaacaggctttctactgataagaaaaaacaatttggaccacttgtacggtggctgaaagtgaattttagtgaagcatttattgcatggattcacgtgaaagcattacgggttttcgttgagtctgttttaaggtatggcttgccagtgaacttccaagcaatgctacttcagcccaataagaaaactttgaagaaactgagagaagtattacatgaattgtataaacatctagacagcagtgcagcagctattattgatgctcctatggatattccaggtttaaacctgagtcaacaagaatactacccctatgtgtactacaagattgattgcaacttgctggaattcaagtgaaaatgggctcctcccccgacaatcctgtccttgtgtttgtgtgtgctaacagaaataagttgcagtatggtcgtacttttaactctagtatcctttgcttgcttcttacgccctttcctaggtgaattctcccacagtggtctgtatctcaacattttctttttaaaggaaaaaatatatatatatagtttctttttattgatcaggtctgtaaatgtgtactaaaaaaatcagagtttatttataaacaaaatagtttatttaaagagaaggtctcttccttattgatatcatggtatgcattaattccatttgttactattgtgcac

SEQ ID NO: 109909 - DNA, 2130 bp, Homo sapiens
  Payload ID: 1574
  Gene Symbol: ATP6V1C1
  Gene Name: ATPase, H+ transporting, lysosomal 42kDa, V1 subunit C1
  Uniprot ID: P21283
  ENST ID: ENST00000518738
  CDS Start-End: 164-1312
agaggaagccgtgaggccggagcttaggtcgggaagggatggatcgctgagccgatagcgtccgctaggctgtctgcctcggtacctgttactgctgctacttcctcgtttgacaccttcctggaatctctcttgatttttgaggaaatacctagtaacaaacatgactgagttctggcttatatctgctcctggggagaaaacctgtcagcaaacatgggagaaattgcatgcggcaacttcaaagaacaataatcttgctgtcacttccaagttcaatattcctgacttaaaggttggcacgttggatgtcttggttggcttgtcagatgaactggctaaactggatgcatttgtagaaggagtggttaagaaagtagctcaatacatggctgatgtattggaagatagcaaagacaaagttcaagagaatctgttggctaatggagtggacttggttacttatataacaaggttccagtgggacatggccaaatatccaatcaagcagtccctgaaaaatatttctgaaataattgccaagggagtaactcagattgataatgacctgaaatctcgagcatctgcatacaataacctgaaaggaaatcttcagaatttggaacgaaagaatgcaggaagtttgctaactagaagtctagcagaaattgtgaagaaggatgactttgttcttgattcagagtatctcgtcacattactggtagtagttcccaagttaaaccacaacgactggattaagcagtatgaaacactagccgaaatggtagttccaaggtctagcaatgttctttcagaggaccaagacagttacctgtgtaatgtcaccttgtttaggaaggcagttgatgacttcagacacaaagccagagaaaacaaattcattgttcgtgacttccagtataatgaagaggagatgaaagcagataaagaagaaatgaacaggctttctactgataagaaaaaacaatttggaccacttgtacggtggctgaaagtgaattttagtgaagcatttattgcatggattcacgtgaaagcattacgggttttcgttgagtctgttttaaggtatggcttgccagtgaacttccaagcaatgctacttcagcccaataagaaaactttgaagaaactgagagaagtattacatgaattgtataaacatctagacagcagtgcagcagctattattgatgctcctatggatattccaggtttaaacctgagtcaacaagaatactacccctatgtgtactacaagattgattgcaacttgctggaattcaagtgaaaatgggctcctcccccgacaatcctgtccttgtgtttgtgtgtgctaacagaaataagttgcagtatggtcgtacttttaactctagtatcctttgcttgcttcttacgccctttcctaggtgaattctcccacagtggtctgtatctcaacattttctttttaaaggaaaaaatatatatatatagtttctttttattgatcaggtctgtaaatgtgtactaaaaaaatcagagtttatttataaacaaaatagtttatttaaagagaaggtctcttccttattgatatcatggtatgcattaattccatttgttactattgtgcacaaaagccctgttcacaggggaatggtgtaaacatttatactgttttgttcactgtatttagtagacataactgttgaatagttactgaatcatgatgtaaagaatatgtgaccatcttcaggtatgggatttctgaacgtttcaaatttcaatcaatgagcactgtcaacacccacaggagagaataaaattacctgtgcaaaggtgtattgtggtgtgtgtaacttaagattacagttctgtttgagagttaaatgatgtcatagctcacttgctatgctgcttccaggattttgttatatgctgaggtgtaaccatttgtgttgtctgactttcgtatgatttaattgagccaaatttgggtcagaacacaaatttgaagatgacttttcagtatatgatgggtatttacatttgaacactagaattttaggtctctcaaataattaagaatagagccagttttgaataaagtctagcagaactatg

SEQ ID NO: 109910 - DNA, 1565 bp, Homo sapiens
  Payload ID: 1575
  Gene Symbol: ATP6V1C2
  Gene Name: ATPase, H+ transporting, lysosomal 42kDa, V1 subunit C2
  Uniprot ID: Q8NEY4
  ENST ID: ENST00000272238
  CDS Start-End: 110-1393
agccggcagagcgctccggccccgcacccgccgcccgtcgcccgcagccccctaccgcgcggcccgcgccccgccggctcccgtcactgggtaagagaagactggaagcatgtcggagttttggttaatttctgcccctggcgataaggaaaatttgcaagctctggagaggatgaatactgtaacctccaagtccaacctgtcttataataccaaattcgctattcctgacttcaaggtggggaccttggattccctggttggcctctctgatgagttggggaaactcgacacctttgctgaaagcctcataaggagaatggctcagagcgtggtggaagtcatggaggactcaaaggggaaggtccaggagcacctcctggcaaacggagttgacttaacatcctttgtgacccactttgaatgggacatggccaaatatcctgtcaagcagccgctcgtgagtgtggtggacacaatagccaagcaactggcgcagatcgagatggacctgaagtcccgaacggccgcctacaacactctgaagacaaacctggagaacctggaaaagaaatccatggggaacctcttcacccggacactgagtgatattgtgagcaaagaggacttcgtgctggattctgaatatctcgtcacacttctggtcatcgtccccaaaccaaactactcacaatggcaaaaaacctacgaatctctctcagacatggtggtccctcgatcaaccaaactcattactgaggacaaggaagggggccttttcactgtgactctgtttcgaaaagtgattgaagatttcaaaaccaaggccaaagaaaacaagttcactgttcgtgaattttactatgatgagaaggaaattgaaagggaaagggaggagatggccagattgctgtctgataagaagcaacagtatcaaacttcctgtgttgctcttaaaaagggatcatccaccttcccggaccacaaggttaaggtaaccccgctaggtaaccctgataggcctgctgcggggcagaccgacagagagagagagagtgagggcgagggtgagggccccctgctgcgctggctcaaggtgaacttcagtgaagccttcattgcctggatccacatcaaggccctgagagtgtttgtggagtccgtgctcaggtatggactaccagtgaacttccaggcagtgctcctgcagccgcataagaagtcatccaccaagcgtttaagagaggttctaaactctgtcttccgacatctggatgaagtagccgctacaagtatactggatgcatctgtggagatcccgggactgcaactcaataaccaagactattttccttatgtctacttccatattgaccttagtcttcttgactagaaaggccagctggcacctctgtctcatgttcgtgcagattattacagacacctctttcctttagccagagaatggttcaaatgtcttacagaactaagatctttttcagagaaattgctcacaaaagttagtgacagttgtatttatttttttaagttacaataaaatgctc

SEQ ID NO: 109911 - DNA, 3102 bp, Homo sapiens
  Payload ID: 1575
  Gene Symbol: ATP6V1C2
  Gene Name: ATPase, H+ transporting, lysosomal 42kDa, V1 subunit C2
  Uniprot ID: Q8NEY4
  ENST ID: ENST00000381661
  CDS Start-End: 110-1255
agccggcagagcgctccggccccgcacccgccgcccgtcgcccgcagccccctaccgcgcggcccgcgccccgccggctcccgtcactgggtaagagaagactggaagcatgtcggagttttggttaatttctgcccctggcgataaggaaaatttgcaagctctggagaggatgaatactgtaacctccaagtccaacctgtcttataataccaaattcgctattcctgacttcaaggtggggaccttggattccctggttggcctctctgatgagttggggaaactcgacacctttgctgaaagcctcataaggagaatggctcagagcgtggtggaagtcatggaggactcaaaggggaaggtccaggagcacctcctggcaaacggagttgacttaacatcctttgtgacccactttgaatgggacatggccaaatatcctgtcaagcagccgctcgtgagtgtggtggacacaatagccaagcaactggcgcagatcgagatggacctgaagtcccgaacggccgcctacaacactctgaagacaaacctggagaacctggaaaagaaatccatggggaacctcttcacccggacactgagtgatattgtgagcaaagaggacttcgtgctggattctgaatatctcgtcacacttctggtcatcgtccccaaaccaaactactcacaatggcaaaaaacctacgaatctctctcagacatggtggtccctcgatcaaccaaactcattactgaggacaaggaagggggccttttcactgtgactctgtttcgaaaagtgattgaagatttcaaaaccaaggccaaagaaaacaagttcactgttcgtgaattttactatgatgagaaggaaattgaaagggaaagggaggagatggccagattgctgtctgataagaagcaacagtatggccccctgctgcgctggctcaaggtgaacttcagtgaagccttcattgcctggatccacatcaaggccctgagagtgtttgtggagtccgtgctcaggtatggactaccagtgaacttccaggcagtgctcctgcagccgcataagaagtcatccaccaagcgtttaagagaggttctaaactctgtcttccgacatctggatgaagtagccgctacaagtatactggatgcatctgtggagatcccgggactgcaactcaataaccaagactattttccttatgtctacttccatattgaccttagtcttcttgactagaaaggccagctggcacctctgtctcatgttcgtgcagattattacagacacctctttcctttagccagagaatggttcaaatgtcttacagaactaagatctttttcagagaaattgctcacaaaagttagtgacagttgtatttatttttttaagttacaataaaatgctctcaagtcctttgaatgttccaacaaattcaaaacttcattttctgaatgttttacataaatgcgaactacctgttcgcattggtaacctgctgctgtatttcatgtcttaacggctattttgaggttcattaacaacatagaaagccttgaactgtataaccagctagattccttaataattagtcactagagacagcccaaagacaaatattgggcaggaaatcagttctcactgagcccggtttccatgtaaaatctctgttgtggtgggcataggtggcaccatctaaagaaaagaggtcttgttttttgtttaaaaaagtttgtggggaggaaagacatctgtgtatcacttcaaaatattgatttactgctaaacatcactctgaatttatgatgtggatactaacttcatacatttatcggcattgtccaaaatattttattctttaatggaaaaagccattaatattcaaatgaagggatcacattaaaaaaaacccatacataagaaacagcctccaagaacattcaagcagcagtcagagagaaaaatgtttcgacagccaagttttcttcaaaatattatgtgacagaatacgactcaattcaccggctacaacaattcatagaatttttcaatgttttcttgagatgcaaaagttcactgttgcagtgttttcaaatgaccaatcaagtactacttcttggttaaaaggccactggtagagtcatctgagtgtagagaatgtcccttcactgctggaaaaatccactggctcccaagaaaagaaaatggtctgaagcctctgttgtggctctcacaactcatctttccctaagtcatcaagctccacatcactgaggtcaatgtcatcctccacgggaagctgggagacgacagaaagccactgttagatctgcagaaggggacaccctggaaggtcaacatctcattttatggaagagcgactctctggagctactcctgctacaatccaggttctcctcagtctgactcctaccctgaccttcgtacctatgattatacggatggaaaagctcagaactcaggtgaaacatttcaacatcacatcactcaccattttaacactggaagccacttgaacgtgtccttttgaggagggtgggacacaacagtacagaaataagtgctaatttcaaagctatcattttctatttttctaagataaagtaaatgaattccaggttaaatgttcactttaaggtaataatcaggaaagcaaccttactactgaaatgtatcttggctgtcaagagtatcaaatgccatgcagcacttaaacttgtgataaggaagatgaagggtcttcagagaagaacctcttaaaaggcccacgggtgcaccagggctgaggtctgatgggaaggacttgactccaggtgcagagatgcacaggctcaagagagtaaaccaggactgctgcccgcacagcttccctcccgggcactcacctcgccatccctgccgtcccaaggctctctctcaacgatggtagggaaagccccgcctcctacaggtgccgtggagccacgcccaaaagagagctcccttagggaaaaatgaccaaaacacacacacacatttacaatggactgctggtgcagaagaataaacaactttaaaaataa

SEQ ID NO: 109912 - DNA, 1578 bp, Homo sapiens
  Payload ID: 1575
  Gene Symbol: ATP6V1C2
  Gene Name: ATPase, H+ transporting, lysosomal 42kDa, V1 subunit C2
  ENST ID: ENST00000635370
  CDS Start-End: 79-1392
cacatctctccttctgtttctgtttgtgtatgtttgtcctggttctgggcagtcactgggtaagagaagactggaagcatgtcggagttttggttaatttctgcccctggcgataaggaaaatttgcaagctctggagaggatgaatactgtaacctccaagtccaacctgtcttataataccaaattcgctattcctgacttcaaggtggggaccttggattccctggttggcctctctgatgagttggggaaactcgacacctttgctgaaagcctcataaggagaatggctcagagcgtggtggaagtcatggaggactcaaaggggaaggtccaggagcacctcctggcaaacggaggcttgaaaggaaaaatgaaatgtttaaagattgacttaacatcctttgtgacccactttgaatgggacatggccaaatatcctgtcaagcagccgctcgtgagtgtggtggacacaatagccaagcaactggcgcagatcgagatggacctgaagtcccgaacggccgcctacaacactctgaagacaaacctggagaacctggaaaagaaatccatggggaacctcttcacccggacactgagtgatattgtgagcaaagaggacttcgtgctggattctgaatatctcgtcacacttctggtcatcgtccccaaaccaaactactcacaatggcaaaaaacctacgaatctctctcagacatggtggtccctcgatcaaccaaactcattactgaggacaaggaagggggccttttcactgtgactctgtttcgaaaagtgattgaagatttcaaaaccaaggccaaagaaaacaagttcactgttcgtgaattttactatgatgagaaggaaattgaaagggaaagggaggagatggccagattgctgtctgataagaagcaacagtatcaaacttcctgtgttgctcttaaaaagggatcatccaccttcccggaccacaaggttaaggtaaccccgctaggtaaccctgataggcctgctgcggggcagaccgacagagagagagagagtgagggcgagggtgagggccccctgctgcgctggctcaaggtgaacttcagtgaagccttcattgcctggatccacatcaaggccctgagagtgtttgtggagtccgtgctcaggtatggactaccagtgaacttccaggcagtgctcctgcagccgcataagaagtcatccaccaagcgtttaagagaggttctaaactctgtcttccgacatctggatgaagtagccgctacaagtatactggatgcatctgtggagatcccgggactgcaactcaataaccaagactattttccttatgtctacttccatattgaccttagtcttcttgactagaaaggccagctggcacctctgtctcatgttcgtgcagattattacagacacctctttcctttagccagagaatggttcaaatgtcttacagaactaagatctttttcagagaaattgctcacaaaagttagtgacagttgtatttatttttttaagttacaataaaatgctctcaagtcctttgaa

SEQ ID NO: 109913 - DNA, 2365 bp, Homo sapiens
  Payload ID: 1576
  Gene Symbol: ATP6V1H
  Gene Name: ATPase, H+ transporting, lysosomal 50/57kDa, V1 subunit H
  Uniprot ID: Q9UI12
  ENST ID: ENST00000355221
  CDS Start-End: 561-1958
agctgcttccgggcggaggtcctcggcctcccctaggcgaggcactaggtctgggggcggcgggtcttagcgtgcccgccacgctcgccgcctcccacctgccctggctggctggggcccgacccttgcgtcgctccggggcccaagttacggactcgggaatccagttgtccgcaccgaacaagccccgccgcagcgcccgcccctcctcttgctgctttggagtctcccggcttccgccttccgcagcagtcacgtgcctccgatcacgtgaccggcgcctctgtcattctactgcggccgccctggcttccttctacctgtgcggccctcaacgtctccttggtgcgggacccgcttcactttcggctcccggagtctccctccactgctcagacctctggacctgacaggagacgcctacttggctctgacgcggcgccccagcccggctgtgtccccggcgccccggaccaccctccctgccggctttgggtgcgttgtggggtcccgaggattcgcgagatttgttgaaagacattcaagattacgaagtttagatgaccaaaatggatatccgaggtgctgtggatgctgctgtccccaccaatattattgctgccaaggctgcagaagttcgtgcaaacaaagtcaactggcaatcctatcttcagggacagatgatttctgctgaagattgtgagtttattcagaggtttgaaatgaaacgaagccctgaagagaagcaagagatgcttcaaactgaaggcagccagtgtgctaaaacatttataaatctgatgactcatatctgcaaagaacagaccgttcagtatatactaactatggtggatgatatgctgcaggaaaatcatcagcgtgttagcattttctttgactatgcaagatgtagcaagaacactgcgtggccctactttctgccaatgttgaatcgccaggatcccttcactgttcatatggcagcaagaattattgccaagttagcagcttggggaaaagaactgatggaaggcagtgacttaaattactatttcaattggataaaaactcagctgagttcacagagttcgcagtatgtgcagtgcgtggccgggtgtttgcagctgatgctccgggtcaatgagtaccgctttgcttgggtggaagcagatggggtaaattgcataatgggagtgttgagtaacaagtgtggctttcagctccagtatcaaatgattttttcaatatggctcctggcattcagtcctcaaatgtgtgaacacctgcggcgctataatatcattccagttctgtctgatatccttcaggagtctgtcaaagagaaagtaacaagaatcattcttgcagcatttcgtaactttttagaaaaatcaactgaaagagaaactcgccaagaatatgccctggctatgattcagtgcaaagttctgaaacagttggagaacttggaacagcagaagtacgatgatgaagatatcagcgaagatatcaaatttcttttggaaaaacttggagagagtgtccaggaccttagttcatttgatgaatacagttcagaacttaaatctggaaggttggaatggagtcctgtgcacaaatctgagaaattttggagagagaatgctgtgaggttaaatgagaagaattatgaactcttgaaaatcttgacaaaacttttggaagtgtcagatgatccccaagtcttagctgttgctgctcacgatgttggagaatatgtgcggcattatccacgaggcaaacgggtcatcgagcagctcggtgggaagcagctggtcatgaaccacatgcatcatgaagaccagcaggtccgctataatgctctgctggccgtgcagaagctcatggtgcacaactgggaataccttggcaagcagctccagtccgagcagccccagaccgctgccgcccgaagctaagcctgcctctggccttcccctccgcctcaatgcagaaccagtagtgggagcactgtgtttagagttaagagtgaacactgtttgattttacttggaatttcctctgttatatagcttttcccaatgctaatttccaaacaacaacaacaaaataacatgtttgcctgttaagttgtataaaagtaggtgattctgtatttaaagaaaatattactgttacatatactgcttgcaatttctgtatttattgttctctggaaataaatatagttattaaaggattctcactccaaacatggcctctctctttacttggactttgaacaaaagtcaactgttgtctcttttcaaaccaaattgggagaattgttgcaaagtagtgaatggcaaataaatgttttaaaatc

SEQ ID NO: 109914 - DNA, 2007 bp, Homo sapiens
  Payload ID: 1576
  Gene Symbol: ATP6V1H
  Gene Name: ATPase, H+ transporting, lysosomal 50/57kDa, V1 subunit H
  Uniprot ID: Q9UI12
  ENST ID: ENST00000359530
  CDS Start-End: 265-1716
gcggccgccctggcttccttctacctgtgcggccctcaacgtctccttggtgcgggacccgcttcactttcggctcccggagtctccctccactgctcagacctctggacctgacaggagacgcctacttggctctgacgcggcgccccagcccggctgtgtccccggcgccccggaccaccctccctgccggctttgggtgcgttgtggggtcccgaggattcgcgagatttgttgaaagacattcaagattacgaagtttagatgaccaaaatggatatccgaggtgctgtggatgctgctgtccccaccaatattattgctgccaaggctgcagaagttcgtgcaaacaaagtcaactggcaatcctatcttcagggacagatgatttctgctgaagattgtgagtttattcagaggtttgaaatgaaacgaagccctgaagagaagcaagagatgcttcaaactgaaggcagccagtgtgctaaaacatttataaatctgatgactcatatctgcaaagaacagaccgttcagtatatactaactatggtggatgatatgctgcaggaaaatcatcagcgtgttagcattttctttgactatgcaagatgtagcaagaacactgcgtggccctactttctgccaatgttgaatcgccaggatcccttcactgttcatatggcagcaagaattattgccaagttagcagcttggggaaaagaactgatggaaggcagtgacttaaattactatttcaattggataaaaactcagctgagttcacagaaactgcgtggtagcggtgttgctgttgaaacaggaacagtctcttcaagtgatagttcgcagtatgtgcagtgcgtggccgggtgtttgcagctgatgctccgggtcaatgagtaccgctttgcttgggtggaagcagatggggtaaattgcataatgggagtgttgagtaacaagtgtggctttcagctccagtatcaaatgattttttcaatatggctcctggcattcagtcctcaaatgtgtgaacacctgcggcgctataatatcattccagttctgtctgatatccttcaggagtctgtcaaagagaaagtaacaagaatcattcttgcagcatttcgtaactttttagaaaaatcaactgaaagagaaactcgccaagaatatgccctggctatgattcagtgcaaagttctgaaacagttggagaacttggaacagcagaagtacgatgatgaagatatcagcgaagatatcaaatttcttttggaaaaacttggagagagtgtccaggaccttagttcatttgatgaatacagttcagaacttaaatctggaaggttggaatggagtcctgtgcacaaatctgagaaattttggagagagaatgctgtgaggttaaatgagaagaattatgaactcttgaaaatcttgacaaaacttttggaagtgtcagatgatccccaagtcttagctgttgctgctcacgatgttggagaatatgtgcggcattatccacgaggcaaacgggtcatcgagcagctcggtgggaagcagctggtcatgaaccacatgcatcatgaagaccagcaggtccgctataatgctctgctggccgtgcagaagctcatggtgcacaactgggaataccttggcaagcagctccagtccgagcagccccagaccgctgccgcccgaagctaagcctgcctctggccttcccctccgcctcaatgcagaaccagtagtgggagcactgtgtttagagttaagagtgaacactgtttgattttacttggaatttcctctgttatatagcttttcccaatgctaatttccaaacaacaacaacaaaataacatgtttgcctgttaagttgtataaaagtaggtgattctgtatttaaagaaaatattactgttacatatactgcttgcaatttctgtatttattgttctctggaaataaatatagttattaaaggattctcactcc

SEQ ID NO: 109915 - DNA, 1892 bp, Homo sapiens
  Payload ID: 1576
  Gene Symbol: ATP6V1H
  Gene Name: ATPase, H+ transporting, lysosomal 50/57kDa, V1 subunit H
  Uniprot ID: Q9UI12
  ENST ID: ENST00000396774
  CDS Start-End: 208-1659
attcgcgaggtaaggccgccctcgcgttgtttggtctcaggctgcagaccaggtcaggcgactcttgcagtttctccagcttgcctggtgcgtgctggtgtctcgccgcttggtcctctcctgttcttcggcccccggttgccagattgcttttcttccaggcctcaaccagatttgttgaaagacattcaagattacgaagtttagatgaccaaaatggatatccgaggtgctgtggatgctgctgtccccaccaatattattgctgccaaggctgcagaagttcgtgcaaacaaagtcaactggcaatcctatcttcagggacagatgatttctgctgaagattgtgagtttattcagaggtttgaaatgaaacgaagccctgaagagaagcaagagatgcttcaaactgaaggcagccagtgtgctaaaacatttataaatctgatgactcatatctgcaaagaacagaccgttcagtatatactaactatggtggatgatatgctgcaggaaaatcatcagcgtgttagcattttctttgactatgcaagatgtagcaagaacactgcgtggccctactttctgccaatgttgaatcgccaggatcccttcactgttcatatggcagcaagaattattgccaagttagcagcttggggaaaagaactgatggaaggcagtgacttaaattactatttcaattggataaaaactcagctgagttcacagaaactgcgtggtagcggtgttgctgttgaaacaggaacagtctcttcaagtgatagttcgcagtatgtgcagtgcgtggccgggtgtttgcagctgatgctccgggtcaatgagtaccgctttgcttgggtggaagcagatggggtaaattgcataatgggagtgttgagtaacaagtgtggctttcagctccagtatcaaatgattttttcaatatggctcctggcattcagtcctcaaatgtgtgaacacctgcggcgctataatatcattccagttctgtctgatatccttcaggagtctgtcaaagagaaagtaacaagaatcattcttgcagcatttcgtaactttttagaaaaatcaactgaaagagaaactcgccaagaatatgccctggctatgattcagtgcaaagttctgaaacagttggagaacttggaacagcagaagtacgatgatgaagatatcagcgaagatatcaaatttcttttggaaaaacttggagagagtgtccaggaccttagttcatttgatgaatacagttcagaacttaaatctggaaggttggaatggagtcctgtgcacaaatctgagaaattttggagagagaatgctgtgaggttaaatgagaagaattatgaactcttgaaaatcttgacaaaacttttggaagtgtcagatgatccccaagtcttagctgttgctgctcacgatgttggagaatatgtgcggcattatccacgaggcaaacgggtcatcgagcagctcggtgggaagcagctggtcatgaaccacatgcatcatgaagaccagcaggtccgctataatgctctgctggccgtgcagaagctcatggtgcacaactgggaataccttggcaagcagctccagtccgagcagccccagaccgctgccgcccgaagctaagcctgcctctggccttcccctccgcctcaatgcagaaccagtagtgggagcactgtgtttagagttaagagtgaacactgtttgattttacttggaatttcctctgttatatagcttttcccaatgctaatttccaaacaacaacaacaaaataacatgtttgcctgttaagttgtataaaagtaggtgattctgtatttaaagaaaatattactgttacatatactgcttgc

SEQ ID NO: 109916 - DNA, 735 bp, Homo sapiens
  Payload ID: 1576
  Gene Symbol: ATP6V1H
  Gene Name: ATPase, H+ transporting, lysosomal 50/57kDa, V1 subunit H
  ENST ID: ENST00000524234
  CDS Start-End: 432-735
agattgcttttcttccaggcctcaaccaggtttattaagcgaaattctggagcctttctcgcagggggaagaaacgtcaggggcgggcaggagagtggagggggaggggtaaaaagtataccttctccaggactgggccacggccctggatcgctgggggtgcgagtagttcagggacttaggtaattgtctagagacaccttgagctacgccaggacgggccgctgaggctgagcctccttggctgcagagttccagcctggcccagttgaagcctgttttttcctgggccctgtcgttcgcgctgcccagggttgtttatacagcaaatcttcagatacagagattaagttccaaattgattaagatcgttggaaacccggaatataattttggatttgttgaaagacattcaagattacgaagtttagatgaccaaaatggatatccgaggtgctgtggatgctgctgtccccaccaatattattgctgccaaggctgcagaagttcgtgcaaacaaagtcaactggcaatcctatcttcagggacagatgatttctgctgaagattgtgagtttattcagaggtttgaaatgaaacgaagccctgaagagaagcaagagatgcttcaaactgaaggcagccagtgtgctaaaacatttataaatctgatgactcatatctgcaaagaacagaccgttcagtatatactaactatggtggatgatatgctgc

SEQ ID NO: 109917 - DNA, 1734 bp, Homo sapiens
  Payload ID: 1576
  Gene Symbol: ATP6V1H
  Gene Name: ATPase, H+ transporting, lysosomal 50/57kDa, V1 subunit H
  ENST ID: ENST00000524164
  CDS Start-End: 296-442
atcacgtgaccggcgcctctgtcattctactgcggccgccctggcttccttctacctgtgcggccctcaacgtctccttggtgcgggacccgcttcactttcggctcccggagtctccctccactgctcagacctctggacctgacaggagacgcctacttggctctgacgcggcgccccagcccggctgtgtccccggcgccccggaccaccctccctgccggctttgggtgcgttgtggggtcccgaggattcgcgagatttgttgaaagacattcaagattacgaagtttagatgaccaaaatggatatccgaggtgctgtggatgctgctgtccccaccaatattattgctgccaaggctgcagaagttcgtgcaaacaaagtcaactggcaatcctatcttcagggacagatgatttctgctgaagatttgtgctaaaacatttataaatctgatgactcatatctgcaaagaacagaccgttcagtatatactaactatggtggatgatatgctgcaggaaaatcatcagcgtgttagcattttctttgactatgcaagatgtagcaagaacactgcgtggccctactttctgccaatgttgaatcgccaggatcccttcactgttcatatggcagcaagaattattgccaagttagcagcttggggaaaagaactgatggaaggcagtgacttaaattactatttcaattggataaaaactcagctgagttcacagaaactgcgtggtagcggtgttgctgttgaaacaggaacagtctcttcaagtgatagttcgcagtatgtgcagtgcgtggccgggtgtttgcagctgatgctccgggtcaatgagtaccgctttgcttgggtggaagcagatggggtaaattgcataatgggagtgttgagtaacaagtgtggctttcagctccagtatcaaatgattttttcaatatggctcctggcattcagtcctcaaatgtgtgaacacctgcggcgctataatatcattccagttctgtctgatatccttcaggagtctgtcaaagagaaagtaacaagaatcattcttgcagcatttcgtaactttttagaaaaatcaactgaaagagaaactcgccaagaatatgccctggctatgattcagtgcaaagttctgaaacagttggagaacttggaacagcagaagtacgatgatgaagatatcagcgaagatatcaaatttcttttggaaaaacttggagagagtgtccaggaccttagttcatttgatgaatacagttcagaacttaaatctggaaggttggaatggagtcctgtgcacaaatctgagaaattttggagagagaatgctgtgaggttaaatgagaagaattatgaactcttgaaaatcttgacaaaacttttggaagtgtcagatgatccccaagtcttagctgttgctgctcacgatgttggagaatatgtgcggcattatccacgaggcaaacgggtcatcgagcagctcggtgggaagcagctggtcatgaaccacatgcatcatgaagaccagcaggtccgctataatgctctgctggccgtgcagaagctcatggtgcacaactgggaataccttggcaagcagctccagtccgagcagccccagaccgctgccgcccgaagctaagcctgcctctggccttcccctccgcctcaatgcagaaccagtagtgggagcactgtgtttagag

SEQ ID NO: 109918 - DNA, 551 bp, Homo sapiens
  Payload ID: 1576
  Gene Symbol: ATP6V1H
  Gene Name: ATPase, H+ transporting, lysosomal 50/57kDa, V1 subunit H
  ENST ID: ENST00000522849
  CDS Start-End: 1-261
tttgactatgcaagatgtagcaagaacactgcgtggccctactttctgccaatgttgaatcgccaggatcccttcactgttcatatggcagcaagaattattgccaagttagcagcttggggaaaagaactgatggaaggcagtgacttaaattactatttcaattggataaaaactcagctgagttcacagaaactgcgtggtagcggtgttgctgttgaaacaggaacagtctcttcaagtgatcacagtattcagtaaattacacgagctgttcaacacttgattataaaatgggctttgtattgatttttggaaggattgcctggagatatattctgaaatgcaaaagaaaattaactgagttcgcagtatgtgcagtgcgtggccgggtgtttgcagctgatgctccgggtcaatgagtaccgctttgcttgggtggaagcagatggggtaaattgcataatgggagtgttgagtaacaagtgtggctttcagctccagtatcaaatgattttttcaatatggctcctggcattcagtcctcaaat

SEQ ID NO: 109919 - DNA, 578 bp, Homo sapiens
  Payload ID: 1576
  Gene Symbol: ATP6V1H
  Gene Name: ATPase, H+ transporting, lysosomal 50/57kDa, V1 subunit H
  ENST ID: ENST00000519588
  CDS Start-End: 248-358
cttctacctgtgcggccctcaacgtctccttggtgcgggacccgcttcactttcggctcccggagtctccctccactgctcagacctctggacctgacaggagacgcctacttggctctgacgcggcgccccagcccggctgtgtccccggcgccccggaccaccctccctgccggctttgggtgcgttgtggggtcccgaggattcgcgagatttgttgaaagacattcaagattacgaagtttagatgaccaaaatggatatccgaggtgctgtggatgctgctgtccccaccaatattattgctgccaagagatgcttcaaactgaaggcagccagtgtgctaaaacatttataaatctgatgactcatatctgcaaagaacagaccgttcagtatatactaactatggtggatgatatgctgcaggaaaatcatcagcgtgttagcattttctttgactatgcaagatgtagcaagaacactgcgtggccctactttctgccaatgttgaatcgccaggatcccttcactgttcatatggcagcaagaattattgccaagttagcagcttgggg

SEQ ID NO: 109920 - DNA, 403 bp, Homo sapiens
  Payload ID: 1576
  Gene Symbol: ATP6V1H
  Gene Name: ATPase, H+ transporting, lysosomal 50/57kDa, V1 subunit H
  ENST ID: ENST00000521275
  CDS Start-End: 98-403
gttgtttggtctcaggctgcagaccaggtcaggcgactcttgcagtttctccagcttgcctgatttgttgaaagacattcaagattacgaagtttagatgaccaaaatggatatccgaggtgctgtggatgctgctgtccccaccaatattattgctgccaaggctgcagaagttcgtgcaaacaaagtcaactggcaatcctatcttcagggacagatgatttctgctgaagattgtgagtttattcagaggtttgaaatgaaacgaagccctgaagagaagcaagagatgcttcaaactgaaggcagccagtgtgctaaaacatttataaatctgatgactcatatctgcaaagaacagaccgttcagtatatactaactatggtggatgatatgctgcag

SEQ ID NO: 109921 - DNA, 1967 bp, Homo sapiens
  Payload ID: 1576
  Gene Symbol: ATP6V1H
  Gene Name: ATPase, H+ transporting, lysosomal 50/57kDa, V1 subunit H
  ENST ID: ENST00000520188
  CDS Start-End: 345-1676
aatgcagagagctgaggctagagaggcagccaggggccgatcgtgaagatgctgtgtgtgggtgtgtggttggaaggagtttggacttgatcctatcagtcagtgcttttcaagctgatttttaagctgtgaagcccatgattgatatgaagttagcatgtaaaacagatgaaaatgatagaatggaggtgggagtgtgtgtcccagagccctctttttgagaccattcaccattttccaaggagctgtaggtgttggaaaccaatgaatcttgtagccgggagttagaagaccatatctgcctcttgattgaattgttctactagcagcatgaagggggacagatgatttctgctgaagattgtgagtttattcagaggtttgaaatgaaacgaagccctgaagagaagcaagagatgcttcaaactgaaggcagccagtgtgctaaaacatttataaatctgatgactcatatctgcaaagaacagaccgttcagtatatactaactatggtggatgatatgctgcaggaaaatcatcagcgtgttagcattttctttgactatgcaagatgtagcaagaacactgcgtggccctactttctgccaatgttgaatcgccaggatcccttcactgttcatatggcagcaagaattattgccaagttagcagcttggggaaaagaactgatggaaggcagtgacttaaattactatttcaattggataaaaactcagctgagttcacagaaactgcgtggtagcggtgttgctgttgaaacaggaacagtctcttcaagtgatagttcgcagtatgtgcagtgcgtggccgggtgtttgcagctgatgctccgggtcaatgagtaccgctttgcttgggtggaagcagatggggtaaattgcataatgggagtgttgagtaacaagtgtggctttcagctccagtatcaaatgattttttcaatatggctcctggcattcagtcctcaaatgtgtgaacacctgcggcgctataatatcattccagttctgtctgatatccttcaggagtctgtcaaagagaaagtaacaagaatcattcttgcagcatttcgtaactttttagaaaaatcaactgaaagagaaactcgccaagaatatgccctggctatgattcagtgcaaagttctgaaacagttggagaacttggaacagcagaagtacgatgatgaagatatcagcgaagatatcaaatttcttttggaaaaacttggagagagtgtccaggaccttagttcatttgatgaatacagttcagaacttaaatctggaaggttggaatggagtcctgtgcacaaatctgagaaattttggagagagaatgctgtgaggttaaatgagaagaattatgaactcttgaaaatcttgacaaaacttttggaagtgtcagatgatccccaagtcttagctgttgctgctcacgatgttggagaatatgtgcggcattatccacgaggcaaacgggtcatcgagcagctcggtgggaagcagctggtcatgaaccacatgcatcatgaagaccagcaggtccgctataatgctctgctggccgtgcagaagctcatggtgcacaactgggaataccttggcaagcagctccagtccgagcagccccagaccgctgccgcccgaagctaagcctgcctctggccttcccctccgcctcaatgcagaaccagtagtgggagcactgtgtttagagttaagagtgaacactgtttgattttacttggaatttcctctgttatatagcttttcccaatgctaatttccaaacaacaacaacaaaataacatgtttgcctgttaagttgtataaaagtaggtgattctgtatttaaagaaaatattactgttacatatactgcttgcaatttctgtatttattgttctctggaaataaatatagttattaaaggattctcactcc

SEQ ID NO: 109922 - DNA, 144 bp, Homo sapiens
  Payload ID: 1576
  Gene Symbol: ATP6V1H
  Gene Name: ATPase, H+ transporting, lysosomal 50/57kDa, V1 subunit H
  ENST ID: ENST00000630578
  CDS Start-End: 1-144
atgaccaaaatggatatccgaggtgctgtggatgctgctgtccccaccaatattattgctgccaaggctgcagaagttcgtgcaaacaaagtcaactggcaatcctatcttcagggacagatgatttctgctgaagatttttgc

SEQ ID NO: 109923 - DNA, 1891 bp, Homo sapiens
  Payload ID: 1577
  Gene Symbol: ATP6V1B1
  Gene Name: ATPase, H+ transporting, lysosomal 56/58kDa, V1 subunit B1
  Uniprot ID: P15313
  ENST ID: ENST00000234396
  CDS Start-End: 74-1615
agctggacctgaagtctcagagctgccaccagcagcaggctcagacactgggctcccagctggggactgctccatggccatggagatagacagcaggcctggggggctccccggcagtagctgcaacctaggtgcagcccgagaacacatgcaggcggtcacccgaaactacatcacccacccccgtgtcacctacaggactgtgtgcagcgtgaacgggcccctggtggtgctggaccgggtcaagtttgcccagtatgcggagatcgtccacttcaccctcccagatgggactcagaggagcgggcaggtgcttgaggtggctggcaccaaggcgattgttcaggtgtttgaagggacatcagggatcgatgccaggaagaccacttgcgaatttacaggggacatcctacgaactccggtgtcagaggacatgctgggtcgggttttcaatggctccggcaagcccattgacaaggggccagtggtcatggcggaggactttctggatatcaatggccagcccatcaacccgcactcccgcatctaccccgaggagatgattcagacgggcatttctcctattgacgtcatgaacagcattgcccgcggccagaagatccccatcttctcagcagccgggctcccccacaatgagattgccgctcagatctgccgccaggcggggctggtgaagaagtccaaggctgtgctggattaccatgacgacaacttcgccatcgtctttgcagccatgggggtgaacatggagacagccagattcttcaagtctgactttgagcagaatggaaccatggggaacgtctgcctcttcctgaacttggccaatgaccccacgatcgagcggatcatcaccccgcgcctggcgctgaccactgctgaattccttgcctaccagtgtgagaagcatgtgctggtcatactgacggacatgagttcctatgcagaggccttgcgggaggtctctgctgctagagaggaggtgcctgggcgccgagggtttcctggatatatgtacacagacctggccaccatctacgagcgggcgggccgcgtggagggtcggggaggatccatcacacagatccccatcctcaccatgcccaacgacgatatcacccaccctatcccagacttgacgggcttcatcacagagggacagatctacgtggacagacagcttcacaacagacagatctacccccccatcaacgtgctcccttccctgtcgcggctgatgaagtcagccattggggaaggcatgacaagaaaggaccatggagatgtctccaaccagctgtacgcctgctatgccatcgggaaggacgtgcaggccatgaaggcagtagttggggaggaggcgctcacctctgaggacctgctctacctggaattcctgcagaagtttgagaagaacttcatcaatcagggcccctacgagaaccgctcggtgttcgagtcgctggacctgggctggaagctgctgcgcatcttccccaaggagatgctgaagcgcattccgcaggccgtgatcgacgagttctattcccgcgagggggcgctgcaggacctcgcgcctgacactgcgctctagccccgcgcgccgtggcaccccaacaccggcagggaacctaccctcggctcccgggtctcccctccctcgccaccccaaccagcggcttctgcgccgccctccgccctccgctggctccgaggtggtgggggcgccgcacgctccatccctttccctcgctcgattccttttcccgcgctccatgcctccccctcgactcccggtgctgcggaagaactgaaggttgcgatgccttactctgacgggagcatctgtatttttatgttaaaagcccac

SEQ ID NO: 109924 - DNA, 546 bp, Homo sapiens
  Payload ID: 1577
  Gene Symbol: ATP6V1B1
  Gene Name: ATPase, H+ transporting, lysosomal 56/58kDa, V1 subunit B1
  ENST ID: ENST00000432098
  CDS Start-End: 323-546
agggaaggcagaggatgcctctgtgtgtgtgagcagggtgtttggggtgagacccctactcacccccgcccctcccccagcctacaggactgtgtgcagcgtgaacgggcccctggtggtgctggaccgggtcaagtttgcccagtatgcggagatcgtccacttcaccctcccagatgggactcagaggagcgggcaggtgcttgaggtggctggcaccaaggcgattgttcaggtgtttgaagggacatcagggatcgatgccaggaagaccacttgcgaatttacaggggacatcctacgaactccggtgtcagaggacatgctgggtcgggttttcaatggctccggcaagcccattgacaaggggccagtggtcatggcggaggactttctggatatcaatggccagcccatcaacccgcactcccgcatctaccccgaggagatgattcagacgggcatttctcctattgacgtcatgaacagcattgcccgcggccagaagatccccatcttctcagcagccgggctcccccacaatga

SEQ ID NO: 109925 - DNA, 1805 bp, Homo sapiens
  Payload ID: 1577
  Gene Symbol: ATP6V1B1
  Gene Name: ATPase, H+ transporting, lysosomal 56/58kDa, V1 subunit B1
  ENST ID: ENST00000412314
  CDS Start-End: 35-1525
ctcagacactgggctcccagctggggactgctccatggccatggagatagacagcaggcctggggggctccccggcagtagctgcaacctaggtgcagcccgagaacacatgcaggcggtcacccgaaactacatcacccacccccgtgtcacctacaggactgtgtgcagcgtgaacgggcccctggtggtgctggaccgggtcaagtttgcccagtatgcggagatcgtccacttcaccctcccagatgggactcagaggagcgggcaggtgcttgaggtggctggcaccaaggcgattgttcaggtgtttgaagggacatcagggatcgatgccaggaagaccacttgcgaatttacaggggacatcctacgaactccggtgtcagaggacatgctgggtcgggttttcaatggctccggcaagcccattgacaaggggccagtggtcatggcggaggactttctggatatcaatggccagcccatcaacccgcactcccgcatctaccccgaggagatgattcagacgggcatttctcctattgacgtcatgaacagcattgcccgcggccagaagatccccatcttctcagcagccgggctcccccacaatgagattgccgctcagatctgccgccaggcggggctggtgaagaagtccaaggctgtgctggattaccatgacgacaacttcgccatcgtctttgcagccatgggggtgaacatggagacagccagattcttcaagtctgactttgagcagaatggaaccatggggaacgtctgcctcttcctgaacttggccaatgaccccacgatcgagcggatcatcaccccgcgcctggcgctgaccactgctgaattccttgcctaccagtgtgagaagcatgtgctggtcatactgacggacatgagttcctatgcagaggccttgcgggaggtctctgctgctagagaggaggtgcctgggcgccgagggtttcctggatatatgtacacagacctggccaccatctacgagcgggcgggccgcgtggaggatatcacccaccctatcccagacttgacgggcttcatcacagagggacagatctacgtggacagacagcttcacaacagacagatctacccccccatcaacgtgctcccttccctgtcgcggctgatgaagtcagccattggggaaggcatgacaagaaaggaccatggagatgtctccaaccagctgtacgcctgctatgccatcgggaaggacgtgcaggccatgaaggcagtagttggggaggaggcgctcacctctgaggacctgctctacctggaattcctgcagaagtttgagaagaacttcatcaatcagggcccctacgagaaccgctcggtgttcgagtcgctggacctgggctggaagctgctgcgcatcttccccaaggagatgctgaagcgcattccgcaggccgtgatcgacgagttctattcccgcgagggggcgctgcaggacctcgcgcctgacactgcgctctagccccgcgcgccgtggcaccccaacaccggcagggaacctaccctcggctcccgggtctcccctccctcgccaccccaaccagcggcttctgcgccgccctccgccctccgctggctccgaggtggtgggggcgccgcacgctccatccctttccctcgctcgattccttttcccgcgctccatgcctccccctcgactcccggtgctgcggaagaactgaaggttgcgatgccttactctgacgggagcatctgtatttttatgttaaaagcccacaaaa

SEQ ID NO: 109926 - DNA, 1905 bp, Homo sapiens
  Payload ID: 1577
  Gene Symbol: ATP6V1B1
  Gene Name: ATPase, H+ transporting, lysosomal 56/58kDa, V1 subunit B1
  ENST ID: ENST00000432367
  CDS Start-End: 54-800
agctgccaccagcagcaggctcagacactgggctcccagctggggactgctccatggccatggagatagacagcaggcctggggggctccccggcagtagctgcaacctaggtgcagcccgagaacacatgcaggcggtcacccgaaactacatcacccacccccgtgtcacctacaggactgtgtgcagcgtgaacgggcccctggtggtgctggaccgggtcaagtttgcccagtatgcggagatcgtccacttcaccctcccagatgggactcagaggagcgggcaggtgcttgaggtggctggcaccaaggcgattgttcaggtgtttgaagggacatcagggatcgatgccaggaagaccacttgcgaatttacaggggacatcctacgaactccggtgtcagaggacatgctgggtcgggttttcaatggctccggcaagcccattgacaaggggccagtggtcatggcggaggactttctggatatcaatggccagcccatcaacccgcactcccgcatctaccccgaggagatgattcagacgggcatttctcctattgacgtcatgaacagcattgcccgcggccagaagatccccatcttctcagcagccgggctcccccacaatgagattgccgctcagatctgccgccaggcggggctggtgaagaagtccaaggctgtgctggattaccatgacgacaacttcgccatcgtctttgcagccatgggggtgaggagacttagtagactggcaagtgaacatggagacagccagattcttcaagtctgactttgagcagaatggaaccatggggaacgtctgcctcttcctgaacttggccaatgaccccacgatcgagcggatcatcaccccgcgcctggcgctgaccactgctgaattccttgcctaccagtgtgagaagcatgtgctggtcatactgacggacatgagttcctatgcagaggccttgcgggaggtctctgctgctagagaggaggtgcctgggcgccgagggtttcctggatatatgtacacagacctggccaccatctacgagcgggcgggccgcgtggagggtcggggaggatccatcacacagatccccatcctcaccatgcccaacgacgatatcacccaccctatcccagacttgacgggcttcatcacagagggacagatctacgtggacagacagcttcacaacagacagatctacccccccatcaacgtgctcccttccctgtcgcggctgatgaagtcagccattggggaaggcatgacaagaaaggaccatggagatgtctccaaccagctgtacgcctgctatgccatcgggaaggacgtgcaggccatgaaggcagtagttggggaggaggcgctcacctctgaggacctgctctacctggaattcctgcagaagtttgagaagaacttcatcaatcagggcccctacgagaaccgctcggtgttcgagtcgctggacctgggctggaagctgctgcgcatcttccccaaggagatgctgaagcgcattccgcaggccgtgatcgacgagttctattcccgcgagggggcgctgcaggacctcgcgcctgacactgcgctctagccccgcgcgccgtggcaccccaacaccggcagggaacctaccctcggctcccgggtctcccctccctcgccaccccaaccagcggcttctgcgccgccctccgccctccgctggctccgaggtggtgggggcgccgcacgctccatccctttccctcgctcgattccttttcccgcgctccatgcctccccctcgactcccggtgctgcggaagaactgaaggttgcgatgccttactctgacgggagcatctgtatttttatgttaaaagcccacaaaataaaa

SEQ ID NO: 109927 - DNA, 472 bp, Homo sapiens
  Payload ID: 1577
  Gene Symbol: ATP6V1B1
  Gene Name: ATPase, H+ transporting, lysosomal 56/58kDa, V1 subunit B1
  ENST ID: ENST00000433895
  CDS Start-End: 118-472
atctacgtggacagacagcttcacaacagacaggttaaaggtgacctctatgacgtttttctctttgcttggcagatctacccccccatcaacgtgctcccttccctgtcgcggctgatgaagtcagccattggggaaggcatgacaagaaaggaccatggagatgtctccaaccagctgtacgcctgctatgccatcgggaaggacgtgcaggccatgaaggcagtagttggggaggaggcgctcacctctgaggacctgctctacctggaattcctgcagaagtttgagaagaacttcatcaatcagggcccctacgagaaccgctcggtgttcgagtcgctggacctgggctggaagctgctgcgcatcttccccaaggagatgctgaagcgcattccgcaggccgtgatcgacgagttctattcccgcgagggggcgctgcaggacctcgcgcctgacactgcgctct

SEQ ID NO: 109928 - DNA, 863 bp, Homo sapiens
  Payload ID: 1577
  Gene Symbol: ATP6V1B1
  Gene Name: ATPase, H+ transporting, lysosomal 56/58kDa, V1 subunit B1
  ENST ID: ENST00000454446
  CDS Start-End: 116-863
ggatgagaggcctctgtgtggtgggggcggactctgaggaggcctctgccctctgcctggccctcccccagcctcctgcaggtgtccgagcagcaggggccctgcgggcaggggcatgacccttacagcaatggtggctggccctgtcacagctaatgaccctgacggcccaggctgggaaggaggtggggtgtggagagaggaagggaaggcagaggatgcctctgtgtgtgtgagcagggtgtttggggtgagacccctactcacccccgcccctcccccagcctacaggactgtgtgcagcgtgaacgggcccctggtggtgctggaccgggtcaagtttgcccagtatgcggagatcgtccacttcaccctcccagatgggactcagaggagcgggcaggtgcttgaggtggctggcaccaaggcgattgttcaggtgtttgaagggacatcagggatcgatgccaggaagaccacttgcgaatttacaggggacatcctacgaactccggtgtcagaggacatgctgggtcgggttttcaatggctccggcaagcccattgacaaggggccagtggtcatggcggaggactttctggatatcaatggccagcccatcaacccgcactcccgcatctaccccgaggagatgattcagacgggcatttctcctattgacgtcatgaacagcattgcccgcggccagaagatccccatcttctcagcagccgggctcccccacaatgagattgccgctcagatctgccgccaggcggggctggtgaagaagtccaaggctgtgctggattaccatgacgacaacttcgccatcgtctttgcagccatgggggtgaggagac

SEQ ID NO: 109929 - DNA, 2875 bp, Homo sapiens
  Payload ID: 1578
  Gene Symbol: ATP6V1B2
  Gene Name: ATPase, H+ transporting, lysosomal 56/58kDa, V1 subunit B2
  Uniprot ID: P21281
  ENST ID: ENST00000276390
  CDS Start-End: 41-1576
gcggcgtcgctgctgggccagtcgggacagaggagacaagatggcgctgcgggcgatgcgggggattgtcaacggggccgcacccgagctacccgtgcccaccggtgggccggcggtgggagctcgggagcaggcgctggcagtcagtcggaactacctctcccagcctcgcctcacatacaagacagtatctggagtcaatggtccactagtgatcttagatcatgttaagtttcccaggtatgctgaaattgtccatttgaccttaccggatggcacaaagagaagtgggcaagttctggaagttagtggttccaaggcagtagttcaggtatttgaagggacttcaggtatagatgctaagaaaacgtcctgtgagtttactggggatattctccgaacaccggtgtctgaggatatgcttggtcgggtattcaatggatcgggaaaacccattgacagaggtcctgttgtactggccgaagacttccttgatatcatgggtcagccaatcaaccctcaatgtcgaatctacccagaggaaatgattcagactggcatttcggccatcgatgggatgaacagtattgctagggggcagaaaattcctatcttctctgctgctgggctaccacacaatgagattgcagctcagatctgtcgccaggctggtttggtaaagaaatccaaagatgtagtagactacagtgaggaaaattttgcaattgtatttgctgctatgggtgtaaacatggaaactgcccggttcttcaaatctgactttgaagaaaatggctcaatggacaatgtctgcctctttttgaacttggctaatgacccaaccattgagcgaattatcactcctcgcctggctctaaccacagctgaatttctggcgtaccaatgtgagaaacatgtattggttattctaacagacatgagttcttatgctgaagcacttcgagaggtttcagcagccagggaagaggtacctggtcgacgaggttttccaggttacatgtatacagatttagccacgatatatgaacgcgctgggcgagtggaagggagaaacggctcgattactcaaatccctattctaaccatgcctaatgatgatatcactcaccccatcccagacttgactggctacattacagaggggcagatctatgtggacagacagctgcacaacagacagatttatccacctatcaatgtgctgccctcactatcacggttaatgaagtctgctattggagaagggatgaccaggaaggatcatgccgatgtatctaaccagctatatgcgtgctatgctattggaaaggatgtgcaagccatgaaagctgtcgttggagaagaagcccttacctcagatgatcttctctacttggaatttctgcagaagtttgagaggaacttcattgctcagggtccttacgaaaatcgcactgtctttgagactttggacattggctggcagctactccgaatcttccccaaagaaatgctgaagagaatccctcagagcaccctcagcgaattttaccctcgagactctgcaaagcattagctgctgcttctgcattgctccgcgctcttgtgaaatactggttctgttttctttattccttttgcactctcggttcccacctttgtgttggagtttaccatgttaccctgtaattaaaaacaaagaataggtaacatattgtgccagtgttgcaacgttttaaactgctaacagaccttaaaatatccccctacctgggtcctcagtgctatgtttaaagtgctgcagggatggagtggcgttttcttattgctgtatgtattgtacatagtggagtagttagttacctgataacagtcttgttatttgggtctcttagaccttacctctcaactccctcaagagtaccagtctctgaagttataatgctttggtctctacattaggggcaagatccagtctgagagaagtctcctttgagaagggccaagaggctctttcctgagtgtttgctttcggtttgttggtatgcctgtattgctgggctgtgctgctgctcgaagcagatggttttgactgtctttttgctctttcctatataatgaatagatgagtgaaaggagttttctttttctctttagtacttacgtattgggattcctgtgtcttacagctctccctctccaaataatacacagaatcctgcaactttttgcacagctggtatctgtctggtagcagtgagaccccttgtcttggtgatccttactgggtttccaagcagaggagtcacatgattacaattgccagtagagttgttgtttggggtacaagatgagaagaaagaaaaacctacagcctttctacattctgacatgctaacagtggtttaagtttctaaagtgtttaccagatgctgaaggcaaggggagggagcagaagcacttatgtttacggatattttaaactctgttagagagcagcctttgaaaatccccaatttggttctgctttttgacctctctctaccttttcagggtaatctttgtggcacaaacgatagcatttccaagctttagagttttctgaattcctgcgccttcctgacgtgagccctgagcgatcttctatgcagttctgccatgcgtcctgttggtctctctgtgttctttgttacttgggtgcaatagcaacttccctaccccgtgcattccatctttcatgttgtgtaaagttcttcacttttttctctgagggctgggggttgggggagtcagcatgattatattttaatgtagaaaatgtgacatctggatataaaatgaaaataaatgttaaattaaatggaccttaactaaa

SEQ ID NO: 109930 - DNA, 649 bp, Homo sapiens
  Payload ID: 1578
  Gene Symbol: ATP6V1B2
  Gene Name: ATPase, H+ transporting, lysosomal 56/58kDa, V1 subunit B2
  ENST ID: ENST00000520830
  CDS Start-End: 1-169
gcgggggattgtcaacggggccgcacccgagctacccgtgcccaccggtgggccggcggtgggagctcgggagcaggcgctggcagtcagtcggaactacctctcccagcctcgcctcagctatacaatttctccaatttcctttgtgacttttgtcacttctgcgtaacattaaggattccctttcctcatctacttagctaaatgctgcgtcctctataaagtttttacttttctccctgagcatacaagacagtatctggagtcaatggtccactagtgatcttagatcatgttaagtttcccaggtatgctgaaattgtccatttgaccttaccggatggcacaaagagaagtgggcaagttctggaagttagtggttccaaggcagtagttcaggtatttgaagggacttcaggtatagatgctaagaaaacgtcctgtgagtttactggggatattctccgaacaccggtgtctgaggatatgcttggtcgggtattcaatggatcgggaaaacccattgacagaggtcctgttgtactggccgaagacttccttgatatcatgggtcagccaatcaaccctcaatgtcgaatctacccagaggaaatgattcagactggcatttcggccatcgatgggatga

SEQ ID NO: 109931 - DNA, 572 bp, Homo sapiens
  Payload ID: 1578
  Gene Symbol: ATP6V1B2
  Gene Name: ATPase, H+ transporting, lysosomal 56/58kDa, V1 subunit B2
  ENST ID: ENST00000523478
  CDS Start-End: 4-204
aagatggcgctgcgggcgatgcgggggattgtcaacggggccgcacccgagctacccgtgcccaccggtgggccggcggtgggagctcgggagcaggcgctggcagtcagtcggaactacctctcccagcctcgcctcacatacaagacagtatctggagtcaatggtccactagtgatcttagatcatgttaaggtatgctgaaattgtccatttgaccttaccggatggcacaaagagaagtgggcaagttctggaagttagtggttccaaggcagtagttcaggtatttgaagggacttcaggtatagatgctaagaaaacgtcctgtgagtttactggggatattctccgaacaccggtgtctgaggatatgcttggtcgggtattcaatggatcgggaaaacccattgacagaggtcctgttgtactggccgaagacttccttgatatcatgggtcagccaatcaaccctcaatgtcgaatctacccagaggaaatgattcagactggcatttcggccatcgatgggatgaacagtattgctagggggcagaaaattcctatcttct

SEQ ID NO: 109932 - DNA, 670 bp, Homo sapiens
  Payload ID: 1578
  Gene Symbol: ATP6V1B2
  Gene Name: ATPase, H+ transporting, lysosomal 56/58kDa, V1 subunit B2
  ENST ID: ENST00000519667
  CDS Start-End: 1-598
cggggccgcacccgagctacccgtgcccaccggtgggccggcggtgggagctcgggagcaggcgctggcagtcagtcggaactacctctcccagcctcgcctcacatacaagacagtatctggagtcaatggtccactagtgatcttagatcatgttaagtttcccaggtatgctgaaattgtccatttgaccttaccggatggcacaaagagaagtgggcaagttctggaagttagtggttccaaggcagtagttcaggtatttgaagggacttcaggtatagatgctaagaaaacgtcctgtgagtttactggggatattctccgaacaccggtgtctgaggatatgcttggtcgggtattcaatggatcgggaaaacccattgacagaggtcctgttgtactggccgaagacttccttgatatcatgggtcagccaatcaaccctcaatgtcgaatctacccagaggaaatgattcagactggcatttcggccatcgatgggatgaacagtattgctagggggcagaaaattcctatcttctctgctgctgggctaccacacaatgaggtgaggactgggatcggtttgctatgaagtttagcagacaagaatttctataatgcatcactgttactgagaaaccgaataaagggttttcaaaataaa

SEQ ID NO: 109933 - DNA, 738 bp, Homo sapiens
  Payload ID: 1578
  Gene Symbol: ATP6V1B2
  Gene Name: ATPase, H+ transporting, lysosomal 56/58kDa, V1 subunit B2
  ENST ID: ENST00000521442
  CDS Start-End: 1-148
gcaagccatgaaagctgtcgttggagaagaagcccttacctcagatgatcttctctacttggaatttctgcagaagtttgagaggaacttcattgctcagggtgtctcactttgtcgcccaggctggagtacagtggtgcgatcttgactgactgcaacctgcaacctctgcctccggactcaagcgattctcttgccttagcctcctgagtagctgggattacaggagaccccaggaactgaagtggcaagggtgaatcctgtgagacgatgaggaatgagaccaggctgaagtgtgagatgcagtagccctcctccacctccaccagaaggcaggggtggaataagagctgaaagacggagtctcattctgtcgcccaggctggagtgagtggcgtgatctcagctcactgcaacctccatctcccaggttcaagtgattctcatgcctcagcctctcgagtagctggaatgataggcgcgcaccgccatgcctggcgaatttttgtgtttttagtagagacggggtttcaccatgttggccaggctggtcttgaattcctgacctcaagtgatccactcttctcgacctcccaaagtgttgggattataggcgtgagccaccgcgcccggcctgttctggatatttcttataaatggaatcatacagtgcttctttcagttagcataatgtttcccaggttcatccaggtcataacacataatcaggcttcattt

SEQ ID NO: 109934 - DNA, 4591 bp, Homo sapiens
  Payload ID: 1579
  Gene Symbol: ATP6V1A
  Gene Name: ATPase, H+ transporting, lysosomal 70kDa, V1 subunit A
  Uniprot ID: P38606
  ENST ID: ENST00000273398
  CDS Start-End: 109-1962
cccccccccaacctgtgcagctgaggacttcccctccgtggtgacagcctctgggtcctcggtcggtacagtctctgcacctcgcgccccagcaggtaaactaacattatggatttttccaagctacccaaaatactcgatgaagataaagaaagcacatttggttatgtgcatggggtctcaggacctgtggttacagcctgtgacatggcgggtgcagccatgtatgagctggtgagagtgggccacagcgaattggttggagagattattcgattggagggtgacatggctactattcaggtgtatgaagaaacttctggtgtgtctgttggagatcctgtacttcgcactggtaaacccctctctgtagagcttggtcctggcattatgggagccatttttgatggtattcaaagacctttgtcggatatcagcagtcagacccaaagcatctacatccccagaggagtaaacgtgtctgctcttagcagagatatcaaatgggactttacaccttgcaaaaacctacgggttggtagtcatatcactggcggagacatttatggaattgtcagtgagaactcgcttatcaaacacaaaatcatgttacccccacgaaacagaggaactgtaacttacattgctccacctgggaattatgatacctctgatgttgtcttggagcttgaatttgaaggtgtaaaggagaagttcaccatggtgcaagtatggcctgtacgtcaagttcgacctgtcactgagaagctgccagccaatcatcctctgttgactggccagagagtccttgatgccctttttccgtgtgtccagggaggaactactgctatccctggagcctttggctgtggaaagacagtgatatcacagtctctatccaagtattctaacagtgatgtaatcatctatgtaggatgtggtgaaagaggaaatgagatgtctgaagtcctccgggacttcccagagctcacaatggaggttgatggtaaggtagagtcaattatgaagaggacagctttggtagccaatacctccaatatgcctgttgctgctagagaagcctctatttatactggaatcacactgtcagagtacttccgtgacatgggctatcatgtcagtatgatggctgactctacctctagatgggctgaggcccttagagaaatctctggtcgtttagctgaaatgcctgcagatagtggatatccagcctatcttggtgcccgtctggcctcgttttatgaacgagcaggcagggtgaaatgtcttggaaatcctgaaagagaagggagtgtcagcattgtaggagcagtttctccacctggtggtgatttttctgatccagttacatctgccactcttggtatcgttcaggtgttctggggcttagataagaaactagctcaacgtaagcatttcccctctgtcaattggctcatcagctacagcaagtatatgcgtgccttggatgaatactatgacaaacacttcacagagttcgttcctctgaggacgaaagctaaggaaattctgcaggaagaagaagacctggcagaaattgtacagcttgtgggaaaggcttctttggcagaaacagataaaatcactctggaggtagcaaaacttatcaaagatgatttcctacaacaaaatggatatactccttatgacaggttctgcccattctacaagacagtagggatgctgtccaacatgattgcattttatgatatggctcgtagagctgttgaaaccactgcccagagtgacaataaaatcacatggtccattattcgtgagcacatgggagacatcctctataaactttcctccatgaaattcaaggatccactgaaagatggtgaggcaaagatcaaaagcgactatgcacaacttcttgaagacatgcagaatgcattccgtagccttgaagattagaagccttgaagattacaactgtgatttccttttcctcagcaagctcctatgtgtatattttcctgaatttctcatctcaaaccctttgcttctttattgtgcagctttgagactagtgcctatgtgtgttatttgtttccctgtttttttggtaggtcttatataaaacaaacattcctttgttctagtgttgtgaagggcctccctcttcctttatctgaagtggtgaatatagtaaatatacattctggttacactactgtaaacttgtatgtagggtgatgaccctctttgtcctaggtgtaccctttcctcatctctattaaattgtaaacaggactactgcatgtactctctttgcagtgaatttggaatggaaggccaggtttctataacttttgaacaggtactttgtgaaatgactcaatttctattgtggtaagctcattggcagcttagcattttgcaaaggaattgctttgcaggaaatatttaattttcaaaaacataatgattaatgttccaattatgcatcacttcccccagtataaatcaggaatgtttgtgagaaaccattgggaactatactctttttatttttattttttattttttttattattttttttttggggacggagtgtccctcttgttgcccaggctggagtgcaatggcgtgatcttggctcactgcagccttcgcctcccgggttcaagtgattctcctgcctcagcctcccgagtagctgggattacaggcatgctccaccatgcccagctaattttgtatttttagtagaaacggggtttcaccatattggtcaggctggtctcgaactccagacctcaggtgatccgcccacctcggcctcccaaactgctgggattacaggcgtgagccaccgcgcctggccagggactatactctttttaaaatagacatttgtggggctcacacaatatatgaaatagtaccctctaaaaaagagaaaaaaaaaatcaggcggtcaaacttagagcaacattgtcttattaaagcatagtttatttcactagaaaaaatttaatatcaaggactattacatacttcattactaggaagttctttttaaaatgacacttaaaacaatcactgaaaacttgatccacatcacaccctgtttattttccttaaacatcttggaagcctaagcttctgagaatcatgtggcaagtgtgatgggcagtaaaataccagagaagatgtttagtagcaattaaaggctgtttgcacctttaaggaccagctgggctgtagtgattcctggggccagagtggcattatgtttttacaaaataatgacatatgtcacatgtttgcatgtttgtttgcttgttgaatttttgaacagccagttgaccaatcatagaaagtattactttctttcatatggtttttggttcactggcttaagaggtttctcagaatatctatggccacagcagcataccagtttccatcctaataggaatgaaattaattttgtatctactgataacagaatctgggtcacatgaaaaaaaatcattttatccgtcttttaagtatatgtttaaaataataatttatgtgtctgcatattgcagaacagctctgagagcaacagtttcccattaactctttctgaccaatagtgctggcaccgttgcttcctctttgggaagaggaaagggtgtgtgaacatggctaacaatcttcaaatacccaaattgtgatagcataaataaagtatttattttatgcctcagtatattattatttaattttttaggtaatgcctatctcttggtctattaaggaaagaagcaatcagtagagaattcaggatagttttgtttaaattcttgcagattacatgtttttacagtggcctgctattgaggaaaggtattcttctatacaacttgttttaacctttgagaacattgacagaaattatgcaatggtttgttgagatacggacttgatggtgctgtttaatcagtttgcttccaaagtggcctactcaagaggccctaagactggtagaaattaaaaggatttcaaaaactttctattcctttcttaaacctaccagcaaactaggattgtgatagcaatgaatggtatgatgaagaaagtttgaccaaatttgtttttttgttgttgttgttgttttgaatttgaaatcattcttattccctttaagaatgtttatgtatgagtgtgaagatgctagcgaacctatgctcagatattcatcgtaagtctcccttcacctgttacagagtttcagatcggtcactgatagtatgtatttctttagtaagaatgtgttaaaattacaatgatcttttaaaaagatgatgcagttctgtatttattgtgctgtgtctggtcctaagtggagccaattaaacaagtttcatatgtatttttccagtgttgaatctcacacactgtactttgaaaatttccttccatcctgaataacgaatagaagaggccatatatattgcctccttatccttgagatttcactacctttatgttaaaagttgtgtataattgttaaaatctgtgaaagaataaaaagtggatttaaattaa

SEQ ID NO: 109935 - DNA, 710 bp, Homo sapiens
  Payload ID: 1579
  Gene Symbol: ATP6V1A
  Gene Name: ATPase, H+ transporting, lysosomal 70kDa, V1 subunit A
  ENST ID: ENST00000496747
  CDS Start-End: 157-710
aggacttcccctccgtggtgacagcctctgggtcctcggtcggtacagtctctgcacctcgcgccccagcagctacccaaaatactcgatgaagataaagaaagcacatttggttatgtgcatggggtctcaggacctgtggttacagcctgtgacatggcgggtgcagccatgtatgagctggtgagagtgggccacagcgaattggttggagagattattcgattggagggtgacatggctactattcaggtgtatgaagaaacttctggtgtgtctgttggagatcctgtacttcgcactggtaaacccctctctgtagagcttggtcctggcattatgggagccatttttgatggtattcaaagacctttgtcggatatcagcagtcagacccaaagcatctacatccccagaggagtaaacgtgtctgctcttagcagagatatcaaatgggactttacaccttgcaaaaacctacgggttggtagtcatatcactggcggagacatttatggaattgtcagtgagaactcgcttatcaaacacaaaatcatgttacccccacgaaacagaggaactgtaacttacattgctccacctgggaattatgatacctctgatgttgtcttggagcttgaatttgaaggtgtaaaggagaagttcaccatggtgcaagtatggcctgtacgtcaagttcgacctgtcac

SEQ ID NO: 109936 - DNA, 754 bp, Homo sapiens
  Payload ID: 1579
  Gene Symbol: ATP6V1A
  Gene Name: ATPase, H+ transporting, lysosomal 70kDa, V1 subunit A
  ENST ID: ENST00000475322
  CDS Start-End: 92-754
ccctccgtggtgacagcctctgggtcctcggtcggtacagtctctgcacctcgcgccccagcaggtgagcggcgaccggtaaactaacattatggatttttccaagctacccaaaatactcgatgaagataaagaaagcacatttggttatgtgcatggggtctcaggacctgtggttacagcctgtgacatggcgggtgcagccatgtatgagctggtgagagtgggccacagcgaattggttggagagattattcgattggagggtgacatggctactattcaggtgtatgaagaaacttctggtgtgtctgttggagatcctgtacttcgcactggtaaacccctctctgtagagcttggtcctggcattatgggagccatttttgatggtattcaaagacctttgtcggatatcagcagtcagacccaaagcatctacatccccagaggagtaaacgtgtctgctcttagcagagatatcaaatgggactttacaccttgcaaaaacctacgggttggtagtcatatcactggcggagacatttatggaattgtcagtgagaactcgcttatcaaacacaaaatcatgttacccccacgaaacagaggaactgtaacttacattgctccacctgggaattatgatacctctgatgttgtcttggagcttgaatttgaaggtgtaaaggagaagttcaccatggtgcaagtatggcctgtacgtcaagttcgacctgtcactgagaagctg

SEQ ID NO: 109937 - DNA, 2266 bp, Homo sapiens
  Payload ID: 1579
  Gene Symbol: ATP6V1A
  Gene Name: ATPase, H+ transporting, lysosomal 70kDa, V1 subunit A
  ENST ID: ENST00000470455
  CDS Start-End: 91-240
agctgaggacttcccctccgtggtgacagcctctgggtcctcggtcggtacagtctctgcacctcgcgccccagcaggtaaactaacattatggatttttccaagctacccaaaatactcgatgaagataaagaaagcacatttggttatgtgcatggggtctcaggacctgccttcactccatgtatcatagcaactctcagaacatacctgaatcctaccagtggttacagcctgtgacatggcgggtgcagccatgtatgagctggtgagagtgggccacagcgaattggttggagagattattcgattggagggtgacatggctactattcaggtgtatgaagaaacttctggtgtgtctgttggagatcctgtacttcgcactggtaaacccctctctgtagagcttggtcctggcattatgggagccatttttgatggtattcaaagacctttgtcggatatcagcagtcagacccaaagcatctacatccccagaggagtaaacgtgtctgctcttagcagagatatcaaatgggactttacaccttgcaaaaacctacgggttggtagtcatatcactggcggagacatttatggaattgtcagtgagaactcgcttatcaaacacaaaatcatgttacccccacgaaacagaggaactgtaacttacattgctccacctgggaattatgatacctctgatgttgtcttggagcttgaatttgaaggtgtaaaggagaagttcaccatggtgcaagtatggcctgtacgtcaagttcgacctgtcactgagaagctgccagccaatcatcctctgttgactggccagagagtccttgatgccctttttccgtgtgtccagggaggaactactgctatccctggagcctttggctgtggaaagacagtgatatcacagtctctatccaagtattctaacagtgatgtaatcatctatgtaggatgtggtgaaagaggaaatgagatgtctgaagtcctccgggacttcccagagctcacaatggaggttgatggtaaggtagagtcaattatgaagaggacagctttggtagccaatacctccaatatgcctgttgctgctagagaagcctctatttatactggaatcacactgtcagagtacttccgtgacatgggctatcatgtcagtatgatggctgactctacctctagatgggctgaggcccttagagaaatctctggtcgtttagctgaaatgcctgcagatagtggatatccagcctatcttggtgcccgtctggcctcgttttatgaacgagcaggcagggtgaaatgtcttggaaatcctgaaagagaagggagtgtcagcattgtaggagcagtttctccacctggtggtgatttttctgatccagttacatctgccactcttggtatcgttcaggtgttctggggcttagataagaaactagctcaacgtaagcatttcccctctgtcaattggctcatcagctacagcaagtatatgcgtgccttggatgaatactatgacaaacacttcacagagttcgttcctctgaggacgaaagctaaggaaattctgcaggaagaagaagacctggcagaaattgtacagcttgtgggaaaggcttctttggcagaaacagataaaatcactctggaggtagcaaaacttatcaaagatgatttcctacaacaaaatggatatactccttatgacaggttctgcccattctacaagacagtagggatgctgtccaacatgattgcattttatgatatggctcgtagagctgttgaaaccactgcccagagtgacaataaaatcacatggtccattattcgtgagcacatgggagacatcctctataaactttcctccatgaaattcaaggatccactgaaagatggtgaggcaaagatcaaaagcgactatgcacaacttcttgaagacatgcagaatgcattccgtagccttgaagattagaagccttgaagattacaactgtgatttccttttcctcagcaagctcctatgtgtatattttcctgaatttctcatctcaaaccctttgcttctttattgtgcagctttgagactagtgcctatgtgtgttatttgtttccctgtttttttggtaggtcttatataaaacaaacattcctttgttctagtgttgtgaagggcctccctcttcctttatctgaagtggtgaatatagtaaatatacattctggttacactactgtaaacttg

SEQ ID NO: 109938 - DNA, 773 bp, Homo sapiens
  Payload ID: 1580
  Gene Symbol: ATP6V0E1
  Gene Name: ATPase, H+ transporting, lysosomal 9kDa, V0 subunit e1
  ENST ID: ENST00000265093
  CDS Start-End: 46-243
tccgagtgaggcgacggggtaggggttggcgctcaggcggcgaccatggcgtatcacggcctcactgtgcctctcattgtgatgagcgtgttctggggcttcgtcggcttcttggtgccttggttcatccctaagggtcctaaccggggttggctgattgcaattctggcccaactcaaccctctctttggaccgcaattgaaaaatgaaaccatctggtatctgaagtatcattggccttgaggaagaagacatgctctacagtgctcagtctttgaggtcacgagaagagaatgccttctagatgcaaaatcacctccaaaccagaccacttttcttgacttgcctgttttggccattagctgccttaaacgttaacagcacatttgaatgccttattctacaatgcagcgtgttttcctttgccttttttgcactttggtgaattacgtgcctccataacctgaactgtgccgactccacaaaacgattatgtactcttctgagatagaagatgctgttcttctgagagatacgttactctctccttggaatctgtggatttgaagatggctcctgccttctcacgtgggaatcagtgaagtgtttagaaactgctgcaagacaaacaagactccagtggggtggtcagtaggagagcacgttcagagggaagagccatctcaacagaatcgcaccaaactatactttcaggatgaatttcttctttctgccatcttttggaataaatattttcctcctttctatggaaa

SEQ ID NO: 109939 - DNA, 502 bp, Homo sapiens
  Payload ID: 1580
  Gene Symbol: ATP6V0E1
  Gene Name: ATPase, H+ transporting, lysosomal 9kDa, V0 subunit e1
  Uniprot ID: O15342
  ENST ID: ENST00000517669
  CDS Start-End: 31-276
ggggtaggggttggcgctcaggcggcgaccatggcgtatcacggcctcactgtgcctctcattgtgatgagcgtgttctggggcttcgtcggcttcttggtgccttggttcatccctaagggtcctaaccggggagttatcattaccatgttggtgacctgttcagtttgctgctatctcttttggctgattgcaattctggcccaactcaaccctctctttggaccgcaattgaaaaatgaaaccatctggtatctgaagtatcattggccttgaggaagaagacatgctctacagtgctcagtctttgaggtgactatgcttgtgacctttcttatcagtatggtcaggcagtcagagtttgccttgactttttctcacattttatggccattttaacacgtggcaagggcaagctgctgaatgcaaacacgatctgaagagcagaaataaaattggaacttaagccttagcttacctaaatctcattaagattcttttt

SEQ ID NO: 109940 - DNA, 1433 bp, Homo sapiens
  Payload ID: 1580
  Gene Symbol: ATP6V0E1
  Gene Name: ATPase, H+ transporting, lysosomal 9kDa, V0 subunit e1
  Uniprot ID: O15342
  ENST ID: ENST00000519374
  CDS Start-End: 105-350
gggaggcggggcttgcacacgctggtcacgcggtcagctattgacacttcctggtgggatccgagtgaggcgacggggtaggggttggcgctcaggcggcgaccatggcgtatcacggcctcactgtgcctctcattgtgatgagcgtgttctggggcttcgtcggcttcttggtgccttggttcatccctaagggtcctaaccggggagttatcattaccatgttggtgacctgttcagtttgctgctatctcttttggctgattgcaattctggcccaactcaaccctctctttggaccgcaattgaaaaatgaaaccatctggtatctgaagtatcattggccttgaggaagaagacatgctctacagtgctcagtctttgaggtcacgagaagagaatgccttctagatgcaaaatcacctccaaaccagaccacttttcttgacttgcctgttttggccattagctgccttaaacgttaacagcacatttgaatgccttattctacaatgcagcgtgttttcctttgccttttttgcactttggtgaattacgtgcctccataacctgaactgtgccgactccacaaaacgattatgtactcttctgagatagaagatgctgttcttctgagagatacgttactctctccttggaatctgtggatttgaagatggctcctgccttctcacgtgggaatcagtgaagtgtttagaaactgctgcaagacaaacaagactccagtggggtggtcagtaggagagcacgttcagagggaagagccatctcaacagaatcgcaccaaactatactttcaggatgaatttcttctttctgccatcttttggaataaatattttcctcctttctatggaaatctgggctcggtgtttgtaaagttcatttttataagcttttctatcgctacataatgcctttttaaaaaatgattttgtagtctaaacttaggttgagtatataaaccctgccatgtagcttgagatgcctgaaaagactggtaagtgcgtttcttaatcgttcagtaactatttgagtgcctactgcagccaaggcactggagggatcaaagatgtgtaaatttggagtccctgcaagttcacaagctatttggagagataaggttagtatacatagaactgtaatataaggttgtgttggagcattgtccttaaagatggtaccatggtgagcagttcaaggttacctgccagctgcagaacaaggcagcaaatgctcctgagatggaaccatcacagcctcagacataggactaaagaagtcaagagtgattaaaaagccaggggcaggagacagtaattttgtatttcagtagcaggcatctcgatacactaatttgagagctttattacttttaagaaattaaaaattaaaatgaacctaaattttca

SEQ ID NO: 109941 - DNA, 718 bp, Homo sapiens
  Payload ID: 1580
  Gene Symbol: ATP6V0E1
  Gene Name: ATPase, H+ transporting, lysosomal 9kDa, V0 subunit e1
  ENST ID: ENST00000519911
  CDS Start-End: 81-257
gtcacgcggtcagctattgacacttcctggtgggatccgagtgaggcgacggggtaggggttggcgctcaggcggcgaccatggcgtatcacggcctcactgtgcctctcattgtgatgagcgtgttctggggcttcgtcggcttcttggtgccttggttcatccctaagggtcctaaccggggagttatcattaccatgttggtgacctgttcagtttgctgctatctcttgtcacgagaagagaatgccttctagatgcaaaatcacctccaaaccagaccacttttcttgacttgcctgttttggccattagctgccttaaacgttaacagcacatttgaatgccttattctacaatgcagcgtgttttcctttgccttttttgcactttggtgaattacgtgcctccataacctgaactgtgccgactccacaaaacgattatgtactcttctgagatagaagatgctgttcttctgagagatacgttactctctccttggaatctgtggatttgaagatggctcctgccttctcacgtgggaatcagtgaagtgtttagaaactgctgcaagacaaacaagactccagtggggtggtcagtaggagagcacgttcagagggaagagccatctcaacagaatcgcaccaaactatactttcaggatgaatttcttctttctgccatcttttggaataaatattttcctcctttc

SEQ ID NO: 109942 - DNA, 2099 bp, Homo sapiens
  Payload ID: 1581
  Gene Symbol: ATP6AP1
  Gene Name: ATPase, H+ transporting, lysosomal accessory protein 1
  Uniprot ID: Q15904
  ENST ID: ENST00000369762
  CDS Start-End: 62-1474
gggggcaacggtcacctgatctgcggctgtcgaggccgctgaggcagtggaggctgaggctatgatggcggccatggcgacggctcgagtgcggatggggccgcggtgcgcccaggcgctctggcgcatgccgtggctgccggtgtttttgtcgttggcggcggcggcggcggcggcagcggcggagcagcaggtcccgctggtgctgtggtcgagtgaccgggacttgtgggctcctgcggccgacactcatgaaggccacatcaccagcgacttgcagctctctacctacttagatcccgccctggagctgggtcccaggaatgtgctgctgttcctgcaggacaagctgagcattgaggatttcacagcatatggcggtgtgtttggaaacaagcaggacagcgccttttctaacctagagaatgccctggacctggccccctcctcactggtgcttcctgccgtcgactggtatgcagtcagcactctgaccacttacctgcaggagaagctcggggccagccccttgcatgtggacctggccaccctgcgggagctgaagctcaatgccagcctccctgctctgctgctcattcgcctgccctacacagccagctctggtctgatggcacccagggaagtcctcacaggcaacgatgaggtcatcgggcaggtcctgagcacactcaagtccgaagatgtcccatacacagcggccctcacagcggtccgcccttccagggtggcccgtgatgtagccgtggtggccggagggctaggtcgccagctgctacaaaaacagccagtatcacctgtgatccatcctcctgtgagttacaatgacaccgctccccggatcctgttctgggcccaaaacttctctgtggcgtacaaggaccagtgggaggacctgactcccctcacctttggggtgcaggaactcaacctgactggctccttctggaatgactcctttgccaggctctcactgacctatgaacgactctttggtaccacagtgacattcaagttcattctggccaaccgcctctacccagtgtctgcccggcactggtttaccatggagcgcctcgaagtccacagcaatggctccgtcgcctacttcaatgcttcccaggtcacagggcccagcatctactccttccactgcgagtatgtcagcagcctgagcaagaagggtagtctcctcgtggcccgcacgcagccctctccctggcagatgatgcttcaggacttccagatccaggctttcaacgtaatgggggagcagttctcctacgccagcgactgtgccagcttcttctcccccggcatctggatggggctgctcacctccctgttcatgctcttcatcttcacctatggcctgcacatgatcctcagcctcaagaccatggatcgctttgatgaccacaagggccccactatttctttgacccagattgtgtgaccctgtgccagtgggggggttgagggtgggacggtgtccgtgttgttgctttcccaccctgcagcgcactggactgaagagcttccctcttcctactgcagcatgaactgcaagctcccctcagcccatcttgctccctcttcagcccgctgaggagctttcttgggctgcccccatctctcccaacaaggtgtacatattctgcgtagatgctagaccaaccagcttcccagggttcgtcgctgtgaggcgtaagggacatgaattctagggtctcctttctccttatttattcttgtggctacatcatccctggctgtggatagtgcttttgtgtagcaaatgctccctccttaaggttatagggctccctgagtttgggagtgtggaagtactacttaactgtctgtcctgcttggctgtcgttatcgttttctggtgatgttgtgctaacaataagaagtacacgggtttatttctgtggcctgagaaggaagggacctccacgacaggtgggctgggtgcgatcgccggctgtttggcatgttcccaccgggagtgccgggcaggagcatggggtgcttggttgtttccttcctaataaaataaacgcgggtcgccatgc

SEQ ID NO: 109943 - DNA, 720 bp, Homo sapiens
  Payload ID: 1581
  Gene Symbol: ATP6AP1
  Gene Name: ATPase, H+ transporting, lysosomal accessory protein 1
  ENST ID: ENST00000449556
  CDS Start-End: 31-720
gaggccgctgaggcagtggaggctgaggctatgatggcggccatggcgacggctcgagtgcggatggggccgcggtgcgcccaggcgctctggcgcatgccgtggctgccggtgtttttgtcgttggcggcggcggcggcggcggcagcggcggagcagcaggtcccgctggtgctgtggtcgagtgaccgggacttgtgggctcctgcggccgacactcatgaaggccacatcaccagcgacttgcagctctctacctacttagatcccgccctggagctgggtcccaggaatgtgctgctgttcctgcaggacaagctgagcattgaggatttcacagcatatggcggtgtgtttggaaacaagcaggacagcgccttttctaacctagagaatgccctggacctggccccctcctcactggtgcttcctgccgtcgactggtatgcagtcagcactctgaccacttacctgcaggagaagctcggggccagccccttgcatgtggacctggccaccctgcgggagctgaagctcaatgccagcctccctgctctgctgctcattcgcctgccctacacagccagctctggtctgatggcacccagggaagtcctcacagatgaggtcatcgggcaggtcctgagcacactcaagtccgaagatgtcccatacacagcggccctcacagcggtccgcccttccagggtggcccgtgat

SEQ ID NO: 109944 - DNA, 4515 bp, Homo sapiens
  Payload ID: 1581
  Gene Symbol: ATP6AP1
  Gene Name: ATPase, H+ transporting, lysosomal accessory protein 1
  ENST ID: ENST00000455205
  CDS Start-End: 1-400
ggcggccatggcgacggctcgagtgcggatggggccgcggtgcgcccaggcgctctggcgcatgccgtggctgccggtgtttttgtcgttggcggcggcggcggcggcggcagcggcggagcagcaggtcccgctggtgctgtggtcgagtgaccgggacttgtgggctcctgcggccgacactcatgaaggccacatcaccagcgacttgcagctctctacctacttagatcccgccctggagctgggtcccaggaatgtgctgctgttcctgcaggacaaggtgcgcccgccccagcccactctcccccggtcatcgggaggcagccaggccccctccccccatgacactgacgcccattccccaagggaagcttcagtgaccttgtcccaactgtagggaggtgtgggtcgtctcatgggaaggcctgtagtaaacgcttcagtgggcatggcgacagcctcggaaatggcaccaacttgattggaggaagcgacggaccagaggccaggtacctactgagtaccaagcactttggatatctgacttagtccaatatggtgggtggggattatcgtccctgtttgtttatagatgagaagactgaggctggaggttaagtgacttgtccaagctcatacagctaatgggtggcagagttgtaattctagctgtgatgatcataataatgataattggaaaatgctcacctgtttagtgctttgtaggcacttgctacactgatgtcattatcttggtttcactgccaaggaaagtaaggtttgtcgagatacaatgtttcactacagttgatagataccactttggttccagcctgagtctgccaatcctccctcccaattggagctcataacccgcatgctgttttccttcccatccaggatctttgccccaaaagcaggcgtggagaccatgagatgactctaagatagcaagtctctgctaggccctcccttgttggtggcctgtatggctcattgcccttgtagtctcccttggttgctgtgtgggcagatggtggtggcctgaagtcttttcaggaggtggtaaataatatagtcaaataggaactgagtcctagttctaccatgtaaccagccattggaggcatgaaataatctttgtgaatgacagtttctacatctgtaaaatgaagacaccacctatatcagagggctgtgagtgggaaatcttttttttttttttttttgagacggagtctcgctctgttgcccaggctggaatgcagtggtgcaatgtcagctcagctcactgcaccctccgcctcccgggttcaagcagttctctgcctcagcctcccgagtagctaggattacagggcgcccgccactacacccagctaatttttgtatttttttgtatttttagtagagatggggtttcaccatgttggccaggctggtcttgaactcctgacctcgtgatccacccacctcagcctcccaaactgctgggattacaggcgtgagccaccgcgcccggcctgtgagggggaattcttataatccacataaaacatctagccaggatcccccagtcttagggcattcacccattcattcatttgcccaatatggaaagcctactatgtgccaggtattgtgaagtgttggggatatggcagtgagcagaagaacccaagcccccaccctcaggaagctgacattcttgtgagggtggccagtaaatactaagtcggtataggatatgatgtcagtgttacggcctttagggaaggaagcaggctaaggggacagagtgactgggatgctattttagataagggtggtcaggccaggcctcattgaggaggtgatatatgagcagcgatcttaatggagggagggagccgtttggggaaggacattcctggaacagcaaatgcgagggtcctgggcgaggtgtgctcttggccagctcaaggaagagctggtgtggctggagcacagtgagtgagagaaaggggtaggagatgtaggagatggtttgcaggtggctaggcgatgaagtaggaccttgtaggccatgagggggaaggtcagttgcagttcgaaatgtgtgagaaagccttgggtaacgtggagcagggagtggtgtgatttctcaattaaagaaagcccacaggacccaccagcagttcctgggctttccgactgagaaccccggtggccaaacagcagcaaggtcctgcccacaagggaggggaggctgggcgagtgtgtataccaaacaggttagggaagctgattaaaatctcctcagggcctaactgggaagggccagaggaagctggggatgggagtggagggtaggagcaaaaggacaaaggacatctgtaggttgtggagaaaaagggatggggtcggggccactgtggtcctaagagctcaaaagacttcaatgctcgatgcttcctccagcatgttctgagatcctcacctctccccttccgccaaaagcaggtggggggagggtcccgtccagactggacatagccgactctccttttctctggctgggaggcctgccacaaatgctcttggctgccccaccccctccccgcagcttccctgttccctccccagttcctcttgtctgtagggtgggcaaggcggctgactcctactcctgagttaccacaagtcagctgcctgcagatctccccaccccatgactgccttccatgtcttctcaccctgccctgagagtgctggagggaagagctgagcattgaggatttcacagcatatggcggtgtgtttggaaacaagcaggacagcgccttttctaacctagagaatgccctggacctggccccctcctcactggtgcttcctgccgtcgactggtatgcagtcagcactctgaccacttacctgcaggagaagctcggggccagccccttgcatgtggacctggccaccctgcgggagctgaagctcaatgccagcctccctgctctgctgctcattcgcctgccctacacagccagctctggtctgatggcacccagggaagtcctcacaggcaacgatgaggtcatcgggcaggtcctgagcacactcaagtccgaagatgtcccatacacagcggccctcacagcggtccgcccttccagggtggcccgtgatgtagccgtggtggccggagggctaggtcgccagctgctacaaaaacagccagtatcacctgtgatccatcctcctgtgagttacaatgacaccgctccccggatcctgttctgggcccaaaacttctctgtggcgtacaaggaccagtgggaggacctgactcccctcacctttggggtgcaggaactcaacctgactggctccttctggaatgactcctttgccaggctctcactgacctatgaacgactctttggtaccacagtgacattcaagttcattctggccaaccgcctctacccagtgtctgcccggcactggtttaccatggagcgcctcgaagtccacagcaatggctccgtcgcctacttcaatgcttcccaggtcacagggcccagcatctactccttccactgcgagtatgtcagcagcctgagcaagaagggtagtctcctcgtggcccgcacgcagccctctccctggcagatgatgcttcaggacttccagatccaggctttcaacgtaatgggggagcagttctcctacgccagcgactgtgccagcttcttctcccccggcatctggatggggctgctcacctccctgttcatgctcttcatcttcacctatggcctgcacatgatcctcagcctcaagaccatggatcgctttgatgaccacaagggccccactatttctttgacccagattgtgtgaccctgtgccagtgggggggttgagggtgggacggtgtccgtgttgttgctttcccaccctgcagcgcactggactgaagagcttccctcttcctactgcagcatgaactgcaagctcccctcagcccatcttgctccctcttcagcccgctgaggagctttcttgggctgcccccatctctcccaacaaggtgtacatattctgcgtagatgctagaccaaccagcttcccagggttcgtcgctgtgaggcgtaagggacatgaattctagggtctcctttctccttatttattcttgtggctacatcatccctggctgtggatagtgcttttgtgtagcaaatgctccctccttaaggttatagggctccctgagtttgggagtgtggaagtactacttaactgtctgtcctgcttggctgtcgttatcgttttctggtgatgttgtgctaacaataagaagtacacgggtttatttctgtggcctgagaaggaagggacctccacgacaggtgggctgggtgcgatcgccggctgtttggcatgttcccaccgggagtgccgggcaggagcatggggtgcttggttgtttccttcctaataaaataaacgcgggtcgccatg

SEQ ID NO: 109945 - DNA, 867 bp, Homo sapiens
  Payload ID: 1581
  Gene Symbol: ATP6AP1
  Gene Name: ATPase, H+ transporting, lysosomal accessory protein 1
  ENST ID: ENST00000422890
  CDS Start-End: 49-867
acctgatctgcggctgtcgaggccgctgaggcagtggaggctgaggctatgatggcggccatggcgacggctcgagtgcggatggggccgcggtgcgcccaggcgctctggcgcatgccgtggctgccggtgtttttgtcgttggcggcggcggcggcggcggcagcggcggagcagcaggtcccgctggtgctgtggtcgagtgaccgggacttgtgggctcctgcggccgacactcatgaaggccacatcaccagcgacttgcagctctctacctacttagatcccgccctggagctgggtcccaggaatgtgctgctgttcctgcaggacaagctgagcattgaggatttcacagcatatggcggtgtgtttggaaacaagcaggacagcgccttttctaacctagagaatgccctggacctggccccctcctcactggtgcttcctgccgtcgactggtatgcagtcagcactctgaccacttacctgcaggagaagctcggggccagccccttgcatgtggcccgtgatgtagccgtggtggccggagggctaggtcgccagctgctacaaaaacagccagtatcacctgtgatccatcctcctgtgagttacaatgacaccgctccccggatcctgttctgggcccaaaacttctctgtggcgtacaaggaccagtgggaggacctgactcccctcacctttggggtgcaggaactcaacctgactggctccttctggaatgactcctttgccaggttcattctggccaaccgcctctacccagtgtctgcccggcactggtttaccatggagcgcctcgaagtccacagcaatggctccgtcgcctacttcaatgcttcc

SEQ ID NO: 109946 - DNA, 604 bp, Homo sapiens
  Payload ID: 1581
  Gene Symbol: ATP6AP1
  Gene Name: ATPase, H+ transporting, lysosomal accessory protein 1
  ENST ID: ENST00000439372
  CDS Start-End: 7-411
gaggctatgatggcggccatggcgacggctcgagtgcggatggggccgcggtgcgcccaggcgctctggcgcatgccgtggctgccggtgtttttgtcgttggcggcggcggcggcggcggcagcggcggagcagcaggtcccgctggtgctgtggtcgagtgaccgggacttgtgggctcctgcggccgacactcatgaaggccacatcaccagcgacttgcagctctctacctacttagatcccgccctggagctgggtcccaggaatgtgctgctgttcctgcaggacaaggtgcgcccgccccagcccactctcccccggtcatcgggaggcagccaggccccctccccccatgacactgacgcccattccccaagggaagcttcagtgaccttgtcccaactgtagggaggtgtgggtcgtctcatgggaaggcctgtagtaaacgcttcagtgggcatggcgacagcctcggaaatggcaccaacttgattggaggaagcgacggaccagaggccagttcctcttgtctgtagggtgggcaaggcggctgactcctactcctgagttaccacaagtcagctgcctgcagatctcccca

SEQ ID NO: 109947 - DNA, 769 bp, Homo sapiens
  Payload ID: 1581
  Gene Symbol: ATP6AP1
  Gene Name: ATPase, H+ transporting, lysosomal accessory protein 1
  ENST ID: ENST00000429585
  CDS Start-End: 1-387
gcccaggcgctctggcgcatgccgtggctgccggtgtttttgtcgttggcggcggcggcggcggcggcagcggcggagcagcaggtcccgctggtgctgtggtcgagtgaccgggacttgtgggctcctgcggccgacactcatgaaggccacatcaccagcgacttgcagctctctacctacttagatcccgccctggagctgggtcccaggaatgtgctgctgttcctgcaggacaagctgagcattgaggatttcacagcatatggcggtgtgtttggaaacaagcaggacagcgccttttctaacctagagcacactcaagtccgaagatgtcccatacacagcggccctcacagcggtccgcccttccagggtggcccgtgatgtagccgtggtggccggagggctaggtcgccagctgctacaaaaacagccagtatcacctgtgatccatcctcctgtgagttacaatgacaccgctccccggatcctgttctgggcccaaaacttctctgtggcgtacaaggaccagtgggaggacctgactcccctcacctttggggtgcaggaactcaacctgactggctccttctggaatgactcctttgccaggctctcactgacctatgaacgactctttggtaccacagtgacattcaagttcattctggccaaccgcctctacccagtgtctgcccggcactggtttaccatggagcgcctcgaagtccacagcaatggctccgtcgcctacttcaatgcttcc

SEQ ID NO: 109948 - DNA, 571 bp, Homo sapiens
  Payload ID: 1581
  Gene Symbol: ATP6AP1
  Gene Name: ATPase, H+ transporting, lysosomal accessory protein 1
  ENST ID: ENST00000446552
  CDS Start-End: 5-409
ggctatgatggcggccatggcgacggctcgagtgcggatggggccgcggtgcgcccaggcgctctggcgcatgccgtggctgccggtgtttttgtcgttggcggcggcggcggcggcggcagcggcggagcagcaggtcccgctggtgctgtggtcgagtgaccgggacttgtgggctcctgcggccgacactcatgaaggccacatcaccagcgacttgcagctctctacctacttagatcccgccctggagctgggtcccaggaatgtgctgctgttcctgcaggacaaggtgcgcccgccccagcccactctcccccggtcatcgggaggcagccaggccccctccccccatgacactgacgcccattccccaagggaagcttcagtgaccttgtcccaactgtagggaggtgtgggtcgtctcatgggaaggcctgtagtaaacgcttcagtgggcatggcgacagcctcggaaatggcaccaacttgattggaggaagcgacggaccagaggccagctgagcattgaggatttcacagcatatggcggtgtgtttggaaacaagca

SEQ ID NO: 109949 - DNA, 2823 bp, Homo sapiens
  Payload ID: 1581
  Gene Symbol: ATP6AP1
  Gene Name: ATPase, H+ transporting, lysosomal accessory protein 1
  ENST ID: ENST00000619046
  CDS Start-End: 1354-2199
cctcaggaagctgacattcttgtgagggtggccagtaaatactaagtcggtataggatatgatgtcagtgttacggcctttagggaaggaagcaggctaaggggacagagtgactgggatgctattttagataagggtggtcaggccaggcctcattgaggaggtgatatatgagcagcgatcttaatggagggagggagccgtttggggaaggacattcctggaacagcaaatgcgagggtcctgggcgaggtgtgctcttggccagctcaaggaagagctggtgtggctggagcacagtgagtgagagaaaggggtaggagatgtaggagatggtttgcaggtggctaggcgatgaagtaggaccttgtaggccatgagggggaaggtcagttgcagttcgaaatgtgtgagaaagccttgggtaacgtggagcagggagtggtgtgatttctcaattaaagaaagcccacaggacccaccagcagttcctgggctttccgactgagaaccccggtggccaaacagcagcaaggtcctgcccacaagggaggggaggctgggcgagtgtgtataccaaacaggttagggaagctgattaaaatctcctcagggcctaactgggaagggccagaggaagctggggatgggagtggagggtaggagcaaaaggacaaaggacatctgtaggttgtggagaaaaagggatggggtcggggccactgtggtcctaagagctcaaaagacttcaatgctcgatgcttcctccagcatgttctgagatcctcacctctccccttccgccaaaagcaggtggggggagggtcccgtccagactggacatagccgactctccttttctctggctgggaggcctgccacaaatgctcttggctgccccaccccctccccgcagcttccctgttccctccccagttcctcttgtctgtagggtgggcaaggcggctgactcctactcctgagttaccacaagtcagctgcctgcagatctccccaccccatgactgccttccatgtcttctcaccctgccctgagagtgctggagggaagagctgagcattgaggatttcacagcatatggcggtgtgtttggaaacaagcaggacagcgccttttctaacctagagaatgccctggacctggccccctcctcactggtgcttcctgccgtcgactggtatgcagtcagcactctgaccacttacctgcaggagaagctcggggccagccccttgcatgtggacctggccaccctgcgggagctgaagctcaatgccagcctccctgctctgctgctcattcgcctgccctacacagccagctctggtctgatggcacccagggaagtcctcacaggcaacgatgaggtcatcgggcaggtcctgagcacactcaagtccgaagatgtcccatacacagcggccctcacagcggtccgcccttccagggtggcccgtgatgtagccgtggtggccggagggctaggtcgccagctgctacaaaaacagccagtatcacctgtgatccatcctcctgtgagttacaatgacaccgctccccggatcctgttctgggcccaaaacttctctgtggcgtacaaggaccagtgggaggacctgactcccctcacctttggggtgcaggaactcaacctgactggctccttctggaatgactcctttgccaggctctcactgacctatgaacgactctttggtaccacagtgacattcaagttcattctggccaaccgcctctacccagtgtctgcccggcactggtttaccatggagcgcctcgaagtccacagcaatggctccgtcgcctacttcaatgcttcccaggtcacagggcccagcatctactccttccactgcgagtatgtcagcagcctgagcaagaagggtagtctcctcgtggcccgcacgcagccctctccctggcagatgatgcttcaggacttccagatccaggctttcaacgtaatgggggagcagttctcctacgccagcgactgtgccagcttcttctcccccggcatctggatggggctgctcacctccctgttcatgctcttcatcttcacctatggcctgcacatgatcctcagcctcaagaccatggatcgctttgatgaccacaagggccccactatttctttgacccagattgtgtgaccctgtgccagtgggggggttgagggtgggacggtgtccgtgttgttgctttcccaccctgcagcgcactggactgaagagcttccctcttcctactgcagcatgaactgcaagctcccctcagcccatcttgctccctcttcagcccgctgaggagctttcttgggctgcccccatctctcccaacaaggtgtacatattctgcgtagatgctagaccaaccagcttcccagggttcgtcgctgtgaggcgtaagggacatgaattctagggtctcctttctccttatttattcttgtggctacatcatccctggctgtggatagtgcttttgtgtagcaaatgctccctccttaaggttatagggctccctgagtttgggagtgtggaagtactacttaactgtctgtcctgcttggctgtcgttatcgttttctggtgatgttgtgctaacaataagaagtacacgggtttatttctgtggcctgagaaggaagggacctccacgacaggtgggctgggtgcgatcgccggctgtttggcatgttcccaccgggagtgccgggcaggagcatggggtgcttggttgtttccttcctaataaaataaacgcgggtcgccatg

SEQ ID NO: 109950 - DNA, 2503 bp, Homo sapiens
  Payload ID: 1582
  Gene Symbol: ATP6AP1L
  Gene Name: ATPase, H+ transporting, lysosomal accessory protein 1-like
  Uniprot ID: Q52LC2
  ENST ID: ENST00000380167
  CDS Start-End: 1326-2000
taaattaaataattaaatagatgatttttacatactgtagagctatagagaaaatatagctggatgggtgatagtgacttggggatgggggtggctactctggatagggtagtttaaggtgacatctctgtgcagatgtagaatgggctagtgctttctaagaactgaaagatcagtgaagaaggggagcatagtgactgaggagtagtgtggcattagatggggtctgagagttacacaggaacatgtggagcctgtaggccatggtaaagcctttttctactcttctggtgatttaaagccattgtaaagttttgagcttgggagtaggtagcaaaataagatttatatttttatggggttactctggctgttgagaggagaaaaagacatgaatctgggaggccacttgggaagcaaggccatcagtgaagagaaagagtgggagaaaaaggtttgaggagagaaggtataggactttcactaaccttggaccatatatttgccaggaagaatgtaagttctccaacatcttcaaataaagaagtggttatgaggaatgatcagaataatggagatatgaaaccattccagaatttcacaacaataccaatcacacaggctctcaactacaatctgagcaaagaagggcatttagaaaaagaaccttggaatgcattcagccatcatggcccagttaatgtctccatcaatggaattccttgcattctcttctgggccaaaagaataatgattaaatttaagaatcaaacctggctggaccttacagacgagccatttggtcagaaggtaactgtggaccctgacaactcaaattgcagtgaagaaagtgctagaaaaaaaaagtaggctcctttgtataggaccctgacacacatctttgaggaagtatttactgtctaaaataaaggaacaagtcagaagttaacttcaaaaattgttggctgggcatggtggctcacgcctgtaatcccagcacttcgggaggccaagggagtggatcacctgaggtcaggagttggagacaagcctggccaacatggtgaaacctcgtctctactaaaatacaaaaattagccgggcgtggtggcaggtgcctgtaatcccagctactcaggaggctgagacaggagaattgcttgaacctgggaggtggaggttgtggtgagctgagatcgcgccattgctctccagcttgggtgacagagtgagtgagactccatctcaaaaaaaaaaaattgttatattttcccggcagttttcttctgaacctttttgctaattgtcggaataacttgtagaaaatgagactttggaaagcaagggttctcaaactcgttttgaaaacagcaaaggattccaggcttggtctcaactccaaatggttgtctttgaagcttggtgatgctggaaaccccagaagtcttgctataagattcatccttaccaattacaacaagttgtccatccagagttggtttagtttgcgccgagtcgagatcatttccaacaattcaatccaagcagtctttaacccaactggcgtatatgctccctctggttactcctaccgctgccaacgcgtgggcagcctgcagcaggaccaggccctcttgctgcccagcgacacggatgatgggtcgagcctgtgggaggtcacttttattgatttccagatccaaggttttgccatcaaggggggacgatttaccaaagcccaagactgcgcctcctccttctcgccagcttttctgatcggcctggcaatgtccctgatcctgctgctggtgttggcctatgccctgcacatgctcatctacctgcggtatctggaccaacaatatgatctcatcgcctctcctgcccacttctcgcagctgaaagctcgagacacagccgaagagaaggagctgctgaggagccagggggctgaatgctataaactgagaagccaacagatcagcaaaatctatgtttagcagcacaggctggcccccaccatgtccacagtgggctccgaaagttgtctctgttctgtgctatttgacttgtgaattacagattttcaccaaatggcttgattacaaaaaaaaagaaaaaacacaaaaaggaaatagataatgaattctttttgaaccatccactggcctacttaggtagacttggggcaatcaaaaaaggcatctcagggatcccacagagacaaatatgactgttagttgcctcaaagtaccctgaaagcaaaggggtatttcaagtacggaaaaagagagagagagaagaagaaggaggaggaggaggaggaggagaaggagaaggaggagcaggaggaagaggaggaggaggaggaaagggagggagggagggagagggagagagagagaaagattggcaacacagagaagggaaaacacacttggtcctccttgcctgtgccagtttggatgtgacaattatagaaataataaaccaagattatctg

SEQ ID NO: 109951 - DNA, 758 bp, Homo sapiens
  Payload ID: 1582
  Gene Symbol: ATP6AP1L
  Gene Name: ATPase, H+ transporting, lysosomal accessory protein 1-like
  Uniprot ID: Q52LC2
  ENST ID: ENST00000439350
  CDS Start-End: 56-730
tcccggcagttttcttctgaacctttttgctaattgtcggaataacttgtagaaaatgagactttggaaagcaagggttctcaaactcgttttgaaaacagcaaaggattccaggcttggtctcaactccaaatggttgtctttgaagcttggtgatgctggaaaccccagaagtcttgctataagattcatccttaccaattacaacaagttgtccatccagagttggtttagtttgcgccgagtcgagatcatttccaacaattcaatccaagcagtctttaacccaactggcgtatatgctccctctggttactcctaccgctgccaacgcgtgggcagcctgcagcaggaccaggccctcttgctgcccagcgacacggatgatgggtcgagcctgtgggaggtcacttttattgatttccagatccaaggttttgccatcaaggggggacgatttaccaaagcccaagactgcgcctcctccttctcgccagcttttctgatcggcctggcaatgtccctgatcctgctgctggtgttggcctatgccctgcacatgctcatctacctgcggtatctggaccaacaatatgatctcatcgcctctcctgcccacttctcgcagctgaaagctcgagacacagccgaagagaaggagctgctgaggagccagggggctgaatgctataaactgagaagccaacagatcagcaaaatctatgtttagcagcacaggctggcccccaccatgtcca

SEQ ID NO: 109952 - DNA, 2093 bp, Homo sapiens
  Payload ID: 1583
  Gene Symbol: ATP6AP2
  Gene Name: ATPase, H+ transporting, lysosomal accessory protein 2
  Uniprot ID: O75787
  ENST ID: ENST00000378438
  CDS Start-End: 159-1211
gtggagaaagcggcagctgtcccagcggaagcgacgaagggacgggacccgggagcctggacgagtccgagcgcgtcacctcctcacgctgcggctgtcgcccgtgtcccgccggcccgttccgtgtcgccccgcagtgctgcggccgccgcggcaccatggctgtgtttgtcgtgctcctggcgttggtggcgggtgttttggggaacgagtttagtatattaaaatcaccagggtctgttgttttccgaaatggaaattggcctataccaggagagcggatcccagacgtggctgcattgtccatgggcttctctgtgaaagaagacctttcttggccaggactcgcagtgggtaacctgtttcatcgtcctcgggctaccgtcatggtgatggtgaagggagtgaacaaactggctctacccccaggcagtgtcatttcgtaccctttggagaatgcagttccttttagtcttgacagtgttgcaaattccattcactccttattttctgaggaaactcctgttgttttgcagttggctcccagtgaggaaagagtgtatatggtagggaaggcaaactcagtgtttgaagacctttcagtcaccttgcgccagctccgtaatcgcctgtttcaagaaaactctgttctcagttcactccccctcaattctctgagtaggaacaatgaagttgacctgctctttctttctgaactgcaagtgctacatgatatttcaagcttgctgtctcgtcataagcatctagccaaggatcattctcctgatttatattcactggagctggcaggtttggatgaaattgggaagcgttatggggaagactctgaacaattcagagatgcttctaagatccttgttgacgctctgcaaaagtttgcagatgacatgtacagtctttatggtgggaatgcagtggtagagttagtcactgtcaagtcatttgacacctccctcattaggaagacaaggactatccttgaggcaaaacaagcgaagaacccagcaagtccctataaccttgcatataagtataattttgaatattccgtggttttcaacatggtactttggataatgatcgccttggccttggctgtgattatcacctcttacaatatttggaacatggatcctggatatgatagcatcatttataggatgacaaaccagaagattcgaatggattgaatgttacctgtgccagaattagaaaagggggttggaaattggctgttttgttaaaatatatcttttagtgtgctttaaagtagatagtatactttacatttataaaaaaaaatcaaattttgttctttattttgtgtgtgcctgtgatgtttttctagagtgaattatagtattgacgtgaatcccactgtggtatagattccataatatgcttgaatattatgatatagccatttaataacattgatttcattctgtttaatgaatttggaaatatgcactgaaagaaatgtaaaacatttagaatagctcgtgttatggaaaaaagtgcactgaatttattagacaaacttacgaatgcttaacttctttacacagcataggtgaaaatcatatttgggctattgtatactatgaacaatttgtaaatgtcttaatttgatgtaaataactctgaaacaagagaaaaggtttttaacttagagtagccctaaaatatggatgtgcttatataatcgcttagttttggaactgtatctgagtaacagaggacagctgttttttaaccctcttctgcaagtttgttgacctacatgggctaatatggatactaaaaatactacattgatctaagaagaaactagccttgtggagtatatagatgcttttcattatacacacaaaaatccctgagggacattttgaggcatgaatataaaacatttttatttcagtaacttttccccctgtgtaagttactatggtttgtggtacaacttcattctatagaatattaagtggaagtgggtgaattctactttttatgttggagtggaccaatgtctatcaagagtgacaaataaagttaatgatgattccaaa

SEQ ID NO: 109953 - DNA, 609 bp, Homo sapiens
  Payload ID: 1583
  Gene Symbol: ATP6AP2
  Gene Name: ATPase, H+ transporting, lysosomal accessory protein 2
  ENST ID: ENST00000436783
  CDS Start-End: 1-609
gagtccgagcgcgtcacctcctcacgctgcggctgtcgcccgtgtcccgccggcccgttccgtgtcgccccgcagtgctgcggccgccgcggcaccatggctgtgtttgtcgtgctcctggcgttggtggcgggtgttttggggaacgagtttagtatattaaaatcaccagggtctgttgttttccgaaatggaaattggcctataccaggagagcggatcccagacgtggctgcattgtccatgggcttctctgtgaaagaagacctttcttggccaggactcgcagtgggtaacctgtttcatcgtcctcgggctaccgtcatggtgatggtgaagggagtgaacaaactggctctacccccaggcagtgtcatttcgtaccctttggagaatagagtgtatatggtagggaaggcaaactcagtgtttgaagacctttcagtcaccttgcgccagctccgtaatcgcctgtttcaagaaaactctgttctcagttcactccccctcaattctctgagtaggaacaatgaagttgacctgctctttctttctgaactgcaagtgctacatgatatttcaagcttgctgtctcgtcataagcatcta

SEQ ID NO: 109954 - DNA, 728 bp, Homo sapiens
  Payload ID: 1583
  Gene Symbol: ATP6AP2
  Gene Name: ATPase, H+ transporting, lysosomal accessory protein 2
  ENST ID: ENST00000423649
  CDS Start-End: 1-728
gtgtcccgccggcccgttccgtgtcgccccgcagtgctgcggccgccgcggcaccatggctgtgtttgtcgtgctcctggcgttggtggcgggtgttttggggaacgagtttagtatattaaaatcaccagggtctgttgttttccgaaatggaaattggcctataccaggagagcggatcccagacgtggctgcattgtccatgggcttctctgtgaaagaagacctttcttggccaggactcgcagtgggtaacctgtttcatcgtcctcgggctaccgtcatggtgatggtgaagggagtgaacaaactggctctacccccaggcagtgtcatttcgtaccctttggagaatgttgacctgctctttctttctgaactgcaagtgctacatgatatttcaagcttgctgtctcgtcataagcatctagccaaggatcattctcctgatttatattcactggagctggcaggtttggatgaaattgggaagcgttatggggaagactctgaacaattcagagatgcttctaagatccttgttgacgctctgcaaaagtttgcagatgacatgtacagtctttatggtgggaatgcagtggtagagttagtcactgtcaagtcatttgacacctccctcattaggaagacaaggactatccttgaggcaaaacaagcgaagaacccagcaagtccctataaccttgcatataagtataattttgaat

SEQ ID NO: 109955 - DNA, 777 bp, Homo sapiens
  Payload ID: 1583
  Gene Symbol: ATP6AP2
  Gene Name: ATPase, H+ transporting, lysosomal accessory protein 2
  ENST ID: ENST00000447485
  CDS Start-End: 1-777
gtgtcccgccggcccgttccgtgtcgccccgcagtgctgcggccgccgcggcaccatggctgtgtttgtcgtgctcctggcgttggtggcgggacctttcttggccaggactcgcagtgggtaacctgtttcatcgtcctcgggctaccgtcatggtgatggtgaagggagtgaacaaactggctctacccccaggcagtgtcatttcgtaccctttggagaatgcagttccttttagtcttgacagtgttgcaaattccattcactccttattttctgaggaaactcctgttgttttgcagttggctcccagtgaggaaagagtgtatatggtagggaaggcaaactcagtgtttgaagacctttcagtcaccttgcgccagctccgtaatcgcctgtttcaagaaaactctgttctcagttcactccccctcaattctctgagtaggaacaatgaagttgacctgctctttctttctgaactgcaagtgctacatgatatttcaagcttgctgtctcgtcataagcatctagccaaggatcattctcctgatttatattcactggagctggcaggtttggatgaaattgggaagcgttatggggaagactctgaacaattcagagatgcttctaagatccttgttgacgctctgcaaaagtttgcagatgacatgtacagtctttatggtgggaatgcagtggtagagttagtcactgtcaagtcatttgacacctccctcattaggaagacaaggactatccttgaggcaaaac

SEQ ID NO: 109956 - DNA, 4110 bp, Homo sapiens
  Payload ID: 1584
  Gene Symbol: ATP6V0A1
  Gene Name: ATPase, H+ transporting, lysosomal V0 subunit a1
  Uniprot ID: Q93050
  ENST ID: ENST00000264649
  CDS Start-End: 132-2648
gtcgaagcgctgctcctggagccgcggagggtgcgggtttggctgcggtggtttctgtggcggttgctgtggcggagtttggaggttggagagaaatccaggtactcactagactggtaccttctgccaccatgggggagcttttccggagtgaagaaatgacactggcccagctttttctacagtcagaggctgcttattgttgtgtcagtgaattaggagaacttggaaaggttcagtttcgtgacttaaatccagatgtgaatgttttccaacggaaatttgtgaatgaagttagaagatgtgaagaaatggatcgaaagcttcgatttgttgagaaagagataagaaaagctaacattccgattatggacaccggtgaaaacccagaggttcccttcccccgggacatgattgacttagaggccaattttgagaagattgaaaatgaactgaaggaaatcaacacaaaccaggaagctctgaagagaaacttcctggaactgaccgaattaaaatttatacttcgcaaaactcagcaattttttgatgaggctgaattgcatcatcagcagatggcggatccagacttgttggaagagtcctcatccctcttggagccaagtgagatgggaagaggcactcctttaagacttggcttcgtggctggtgtcattaaccgggagcgcatccctacttttgagcgcatgctttggcgggtatgccggggaaatgtgttcctgcgacaggctgaaatcgagaaccccctggaggatcctgtgactggcgactacgtgcacaagtctgtgtttatcattttcttccaaggcgatcagctgaaaaacagagtcaagaaaatctgtgaagggttccgagcctcactctatccctgtcctgagacaccacaggagaggaaggaaatggcttctggagtgaataccaggattgatgatctccaaatggttctgaatcaaacggaggatcaccgccagagggttctgcaggcagctgctaagaacatccgtgtctggttcatcaaagtgcggaagatgaaggccatctatcacaccctgaacctgtgcaacatagatgtgactcagaaatgcttgattgcagaggtctggtgccctgtcaccgaccttgactccatccagtttgcactcagaaggggcacggaacacagtggttccactgtaccttccattttgaacaggatgcagacaaaccagactcccccaacctataacaaaaccaacaagtttacctatggctttcagaacatagtagatgcttatggaattggaacttaccgagagataaatccagctccgtatactattatcacgttcccttttctatttgctgtgatgtttggagacttcggtcatggcattttaatgaccctttttgctgtgtggatggtactgagggagagccggatcctttcccagaagaatgagaatgagatgtttagcactgtgttcagtggtcgatacattattttattgatgggtgtgttctccatgtacactggcctcatctacaatgattgcttttccaagtctcttaatatctttgggtcatcctggagtgtacggccgatgtttacttataattggactgaagagacgcttcgggggaaccctgttctacagctgaacccagccctccctggagtgtttggtggaccatacccttttggcattgatccaatttggaacattgctaccaataaactgacgttcttgaactcctttaagatgaagatgtctgttatccttggtatcatccatatgctgtttggagtcagcctgagtctgttcaaccatatctatttcaagaagcccctgaatatctactttggatttattcctgaaataatcttcatgacctctttgtttggctatttggttatccttattttttacaagtggacggcctatgatgctcatacctctgagaatgcaccaagccttctgatccatttcataaacatgttcctcttttcctacccagagtctggttattcaatgttgtattctggacagaaaggaattcagtgtttcctggtagtggttgcactactgtgtgtaccttggatgctgctgtttaaaccattggtccttcgccgtcagtatttgaggagaaagcatttgggaactctcaactttggtgggatcagggtgggcaacggaccgacagaggaggatgctgagattattcagcatgaccagctctccacccactcagaggacgcagacgagtttgactttggggacaccatggtccaccaggccatccacaccatcgagtactgcctgggctgcatctccaacactgcctcctacttgcggctctgggccctcagcctcgctcatgcgcagctgtctgaggtgctttggaccatggtgatccacatcggcctgagcgtgaagagcttggcgggaggtttggtgctgttcttcttcttcactgcctttgccaccctgaccgtggccatcctcctgatcatggagggcctctcggcctttctccacgcactgcgcttacactgggttgagttccagaataaattctacagcgggaccggtttcaagttcttacccttctccttcgagcatattcgggaagggaagtttgaagagtgagtccctgtgagggccgtgtgccccatgctaccctccccgcctccctccacagtgatcagctgtgcctctctgcctgttggttgtgatctgtgggcaccagctcattcgtgtcaccctgtctgtgagtcatttagatagaatagtcctccttgggtctcccaccacccctagctttgtgtgtagtgtagtgattttctggctgtcactcatactcactgggcaccagccttgccctcttagcctccatccatccagacagcccttcccacctcctggtggtgagccagtctgcattcccacgccatcccaaagccctttcatcttccccgtgcattgtagatggaaggagcacccatgccattcacatctagactttgagttccctgcatctgccaccgtagtttctagcaggagtagtggggggagtaatacagattcttccctagaaggggacactggtaacatgtcccactcttggattagcaggggtgggtccaggaagatgatatttgcgtcttttgcccacccccctggcattcagctggacccaactaggccatcatgagtggcttctccctgtcatccccaggggtcataggatatctacaccgcctttctgaccccaccctgcactcccatcctttcctctctccccgttcatgccctgcactacatagcacagccgggatgcttggaacagaggccttggctgctccgcagtgcacagggcttccctctctcggggttggcttcttcccaggccttgcatgggccctgcccacaagcacaccctcaggccgagggtgcagactgatgctcttccctgatggagaccctgagatcttccccacccccaatcatgatgtcttcagtgtgggactggggtcctcttggttctgcctgcagcctgcctggctccgcccctagtgccccctcctcaccacactggccccaggtctcaggaggggtgtcctgggcagggaaggtcagtgtcactgatggtttgctgtttggaagccattggcagggctgccgtgcatgtggctgtgagggctgcacagtcctgccaaggggcttcctccttgtcaccccgaaccttgtaatcgtgtgctggcgtggcagccctggctaagttaatccccaccgctttcagtggtagaaagaattccctgagtgggccaggctggtgccctcctcctaccctggcttttctgagtgagctgcctggagccctcatcccctctcccaggctgggctggccctgggcggggccactgtgtgctggcccactgtgacctgacccgaccttgtgcagcccccctgccctggtgtcctgggttttcgtgatgatctttgctctgtttccagtggggtttgaagcagagttcagggaaccctgcccaaggtcctcctgttcagacattcctatgttgaataaagtatgtttgacttccccggagaa

SEQ ID NO: 109957 - DNA, 4128 bp, Homo sapiens
  Payload ID: 1584
  Gene Symbol: ATP6V0A1
  Gene Name: ATPase, H+ transporting, lysosomal V0 subunit a1
  Uniprot ID: Q93050
  ENST ID: ENST00000343619
  CDS Start-End: 124-2637
gctgctcctggagccgcggagggtgcgggtttggctgcggtggtttctgtggcggttgctgtggcggagtttggaggttggagagaaatccaggtactcactagactggtaccttctgccaccatgggggagcttttccggagtgaagaaatgacactggcccagctttttctacagtcagaggctgcttattgttgtgtcagtgaattaggagaacttggaaaggttcagtttcgtgacttaaatccagatgtgaatgttttccaacggaaatttgtgaatgaagttagaagatgtgaagaaatggatcgaaagcttcgatttgttgagaaagagataagaaaagctaacattccgattatggacaccggtgaaaacccagaggttcccttcccccgggacatgattgacttagaggccaattttgagaagattgaaaatgaactgaaggaaatcaacacaaaccaggaagctctgaagagaaacttcctggaactgaccgaattaaaatttatacttcgcaaaactcagcaattttttgatgagatggcggatccagacttgttggaagagtcctcatccctcttggagccaagtgagatgggaagaggcactcctttaagacttggcttcgtggctggtgtcattaaccgggagcgcatccctacttttgagcgcatgctttggcgggtatgccggggaaatgtgttcctgcgacaggctgaaatcgagaaccccctggaggatcctgtgactggcgactacgtgcacaagtctgtgtttatcattttcttccaaggcgatcagctgaaaaacagagtcaagaaaatctgtgaagggttccgagcctcactctatccctgtcctgagacaccacaggagaggaaggaaatggcttctggagtgaataccaggattgatgatctccaaatggttctgaatcaaacggaggatcaccgccagagggttctgcaggcagctgctaagaacatccgtgtctggttcatcaaagtgcggaagatgaaggccatctatcacaccctgaacctgtgcaacatagatgtgactcagaaatgcttgattgcagaggtctggtgccctgtcaccgaccttgactccatccagtttgcactcagaaggggcacggaacacagtggttccactgtaccttccattttgaacaggatgcagacaaaccagactcccccaacctataacaaaaccaacaagtttacctatggctttcagaacatagtagatgcttatggaattggaacttaccgagagataaatccagctccgtatactattatcacgttcccttttctatttgctgtgatgtttggagacttcggtcatggcattttaatgaccctttttgctgtgtggatggtactgagggagagccggatcctttcccagaagaatgagaatgagatgtttagcactgtgttcagtggtcgatacattattttattgatgggtgtgttctccatgtacactggcctcatctacaatgattgcttttccaagtctcttaatatctttgggtcatcctggagtgtacggccgatgtttacttataattggactgaagagacgcttcgggggaaccctgttctacagctgaacccagccctccctggagtgtttggtggaccatacccttttggcattgatccaatttggaacattgctaccaataaactgacgttcttgaactcctttaagatgaagatgtctgttatccttggtatcatccatatgctgtttggagtcagcctgagtctgttcaaccatatctatttcaagaagcccctgaatatctactttggatttattcctgaaataatcttcatgacctctttgtttggctatttggttatccttattttttacaagtggacggcctatgatgctcatacctctgagaatgcaccaagccttctgatccatttcataaacatgttcctcttttcctacccagagtctggttattcaatgttgtattctggacagaaaggaattcagtgtttcctggtagtggttgcactactgtgtgtaccttggatgctgctgtttaaaccattggtccttcgccgtcagtatttgaggagaaagcatttgggaactctcaactttggtgggatcagggtgggcaacggaccgacagaggaggatgctgagattattcagcatgaccagctctccacccactcagaggacgcagacgagccttccgaggacgaagtgtttgactttggggacaccatggtccaccaggccatccacaccatcgagtactgcctgggctgcatctccaacactgcctcctacttgcggctctgggccctcagcctcgctcatgcgcagctgtctgaggtgctttggaccatggtgatccacatcggcctgagcgtgaagagcttggcgggaggtttggtgctgttcttcttcttcactgcctttgccaccctgaccgtggccatcctcctgatcatggagggcctctcggcctttctccacgcactgcgcttacactgggttgagttccagaataaattctacagcgggaccggtttcaagttcttacccttctccttcgagcatattcgggaagggaagtttgaagagtgagtccctgtgagggccgtgtgccccatgctaccctccccgcctccctccacagtgatcagctgtgcctctctgcctgttggttgtgatctgtgggcaccagctcattcgtgtcaccctgtctgtgagtcatttagatagaatagtcctccttgggtctcccaccacccctagctttgtgtgtagtgtagtgattttctggctgtcactcatactcactgggcaccagccttgccctcttagcctccatccatccagacagcccttcccacctcctggtggtgagccagtctgcattcccacgccatcccaaagccctttcatcttccccgtgcattgtagatggaaggagcacccatgccattcacatctagactttgagttccctgcatctgccaccgtagtttctagcaggagtagtggggggagtaatacagattcttccctagaaggggacactggtaacatgtcccactcttggattagcaggggtgggtccaggaagatgatatttgcgtcttttgcccacccccctggcattcagctggacccaactaggccatcatgagtggcttctccctgtcatccccaggggtcataggatatctacaccgcctttctgaccccaccctgcactcccatcctttcctctctccccgttcatgccctgcactacatagcacagccgggatgcttggaacagaggccttggctgctccgcagtgcacagggcttccctctctcggggttggcttcttcccaggccttgcatgggccctgcccacaagcacaccctcaggccgagggtgcagactgatgctcttccctgatggagaccctgagatcttccccacccccaatcatgatgtcttcagtgtgggactggggtcctcttggttctgcctgcagcctgcctggctccgcccctagtgccccctcctcaccacactggccccaggtctcaggaggggtgtcctgggcagggaaggtcagtgtcactgatggtttgctgtttggaagccattggcagggctgccgtgcatgtggctgtgagggctgcacagtcctgccaaggggcttcctccttgtcaccccgaaccttgtaatcgtgtgctggcgtggcagccctggctaagttaatccccaccgctttcagtggtagaaagaattccctgagtgggccaggctggtgccctcctcctaccctggcttttctgagtgagctgcctggagccctcatcccctctcccaggctgggctggccctgggcggggccactgtgtgctggcccactgtgacctgacccgaccttgtgcagcccccctgccctggtgtcctgggttttcgtgatgatctttgctctgtttccagtggggtttgaagcagagttcagggaaccctgcccaaggtcctcctgttcagacattcctatgttgaataaagtatgtttgacttccccggagaagctgcctgtcactgtgcccacagcccctg

SEQ ID NO: 109958 - DNA, 3028 bp, Homo sapiens
  Payload ID: 1584
  Gene Symbol: ATP6V0A1
  Gene Name: ATPase, H+ transporting, lysosomal V0 subunit a1
  Uniprot ID: Q93050
  ENST ID: ENST00000393829
  CDS Start-End: 168-2663
ggcggcgcaggggcggggctttacggacgcaagcacgtcgaagcgctgctcctggagccgcggagggtgcgggtttggctgcggtggtttctgtggcggttgctgtggcggagtttggaggttggagagaaatccaggtactcactagactggtaccttctgccaccatgggggagcttttccggagtgaagaaatgacactggcccagctttttctacagtcagaggctgcttattgttgtgtcagtgaattaggagaacttggaaaggttcagtttcgtgacttaaatccagatgtgaatgttttccaacggaaatttgtgaatgaagttagaagatgtgaagaaatggatcgaaagcttcgatttgttgagaaagagataagaaaagctaacattccgattatggacaccggtgaaaacccagaggttcccttcccccgggacatgattgacttagaggccaattttgagaagattgaaaatgaactgaaggaaatcaacacaaaccaggaagctctgaagagaaacttcctggaactgaccgaattaaaatttatacttcgcaaaactcagcaattttttgatgagatggcggatccagacttgttggaagagtcctcatccctcttggagccaagtgagatgggaagaggcactcctttaagacttggcttcgtggctggtgtcattaaccgggagcgcatccctacttttgagcgcatgctttggcgggtatgccggggaaatgtgttcctgcgacaggctgaaatcgagaaccccctggaggatcctgtgactggcgactacgtgcacaagtctgtgtttatcattttcttccaaggcgatcagctgaaaaacagagtcaagaaaatctgtgaagggttccgagcctcactctatccctgtcctgagacaccacaggagaggaaggaaatggcttctggagtgaataccaggattgatgatctccaaatggttctgaatcaaacggaggatcaccgccagagggttctgcaggcagctgctaagaacatccgtgtctggttcatcaaagtgcggaagatgaaggccatctatcacaccctgaacctgtgcaacatagatgtgactcagaaatgcttgattgcagaggtctggtgccctgtcaccgaccttgactccatccagtttgcactcagaaggggcacggaacacagtggttccactgtaccttccattttgaacaggatgcagacaaaccagactcccccaacctataacaaaaccaacaagtttacctatggctttcagaacatagtagatgcttatggaattggaacttaccgagagataaatccagctccgtatactattatcacgttcccttttctatttgctgtgatgtttggagacttcggtcatggcattttaatgaccctttttgctgtgtggatggtactgagggagagccggatcctttcccagaagaatgagaatgagatgtttagcactgtgttcagtggtcgatacattattttattgatgggtgtgttctccatgtacactggcctcatctacaatgattgcttttccaagtctcttaatatctttgggtcatcctggagtgtacggccgatgtttacttataattggactgaagagacgcttcgggggaaccctgttctacagctgaacccagccctccctggagtgtttggtggaccatacccttttggcattgatccaatttggaacattgctaccaataaactgacgttcttgaactcctttaagatgaagatgtctgttatccttggtatcatccatatgctgtttggagtcagcctgagtctgttcaaccatatctatttcaagaagcccctgaatatctactttggatttattcctgaaataatcttcatgacctctttgtttggctatttggttatccttattttttacaagtggacggcctatgatgctcatacctctgagaatgcaccaagccttctgatccatttcataaacatgttcctcttttcctacccagagtctggttattcaatgttgtattctggacagaaaggaattcagtgtttcctggtagtggttgcactactgtgtgtaccttggatgctgctgtttaaaccattggtccttcgccgtcagtatttgaggagaaagcatttgggaactctcaactttggtgggatcagggtgggcaacggaccgacagaggaggatgctgagattattcagcatgaccagctctccacccactcagaggacgcagacgagtttgactttggggacaccatggtccaccaggccatccacaccatcgagtactgcctgggctgcatctccaacactgcctcctacttgcggctctgggccctcagcctcgctcatgcgcagctgtctgaggtgctttggaccatggtgatccacatcggcctgagcgtgaagagcttggcgggaggtttggtgctgttcttcttcttcactgcctttgccaccctgaccgtggccatcctcctgatcatggagggcctctcggcctttctccacgcactgcgcttacactgggttgagttccagaataaattctacagcgggaccggtttcaagttcttacccttctccttcgagcatattcgggaagggaagtttgaagagtgagtccctgtgagggccgtgtgccccatgctaccctccccgcctccctccacagtgatcagctgtgcctctctgcctgttggttgtgatctgtgggcaccagctcattcgtgtcaccctgtctgtgagtcatttagatagaatagtcctccttgggtctcccaccacccctagctttgtgtgtagtgtagtgattttctggctgtcactcatactcactgggcaccagccttgccctcttagcctccatccatccagacagcccttcccacctcctggtggtgagccagtctgcattcccacgccatcccaaagccctttcatcttccccgtgcattgtagatggaaggagcacccatgccattcac

SEQ ID NO: 109959 - DNA, 2774 bp, Homo sapiens
  Payload ID: 1584
  Gene Symbol: ATP6V0A1
  Gene Name: ATPase, H+ transporting, lysosomal V0 subunit a1
  ENST ID: ENST00000537728
  CDS Start-End: 134-2500
acgtcgaagcgctgctcctggagccgcggagggtgcgggtttggctgcggtggtttctgtggcggttgctgtggcggagtttggaggttggagagaaatccaggtactcactagactggtaccttctgccaccatgggggagcttttccggagtgaagaaatgacactggcccagctttttctacagtcagaggctgcttattgttgtgtcagtgaattaggagaacttggaaaggttcagtttcgtgacttaaatccagatgtgaatgttttccaacggaaatttgtgaatgaagttagaagatgtgaagaaatggatcgaaagcttcgatttgttgagaaagagataagaaaagctaacattccgattatggacaccggtgaaaacccagaggttcccttcccccgggacatgattgacttagagatggcggatccagacttgttggaagagtcctcatccctcttggagccaagtgagatgggaagaggcactcctttaagacttggcttcgtggctggtgtcattaaccgggagcgcatccctacttttgagcgcatgctttggcgggtatgccggggaaatgtgttcctgcgacaggctgaaatcgagaaccccctggaggatcctgtgactggcgactacgtgcacaagtctgtgtttatcattttcttccaaggcgatcagctgaaaaacagagtcaagaaaatctgtgaagggttccgagcctcactctatccctgtcctgagacaccacaggagaggaaggaaatggcttctggagtgaataccaggattgatgatctccaaatggttctgaatcaaacggaggatcaccgccagagggttctgcaggcagctgctaagaacatccgtgtctggttcatcaaagtgcggaagatgaaggccatctatcacaccctgaacctgtgcaacatagatgtgactcagaaatgcttgattgcagaggtctggtgccctgtcaccgaccttgactccatccagtttgcactcagaaggggcacggaacacagtggttccactgtaccttccattttgaacaggatgcagacaaaccagactcccccaacctataacaaaaccaacaagtttacctatggctttcagaacatagtagatgcttatggaattggaacttaccgagagataaatccagctccgtatactattatcacgttcccttttctatttgctgtgatgtttggagacttcggtcatggcattttaatgaccctttttgctgtgtggatggtactgagggagagccggatcctttcccagaagaatgagaatgagatgtttagcactgtgttcagtggtcgatacattattttattgatgggtgtgttctccatgtacactggcctcatctacaatgattgcttttccaagtctcttaatatctttgggtcatcctggagtgtacggccgatgtttacttataattggactgaagagacgcttcgggggaaccctgttctacagctgaacccagccctccctggagtgtttggtggaccatacccttttggcattgatccaatttggaacattgctaccaataaactgacgttcttgaactcctttaagatgaagatgtctgttatccttggtatcatccatatgctgtttggagtcagcctgagtctgttcaaccatatctatttcaagaagcccctgaatatctactttggatttattcctgaaataatcttcatgacctctttgtttggctatttggttatccttattttttacaagtggacggcctatgatgctcatacctctgagaatgcaccaagccttctgatccatttcataaacatgttcctcttttcctacccagagtctggttattcaatgttgtattctggacagaaaggaattcagtgtttcctggtagtggttgcactactgtgtgtaccttggatgctgctgtttaaaccattggtccttcgccgtcagtatttgaggagaaagcatttgggaactctcaactttggtgggatcagggtgggcaacggaccgacagaggaggatgctgagattattcagcatgaccagctctccacccactcagaggacgcagacgagtttgactttggggacaccatggtccaccaggccatccacaccatcgagtactgcctgggctgcatctccaacactgcctcctacttgcggctctgggccctcagcctcgctcatgcgcagctgtctgaggtgctttggaccatggtgatccacatcggcctgagcgtgaagagcttggcgggaggtttggtgctgttcttcttcttcactgcctttgccaccctgaccgtggccatcctcctgatcatggagggcctctcggcctttctccacgcactgcgcttacactgggttgagttccagaataaattctacagcgggaccggtttcaagttcttacccttctccttcgagcatattcgggaagggaagtttgaagagtgagtccctgtgagggccgtgtgccccatgctaccctccccgcctccctccacagtgatcagctgtgcctctctgcctgttggttgtgatctgtgggcaccagctcattcgtgtcaccctgtctgtgagtcatttagatagaatagtcctccttgggtctcccaccacccctagctttgtgtgtagtgtagtgattttctggctgtcactcatactcactgggcaccagccttgccctcttagcctccatccatccagacagcccttcccacctcct

SEQ ID NO: 109960 - DNA, 3047 bp, Homo sapiens
  Payload ID: 1584
  Gene Symbol: ATP6V0A1
  Gene Name: ATPase, H+ transporting, lysosomal V0 subunit a1
  ENST ID: ENST00000544137
  CDS Start-End: 138-1589
cggagggtgcgggtttggctgcggtggtttctgtggcggttgctgtggcggagtttggaggttggagagaaatccagtttgcactcagaaggggcacggaacacagtggttccactgtaccttccattttgaacaggatgcagacaaaccagactcccccaacctataacaaaaccaacaagtttacctatggctttcagaacatagtagatgcttatggaattggaacttaccgagagataaatccagctccgtatactattatcacgttcccttttctatttgctgtgatgtttggagacttcggtcatggcattttaatgaccctttttgctgtgtggatggtactgagggagagccggatcctttcccagaagaatgagaatgagatgtttagcactgtgttcagtggtcgatacattattttattgatgggtgtgttctccatgtacactggcctcatctacaatgattgcttttccaagtctcttaatatctttgggtcatcctggagtgtacggccgatgtttacttataattggactgaagagacgcttcgggggaaccctgttctacagctgaacccagccctccctggagtgtttggtggaccatacccttttggcattgatccaatttggaacattgctaccaataaactgacgttcttgaactcctttaagatgaagatgtctgttatccttggtatcatccatatgctgtttggagtcagcctgagtctgttcaaccatatctatttcaagaagcccctgaatatctactttggatttattcctgaaataatcttcatgacctctttgtttggctatttggttatccttattttttacaagtggacggcctatgatgctcatacctctgagaatgcaccaagccttctgatccatttcataaacatgttcctcttttcctacccagagtctggttattcaatgttgtattctggacagaaaggaattcagtgtttcctggtagtggttgcactactgtgtgtaccttggatgctgctgtttaaaccattggtccttcgccgtcagtatttgaggagaaagcatttgggaactctcaactttggtgggatcagggtgggcaacggaccgacagaggaggatgctgagattattcagcatgaccagctctccacccactcagaggacgcagacgagccttccgaggacgaagtgtttgactttggggacaccatggtccaccaggccatccacaccatcgagtactgcctgggctgcatctccaacactgcctcctacttgcggctctgggccctcagcctcgctcatgcgcagctgtctgaggtgctttggaccatggtgatccacatcggcctgagcgtgaagagcttggcgggaggtttggtgctgttcttcttcttcactgcctttgccaccctgaccgtggccatcctcctgatcatggagggcctctcggcctttctccacgcactgcgcttacactgggttgagttccagaataaattctacagcgggaccggtttcaagttcttacccttctccttcgagcatattcgggaagggaagtttgaagagtgagtccctgtgagggccgtgtgccccatgctaccctccccgcctccctccacagtgatcagctgtgcctctctgcctgttggttgtgatctgtgggcaccagctcattcgtgtcaccctgtctgtgagtcatttagatagaatagtcctccttgggtctcccaccacccctagctttgtgtgtagtgtagtgattttctggctgtcactcatactcactgggcaccagccttgccctcttagcctccatccatccagacagcccttcccacctcctggtggtgagccagtctgcattcccacgccatcccaaagccctttcatcttccccgtgcattgtagatggaaggagcacccatgccattcacatctagactttgagttccctgcatctgccaccgtagtttctagcaggagtagtggggggagtaatacagattcttccctagaaggggacactggtaacatgtcccactcttggattagcaggggtgggtccaggaagatgatatttgcgtcttttgcccacccccctggcattcagctggacccaactaggccatcatgagtggcttctccctgtcatccccaggggtcataggatatctacaccgcctttctgaccccaccctgcactcccatcctttcctctctccccgttcatgccctgcactacatagcacagccgggatgcttggaacagaggccttggctgctccgcagtgcacagggcttccctctctcggggttggcttcttcccaggccttgcatgggccctgcccacaagcacaccctcaggccgagggtgcagactgatgctcttccctgatggagaccctgagatcttccccacccccaatcatgatgtcttcagtgtgggactggggtcctcttggttctgcctgcagcctgcctggctccgcccctagtgccccctcctcaccacactggccccaggtctcaggaggggtgtcctgggcagggaaggtcagtgtcactgatggtttgctgtttggaagccattggcagggctgccgtgcatgtggctgtgagggctgcacagtcctgccaaggggcttcctccttgtcaccccgaaccttgtaatcgtgtgctggcgtggcagccctggctaagttaatccccaccgctttcagtggtagaaagaattccctgagtgggccaggctggtgccctcctcctaccctggcttttctgagtgagctgcctggagccctcatcccctctcccaggctgggctggccctgggcggggccactgtgtgctggcccactgtgacctgacccgaccttgtgcagcccccctgccctggtgtcctgggttttcgtgatgatctttgctctgtttccagtggggtttgaagcagagttcagggaaccctgcccaaggtcctcctgttcagacattcctatgttgaataaagtatgtttgacttccccgg

SEQ ID NO: 109961 - DNA, 580 bp, Homo sapiens
  Payload ID: 1584
  Gene Symbol: ATP6V0A1
  Gene Name: ATPase, H+ transporting, lysosomal V0 subunit a1
  ENST ID: ENST00000589213
  CDS Start-End: 301-580
gtcattatcagtgtgttcctgtcatgcttgatttgaaattgagcttaatatgcaaactggttgctttttccagatgacggttatttgtttgaattcctaagtggggaaatattgttttctgaggaatctggaagattaaaccctttagtgtagccatagctttaggatagtgccagaactttgggcttttagaaatgcgcattgtcagtagaagggagaaggatagttacaaggcagacatctttatgagagggttggagagaaatccaggtactcactagactggtaccttctgccaccatgggggagcttttccggagtgaagaaatgacactggcccagctttttctacagtcagaggctgcttattgttgtgtcagtgaattaggagaacttggaaaggttcagtttcgtgacttaaatccagatgtgaatgttttccaacggaaatttgtgaatgaagttagaagatgtgaagaaatggatcgaaagcttcgatttgttgagaaagagataagaaaagctaacattccgattatggacaccggtgaaaacccagaggttcccttcccccgggaca

SEQ ID NO: 109962 - DNA, 554 bp, Homo sapiens
  Payload ID: 1584
  Gene Symbol: ATP6V0A1
  Gene Name: ATPase, H+ transporting, lysosomal V0 subunit a1
  ENST ID: ENST00000587824
  CDS Start-End: 163-554
acgtcttcgagataaaatgggggttcgccccctccttgggcacccctcctctgccctgaggaaccggaggctcactgccctttggaagccccgcatctcttccctgctttaaggggttggagagaaatccaggtactcactagactggtaccttctgccaccatgggggagcttttccggagtgaagaaatgacactggcccagctttttctacagtcagaggctgcttattgttgtgtcagtgaattaggagaacttggaaaggttcagtttcgtgacttaaatccagatgtgaatgttttccaacggaaatttgtgaatgaagttagaagatgtgaagaaatggatcgaaagcttcgatttgttgagaaagagataagaaaagctaacattccgattatggacaccggtgaaaacccagaggttcccttcccccgggacatgattgacttagaggccaattttgagaagattgaaaatgaactgaaggaaatcaacacaaaccaggaagctctgaagagaaacttcctggaactgaccgaattaaaatttat

SEQ ID NO: 109963 - DNA, 585 bp, Homo sapiens
  Payload ID: 1584
  Gene Symbol: ATP6V0A1
  Gene Name: ATPase, H+ transporting, lysosomal V0 subunit a1
  ENST ID: ENST00000592324
  CDS Start-End: 1-585
gctaacattccgattatggacaccggtgaaaacccagaggttcccttcccccgggacatgattgacttagaggccaattttgagaagattgaaaatgaactgaaggaaatcaacacaaaccaggaagctctgaagagaaacttcctggaactgaccgaattaaaatttatacttcgcaaaactcagcaattttttgatgagatggcggatccagacttgttggaagagtcctcatccctcttggagccaagtgagatgggaagaggcactcctttaagacttggcttcgtggctggtgtcattaaccgggagcgcatccctacttttgagcgcatgctttggcgggtatgccggggaaatgtgttcctgcgacaggctgaaatcgagaaccccctggaggatcctgtgactgtggagtctcactctgttgtccaggctagagtgcagtggcgcgatctcggctcaccacaacctccgcttcctgggttcaagcgattctcctgcctcagcctcccgagtagctggggattacagggcgactacgtgcacaagtctgtgtttatcattttcttccaaggcgatcag

SEQ ID NO: 109964 - DNA, 573 bp, Homo sapiens
  Payload ID: 1584
  Gene Symbol: ATP6V0A1
  Gene Name: ATPase, H+ transporting, lysosomal V0 subunit a1
  ENST ID: ENST00000588138
  CDS Start-End: 1-573
ccttggatgctgctgtttaaaccattggtccttcgccgtcagtatttgaggagaaagcatttggaagggcaacctgtggaggccccagtcagcccaaacccgagccaacagggactagaggcagcagcggctgcaacaggaactctcaactttggtgggatcagggtgggcaacggaccgacagaggaggatgctgagattattcagcatgaccagctctccacccactcagaggacgcagacgagccttccgaggacgaagtgtttgactttggggacaccatggtccaccaggccatccacaccatcgagtactgcctgggctgcatctccaacactgcctcctacttgcggctctgggccctcagcctcgctcatgcgcagctgtctgaggtgctttggaccatggtgatccacatcggcctgagcgtgaagagcttggcgggaggtttggtgctgttcttcttcttcactgcctttgccaccctgaccgtggccatcctcctgatcatggagggcctctcggcctttctccacgcactgcgcttacactgggttgagttccagaataaa

SEQ ID NO: 109965 - DNA, 2679 bp, Homo sapiens
  Payload ID: 1584
  Gene Symbol: ATP6V0A1
  Gene Name: ATPase, H+ transporting, lysosomal V0 subunit a1
  ENST ID: ENST00000585525
  CDS Start-End: 124-2508
gctgctcctggagccgcggagggtgcgggtttggctgcggtggtttctgtggcggttgctgtggcggagtttggaggttggagagaaatccaggtactcactagactggtaccttctgccaccatgggggagcttttccggagtgaagaaatgacactggcccagctttttctacagtcagaggctgcttattgttgtgtcagtgaattaggagaacttggaaaggttcagtttcgtgacttaaatccagatgtgaatgttttccaacggaaatttgtgaatgaagttagaagatgtgaagaaatggatcgaaagcttcgatttgttgagaaagagataagaaaagctaacattccgattatggacaccggtgaaaacccagaggttcccttcccccgggacatgattgacttagagatggcggatccagacttgttggaagagtcctcatccctcttggagccaagtgagatgggaagaggcactcctttaagacttggcttcgtggctggtgtcattaaccgggagcgcatccctacttttgagcgcatgctttggcgggtatgccggggaaatgtgttcctgcgacaggctgaaatcgagaaccccctggaggatcctgtgactggcgactacgtgcacaagtctgtgtttatcattttcttccaaggcgatcagctgaaaaacagagtcaagaaaatctgtgaagggttccgagcctcactctatccctgtcctgagacaccacaggagaggaaggaaatggcttctggagtgaataccaggattgatgatctccaaatggttctgaatcaaacggaggatcaccgccagagggttctgcaggcagctgctaagaacatccgtgtctggttcatcaaagtgcggaagatgaaggccatctatcacaccctgaacctgtgcaacatagatgtgactcagaaatgcttgattgcagaggtctggtgccctgtcaccgaccttgactccatccagtttgcactcagaaggggcacggaacacagtggttccactgtaccttccattttgaacaggatgcagacaaaccagactcccccaacctataacaaaaccaacaagtttacctatggctttcagaacatagtagatgcttatggaattggaacttaccgagagataaatccagctccgtatactattatcacgttcccttttctatttgctgtgatgtttggagacttcggtcatggcattttaatgaccctttttgctgtgtggatggtactgagggagagccggatcctttcccagaagaatgagaatgagatgtttagcactgtgttcagtggtcgatacattattttattgatgggtgtgttctccatgtacactggcctcatctacaatgattgcttttccaagtctcttaatatctttgggtcatcctggagtgtacggccgatgtttacttataattggactgaagagacgcttcgggggaaccctgttctacagctgaacccagccctccctggagtgtttggtggaccatacccttttggcattgatccaatttggaacattgctaccaataaactgacgttcttgaactcctttaagatgaagatgtctgttatccttggtatcatccatatgctgtttggagtcagcctgagtctgttcaaccatatctatttcaagaagcccctgaatatctactttggatttattcctgaaataatcttcatgacctctttgtttggctatttggttatccttattttttacaagtggacggcctatgatgctcatacctctgagaatgcaccaagccttctgatccatttcataaacatgttcctcttttcctacccagagtctggttattcaatgttgtattctggacagaaaggaattcagtgtttcctggtagtggttgcactactgtgtgtaccttggatgctgctgtttaaaccattggtccttcgccgtcagtatttgaggagaaagcatttgggaactctcaactttggtgggatcagggtgggcaacggaccgacagaggaggatgctgagattattcagcatgaccagctctccacccactcagaggacgcagacgagccttccgaggacgaagtgtttgactttggggacaccatggtccaccaggccatccacaccatcgagtactgcctgggctgcatctccaacactgcctcctacttgcggctctgggccctcagcctcgctcatgcgcagctgtctgaggtgctttggaccatggtgatccacatcggcctgagcgtgaagagcttggcgggaggtttggtgctgttcttcttcttcactgcctttgccaccctgaccgtggccatcctcctgatcatggagggcctctcggcctttctccacgcactgcgcttacactgggttgagttccagaataaattctacagcgggaccggtttcaagttcttacccttctccttcgagcatattcgggaagggaagtttgaagagtgagtccctgtgagggccgtgtgccccatgctaccctccccgcctccctccacagtgatcagctgtgcctctctgcctgttggttgtgatctgtgggcaccagctcattcgtgtcaccctgtctgtgagtcatttagatagaatagtcctccttgggtctcccaccacccctag

SEQ ID NO: 109966 - DNA, 664 bp, Homo sapiens
  Payload ID: 1584
  Gene Symbol: ATP6V0A1
  Gene Name: ATPase, H+ transporting, lysosomal V0 subunit a1
  ENST ID: ENST00000589727
  CDS Start-End: 71-664
ggttgctgtggcggagtttggaggttggagagaaatccaggtactcactagactggtaccttctgccaccatgggggagcttttccggagtgaagaaatgacactggcccagctttttctacagtcagaggctgcttattgttgtgtcagtgaattaggagaacttggaaaggttcagtttcgtgacgccaattttgagaagattgaaaatgaactgaaggaaatcaacacaaaccaggaagctctgaagagaaacttcctggaactgaccgaattaaaatttatacttcgcaaaactcagcaattttttgatgagatggcggatccagacttgttggaagagtcctcatccctcttggagccaagtgagatgggaagaggcactcctttaagacttggcttcgtggctggtgtcattaaccgggagcgcatccctacttttgagcgcatgctttggcgggtatgccggggaaatgtgttcctgcgacaggctgaaatcgagaaccccctggaggatcctgtgactggcgactacgtgcacaagtctgtgtttatcattttcttccaaggcgatcagctgaaaaacagagtcaagaaaatctgtgaagggttccgagcctcactctatccctgtcctgagacaccacaggagaggaaggaaatg

SEQ ID NO: 109967 - DNA, 589 bp, Homo sapiens
  Payload ID: 1584
  Gene Symbol: ATP6V0A1
  Gene Name: ATPase, H+ transporting, lysosomal V0 subunit a1
  ENST ID: ENST00000588901
  CDS Start-End: 134-340
acgtcgaagcgctgctcctggagccgcggagggtgcgggtttggctgcggtggtttctgtggcggttgctgtggcggagtttggaggttggagagaaatccaggtactcactagactggtaccttctgccaccatgggggagcttttccggagtgaagaaatgacactggcccagctttttctacagtcagaggctgcttattgttgtgtcagtgaattaggagaacttggaaaggttcagtttcgtgacttaaatccagatgtgaatgttttccaacggaaatttgtgaatgaagttagaagatgtgaagaaatggatcgaaagcttcgccaattttgagaagattgaaaatgaactgaaggaaatcaacacaaaccaggaagctctgaagagaaacttcctggaactgaccgaattaaaatttatacttcgcaaaactcagcaattttttgatgagatggcggatccagacttgttggaagagtcctcatccctcttggagccaagtgagatgggaagaggcactcctttaagacttggcttcgtggctggtgtcattaaccgggagcgcatccctacttttgagcg

SEQ ID NO: 109968 - DNA, 564 bp, Homo sapiens
  Payload ID: 1584
  Gene Symbol: ATP6V0A1
  Gene Name: ATPase, H+ transporting, lysosomal V0 subunit a1
  ENST ID: ENST00000587510
  CDS Start-End: 1-388
tttggttatccttattttttacaagtggacggcctatgatgctcatacctctgagaatgcaccaagccttctgatccatttcataaacatgttcctcttttcctacccagagtctggttattcaatgttgtattctggacagaaaggaattcagtgtttcctggtagtggttgcactactgtgtgtaccttggatgctgctgtttaaaccattggtccttcgccgtcagtatttgaggagaaagcatttgggaactctcaactttggtgggatcagggtgggcaacggaccgacagaggaggatgctgagattattcagcatgaccagctctccacccactcagaggacgcagacgaggcccttgctccagcccagtggaagcattagtacctcttcctagcgggaactcagtccagctacacaccagagccaggccagtggttgtctgggaaatcttcaaaggccgtgaccactcagcaaggtttgactttggggacaccatggtccaccaggccatccacaccatcgagtactgcctgggctgcatctccaacactgcctcc

SEQ ID NO: 109969 - DNA, 881 bp, Homo sapiens
  Payload ID: 1584
  Gene Symbol: ATP6V0A1
  Gene Name: ATPase, H+ transporting, lysosomal V0 subunit a1
  ENST ID: ENST00000586201
  CDS Start-End: 1-567
gcctatgatgctcatacctctgagaatgcaccaagccttctgatccatttcataaacatgttcctcttttcctacccagagtctggttattcaatgttgtattctggacagaaaggaattcagtgtttcctggtagtggttgcactactgtgtgtaccttggatgctgctgtttaaaccattggtccttcgccgtcagtatttgaggagaaagcatttgggaactctcaactttggtgggatcagggtgggcaacggaccgacagaggaggatgctgagattattcagcatgaccagctctccacccactcagaggacgcagacgagccttccgaggacgaagtgtttgactttggggacaccatggtccaccaggccatccacaccatcgagtactgcctgggctgcatctccaacactgcctcctacttgcggctctgggccctcagcctcgctcatgcgcggttgagttccagaataaattctacagcgggaccggtttcaagttcttacccttctccttcgagcatattcgggaagggaagtttgaagagtgagtccctgtgagggccgtgtgccccatgctaccctccccgcctccctccacagtgatcagctgtgcctctctgcctgttggttgtgatctgtgggcaccagctcattcgtgtcaccctgtctgtgagtcatttagatagaatagtcctccttgggtctcccaccacccctagctttgtgtgtagtgtagtgattttctggctgtcactcatactcactgggcaccagccttgccctcttagcctccatccatccagacagcccttcccacctcctggtggtgagccagtctgcattcccacgccatcccaaagccctttcatctt

SEQ ID NO: 109970 - DNA, 6542 bp, Homo sapiens
  Payload ID: 1585
  Gene Symbol: ATP6V0A2
  Gene Name: ATPase, H+ transporting, lysosomal V0 subunit a2
  Uniprot ID: Q9Y487
  ENST ID: ENST00000330342
  CDS Start-End: 249-2819
gggggcggaaccggaaccggcagtggcttgggggcgggacctcgcggactgctgtggcggcagctggagcggcggccgcggtggcagaaccgggggcggccgctgcagtctggagccccatagtgcggggccgcggccaggccacaggaagagctcgaggcccgggccgcaccggctgagtgtgcgggcccgcgcggctcggagccgccgccgcccatcgagcccctccgggcgcgggtcggcccgccatggggtccctgttccggagcgagaccatgtgcctggcgcagctcttcctgcagtcgggcacggcctacgagtgcctcagcgccctgggcgagaaaggcctggtccagttccgagacctcaaccagaacgtaagttctttccaaagaaaatttgttggtgaggtgaagaggtgtgaagagctagagcgaatattggtgtatttggtacaggaaattaatagagctgatattccccttcctgaaggagaggccagccctcctgcgccacccctgaaacaggttctagaaatgcaggagcagttgcagaagctcgaggttgaactgagagaagtcactaagaacaaggagaaactgaggaaaaacttgctggaactgatagagtacactcacatgctgagagtgacaaagacctttgtgaaacgcaatgttgagtttgaacccacttatgaagaattcccttccttagagagtgattctttgttggattacagctgtatgcagaggctgggagcaaaactgggatttgtgtctggcctaattaaccaaggaaaagtggaagcatttgaaaaaatgttgtggagagtctgcaaagggtacaccatcgtgtcctatgcagaactggatgaatcccttgaagaccctgaaacaggggaagtcataaaatggtatgtctttttaatatccttttggggagagcagattggccacaaggttaagaagatatgtgattgctaccactgccacgtgtacccctatccaaacacagccgaggagcggagggagatccaggaggggctgaacacccgcatccaggatctctacactgtactgcacaaaaccgaggactatttgaggcaagtgctatgtaaagccgccgagtctgtctacagccgtgtgatccaggtgaagaaaatgaaggccatctatcacatgctgaacatgtgcagctttgacgtgaccaacaagtgcctcattgctgaggtctggtgtcccgaggcggatctgcaggacctgcgccgggcactggaggagggctcgagagagagtggtgctacaatcccctcattcatgaatataatccccacaaaagaaacaccccccactcggatccgcaccaacaaattcaccgagggatttcagaacatcgtggatgcttatggagtcggaagctacagagaagtcaatccagctctctttaccatcatcaccttcccgtttttatttgctgtgatgtttggagacttcggacatggctttgtgatgtttttatttgccctcttgttggtgttaaatgaaaatcatcccagactaaatcagtcacaagagatcatgaggatgttttttaatggccggtacatcctcctgctgatggggctgttctcagtgtacactggcctcatctacaacgactgcttttcaaagtcagtcaacctgttcggctctgggtggaacgtgtcggccatgtacagctccagccacccacccgcagagcataagaagatggtgctttggaatgacagcgtcgttagacacaacagcattttgcagctggatccaagcattcctggagtgttccgaggcccttatccccttggcattgatcctatttggaacttggccacaaatcgcctcacttttctaaactctttcaaaatgaaaatgtccgtgattttaggaatcattcatatgacttttggagtcattctgggaatatttaaccacttgcacttcaggaagaagttcaacatttacctggtttccatcccggaacttctcttcatgctctgtatctttggataccttatatttatgattttctacaagtggctggttttttcagcagaaacctccagagttgctcccagcattctgattgaatttattaacatgtttttattcccagccagtaaaacaagtggcctttacacagggcaggagtatgtccagagagtgctgctggttgtcacagcattgtctgtccctgtcctcttcttgggaaagccactgtttttgttgtggcttcacaatgggcgtagttgcttcggggtgaaccggagtggctacacacttataaggaaagatagtgaggaagaagtttcattgctgggaagccaagatatagaagagggaaatcaccaggtggaagatggatgtagagaaatggcgtgtgaagagtttaattttggagaaatattaatgacccaagtaatccattccatcgagtactgtctgggatgcatctccaacaccgcctcctacctgaggctctgggcgcttagcctggctcacgcacagttgtctgatgtcctgtgggccatgctgatgcgcgtgggcctccgcgttgacaccacctatggcgtcttgctactgctcccggttatcgcgctctttgcagttttgaccattttcatccttctgatcatggaagggctttctgcgtttcttcacgccatacgcctccactgggtagaatttcagaacaaattctacgttggtgcaggcaccaaatttgttcctttctcattcagtctactttcatcaaagttcaataacgacgacagtgtggcatgatcatattgctgtaaccaacaagctttcagatttatggagaatgaccatgttatagactttcacttatgtcagatttatgataggaaaaattccatcttcattactgccttatgacatagccaaataattctgtaagatatacctcttcctcatatgttaaatattttgtaaagtttaccaatttgagatataaaaatttcttttggttttttatgatgagcaaatataagttaatgccaaacgttatgttaaagttattttttcaaatacaggatttggggagagaagccaattttgcatggctagttgaaaatggtattagatacttatttcctttaaactttatttaaaacaaacaacagagttaatctgtcacctgaagttgccagataatattttccaacagctgaagtagggatagttttttaaaaaatttaatgatgggtaatcaaaacattcacatttattctgctggatttaaaaatatgtactttttttttttttttgagatgaagtcttgctgtgtcacgtaggctggagtgcaatggcacgatcgtgtctcattgcaacttccgcctcctggattcaggtgattctcctgtctcagcctcccgagtaactgggattacaggcatgcgccaccgtgaccagctaatttttttgtatttttgtagagatggggtttcaccatgttggccaggctggtctcgaacttctgacctcaagtgatccacctgcctcggcctccctaagtgctgggattacaggcgtgagccaccatgcctggccaaaatatgcaaatattttttatcctgtgctacctagaattacaagtagaggattgtttttacaattttgtcttgttttagtaattggggacaatgggataaaatgacatacaacaaatggttatcccacttgtatatttttttaaagactcttatcctgttacccttacataaaaccagttatgataattgtatgtttggaagataaattgtatgctgagccttaaaacccagtgtgactgtagaagatataatgcggacatgatttgaatttagtgacagcttggctgatgtcactgaaccagaagggtttatactgagtgaaggaaaggtaaaaagtagtattttgtatatttttgtaacaaaatataaatgaagatattttaccatgaagagattgcacttatccttgagaacagtctaaatataaatgaagatattttaccatgaagagattgcacttatccttgagaacagtctaatgatactttttttactttcagactgtttctagctaaagttctgataaaagtattgagttaatttaaactttcaaacactgtttagatcagttgaaaactaattcttaatagccattgttttataatctttagtttaaattcatctgtttgacatttggttttttgtgaacttgagtcagtcctattgaacattttgacctatattcttgcaaattatgttaatttttcatattttagtttgattttagacaattattttcaaaaagaaacctgactttttttcaccttcttgacattgtgagtgatacacgttaaaaggctatttgcccgcatcctcctctatcctgtttcgaggtagagagcttggcacttctgttacaagctgagagtctggaggtgctgagtttaacgtggctgtgcagctgatttcaaggcatgagctgaacagcgttgacacagccgtgacttacaattaaaccctttcaattacagtacagattctgtgtgctacttgatgagatgttacccaaggccagtttggacttactgctttttgtccctcatattaaattatcaaatgatgccgatgaaatgcttgaaaatgattctgctctcaaagttatgcttccctagaaaggtgtcatgtcgggcacttgtgttgggtgactatgacatcccagcagtgctggtcaggtctcagagttgctttcacctagagctgatgcttccacaaggggacatttgtgttactttgctccaggggtctgtcataaaaacaatggtaactacttcatccctaggaagcccaagacttcagggcactgttagctgattggtaaataagggacacgatattcacgggaattgtttactgctccccactagtaattctcatggggccacttttttaactctttctaattaacacctcttctcagcatagagcagaggatgcagtcatttctctgttgaaatctatgtagtatttatgtagaatgtcattatatgaaaagcgaattcagaatcctaactctgggaaagcgctctctggaaatgtagtttgataatagtgtcttataggggccacgggaatttgtttctctataaagcgatgggctccagtgtcatgttaccagagttatcgctcagttttgtttgttaaggcttttgctagaacctattatgtatccagtttttaaaacatacttcattcccttgatagcagagatccagagcacagatggcaagttgtgtggatgatactgaatatgtttattttcctaaagataaatgtcacgacacgacatttctcagtttttatttagatgtttattaccatgtgttaacagaatcttaaaacccaagggatttcttcagtaaactagactttgattcaacctgctgggctggagactgtaattgccgtggtcagttaaggagtgcaaagggtgttctgtctgataggatctgggtgagccctgcggactttccagcagcgaaaggacttggaactcctctttcgctgaatgctgctctgtttctggaatggatattttataacaacattctggtgtcagcatcccctcagcagttgtttatttaaaaatttttttattttttttgagacagtgtctcactctgtcacctaggctgaagtgcagtggtgcagtctcggctcactgcaacctctgcctcctgggtttaagcaattctcctgccctagcctcccgagtagctgggattacaggcgcctgccacagtgcccggctaatttttgtatttttagtagagacagggtttcaccatgttggccaggctggtctcaaactcctgacctcaggtgatctacccaccttggcctcccaaagtgctgggattacaggcgtgagccaccgcgcctggccctctgcagttgtttaataaggcacagaatacctgtagcataggtcagccttacgatgtccatgaattacatattcagacgttttagagcctgatacattttggaaaagaaaaacaacttctacacctattctacagtccgcatttaaaacaataaattcctctattaaaaacgtaaagccgggtttgcttgcgtgccacagggaatatatccaggaaggttattatgaagctgtcaaatcaagatgatgggaataaggcagtttgaacgaacagtcttcccacagtcaggccatttttgctgatttggtttagaattttcagaaatacttagtacactccacctgttctttgatgggaatatctaagaaggctaggtaggttcttagggttagcctgagtcatctaggggctcaactccttgtgaggggaaatgacagtgaacaagttagtactttgctccacaaatgcatgaaaggacaaatttgcatcttctatcagtatttaacttccttttgctaatgacaaataaatatatctatatttttaaa

SEQ ID NO: 109971 - DNA, 1013 bp, Homo sapiens
  Payload ID: 1585
  Gene Symbol: ATP6V0A2
  Gene Name: ATPase, H+ transporting, lysosomal V0 subunit a2
  ENST ID: ENST00000544833
  CDS Start-End: 409-825
gctctacttagaatgctcacatctagtgaatcgcagtctactcttagggttggtgaatacctattttatcagtagatgtttcataattactgagacctgccccagaatcccattagtatagcagctgtggccacggcagttcctctggtctaccttcttggtttacacaggggagtctgaggcgtgcggtgggagtggggctgatgaaggtggggatttggggtggtaaagtctggtcatggagctgggtagtggcagagtggtgaacagagtgcgtctggggtttctgttcctcacactctagcgtgttcttaccagcatccagccggcagctctttcattgtaatccttgaagtggaacccacttggcatgtagaagtacacatgtaacatcatgactcttaacatatgttgtgtgatctctctcagtttaattttggagaaatattaatgacccaagtaatccattccatcgagtactgtctgggatgcatctccaacaccgcctcctacctgaggctctgggcgcttagcctggctcacgcacagttgtctgatgtcctgtgggccatgctgatgcgcgtgggcctccgcgttgacaccacctatggcgtcttgctactgctcccggttatcgcgctctttgcagttttgaccattttcatccttctgatcatggaagggctttctgcgtttcttcacgccatacgcctccactgggtagaatttcagaacaaattctacgttggtgcaggcaccaaatttgttcctttctcattcagtctactttcatcaaagttcaataacgacgacagtgtggcatgatcatattgctgtaaccaacaagctttcagatttatggagaatgaccatgttatagactttcacttatgtcagatttatgataggaaaaattccatcttcattactgccttatgacatagccaaataattctgtaagatatacctcttcctcatatgttaaatattttgtaaagtttaccaatttgaga

SEQ ID NO: 109972 - DNA, 2525 bp, Homo sapiens
  Payload ID: 1585
  Gene Symbol: ATP6V0A2
  Gene Name: ATPase, H+ transporting, lysosomal V0 subunit a2
  ENST ID: ENST00000504192
  CDS Start-End: 1541-2525
taacagcagtcatctggattggcctgttcgatgggtcgcttgtgatgtaattacaaacatagtgatgactgtgtacagtgcttgtaaggcaaagcagaagtaatgaatatagtatattaagtgatttgtttgaatacaagttttcattgactcaatgatttgccttacggatttttgcttctgttattttaatacttaagtatttttaaggatgtttagtatgtaactaattattaaagattctcatgaatttttttttttttttgagacagagtcttgctctgtcgcccaggctagagtgcatgtagtggtgcgatctcggctcactgcagcctgtgcctcccgggttcaagcaattctcctgcctcagcctcccaagtagctgggattataggcacgtgccaccatgcctggctaatttttgtatttttagtagagatggggttttaccatcttggccaggctggtctcgaactcctgacctcgtgatccacccaccttggcttcccaaagtgctgggattacaggcgtgagccaccacgcctggccaattgtcatgaatttttatcctcaattaattgtgtaaatgtgagtgcatagtaactcatatgctagagactaggaaaataagttagaaaagattatctaaatatattctgtgttgcaaaaaaaggaaatgtagacttaaagaggaagagtctttgatgtgtgatatgaataagcagacaaaggaaatccgagaaatgacagcacctgtggttagagacgagggccagtcttgggggtctcacgctcatcacagccttcggaatgttttagctaatatgtggtgtgaacttcacagaaattacctgaattaatatgaaacaataaatgagcctatttatttatttactttgagaaggagtcttgctctgtcacccaagctggagtgcagtgacacgatcttggctcactgcaacctccatctcctgggttcacgtgattcttctgcctcagcctcctgagtagctgggattacaggcacatgccaccatgcccagctaatttttttgtattcttagtagagacagggaggccgaggcgggtggattacctgaggtcaagagttcaagaccagcctggccaacatggtgaaacctcgtctctactaacaatacaaaaaaaaattagctgggcgtggtgatgcgcacctgtagtcccagctactcggggaggctgaggcaagagaatcgcttgaacccaggaggtggaggttgcagtgagccgagatcatgccactgcactccagcctgggcgacagagggagactccatctcaaaaaaaaaaaaaagaaaaaaacaaaacaaaaaaacccactgtttttggtatactgcatgaagattattggaattacacttggaactaattactaccctcttaagtaaccattgttttgttttaggagcagttgcagaagctcgaggttgaactgagagaagtcactaagaacaaggagaaactgaggaaaaacttgctggaactgatagagtacactcacatgctgagagtgacaaagacctttgtgaaacgcaatgttgagtttgaacccacttatgaagaattcccttccttagagagtgattctttgttggattacagctgtatgcagaggctgggagcaaaactgggatttgtgtctggcctaattaaccaaggaaaagtggaagcatttgaaaaaatgttgtggagagtctgcaaagggtacaccatcgtgtcctatgcagaactggatgaatcccttgaagaccctgaaacaggggaagtcataaaatggtatgtctttttaatatccttttggggagagcagattggccacaaggttaagaagatatgtgattgctaccactgccacgtgtacccctatccaaacacagccgaggagcggagggagatccaggaggggctgaacacccgcatccaggatctctacactgtactgcacaaaaccgaggactatttgaggcaagtgctatgtaaagccgccgagtctgtctacagccgtgtgatccaggtgaagaaaatgaaggccatctatcacatgctgaacatgtgcagctttgacgtgaccaacaagtgcctcattgctgaggtctggtgtcccgaggcggatctgcaggacctgcgccgggcactggaggagggctcgagagagagtggtgctacaatcccctcattcatgaatataatccccacaaaagaaacaccccccactcggatccgcaccaacaaattcaccgagggatttcagaacatcgtggatgcttatggagtcggaagctacagagaagtcaatccagctctctttaccatcatcaccttcccgtttttatttgctgtgatgtttggagacttcggacatggctttgtgatgtttttatttgccctcttgttggtgttaaatgaaaatcatcccagactaaatcagtcacaagagatcatgaggatgttttttaatggccggtacatcctcctgctgatggggc

SEQ ID NO: 109973 - DNA, 1733 bp, Homo sapiens
  Payload ID: 1585
  Gene Symbol: ATP6V0A2
  Gene Name: ATPase, H+ transporting, lysosomal V0 subunit a2
  ENST ID: ENST00000534943
  CDS Start-End: 1340-1733
gtttctgtttttttttggtttctcttgtttatgatttttaagaattgtattttatcattattttattgaagctttgtacaatggcatagataccacagataaatgcaggggcgttcagtgggcacaggtgctatggacagaaagatcaaggaagggcagctacctttctttactacctgccgcatacctgagagtgtgctttccttacttagtgtttcttaattctcacaacagccccaggaggtaggtgtgtcatcccctgttactggtgataactggtggctcagggcagtcctggtcactcagcggtctgtagggccaggctgttaacctaggtcagcctggctccagcccaggacttctgatgtggctctgcctgtggccgccacctttctcggcatttcaagaggttcatcctgttgatggtgtgtagataatacagctttgtgcctgagtagcacacagagctctaggaacctgtttttggtgaggggcgaccatacagagtgataagcttggacagcacagtgtcccgtccaaaccctgggaagccatgcagactgccgtggctgtgtaagcctgagtggattttgcttttgatttagctttaagtaactataaatcttcgtttttctaaggaagtgtttttggttttgttctgaattctcttccacgattttctgtgtgtggaggtaaatccacttgctgattcacactcatagtcctcagacggtctttataatcatcaaagaacaggaaaacagaaccaagaatatacaaaatattctgcttgtgcttatactttctcatttacagtgtttacagaaaatgattagttggagtttgactctctttagaatttttgtaaagtttccttgctggtctaaaacaaaataatactttaccacagggtcattaatgttattcatcagttctagaattcagctatgagtttaggaaaagaaaacccgctggcaagtgtagctggctggcatttattgaatgttcctcgcgtggagacattgttcgatctttcctgatttcatcgtgtgctgctgaccctgcaggcaggccttcacgttttaatcgggtttctcaccttctgcactaacaggagtatgtccagagagtgctgctggttgtcacagcattgtctgtccctgtcctcttcttgggaaagccactgtttttgttgtggcttcacaatgggcgtagttgcttcggggtgaaccggagtggctacacacttataaggaaagatagtgaggaagaagtttcattgctgggaagccaagatatagaagagggaaatcaccaggtggaagatggatgtagagaaatggcgtgtgaagagtttaattttggagaaatattaatgacccaagtaatccattccatcgagtactgtctgggatgcatctccaacaccgcctcctacctgaggctctgggcgcttagcctggctcacgcacagttgtctgatgtcctgtgggccatgctgatgcgcgtgggcctccgcgttgacaccacctatggcgtcttgctactgctcccggttatcgcgctctttgcagttttgaccattttcatccttctgatcatggaagggctttctgcgtttcttcacgccatacgcctccactgggtagaatttcagaacaaattctacgttggtgcaggcaccaaatttgttcctttctcattcagtctactttcatcaaagttcaataacg

SEQ ID NO: 109974 - DNA, 1620 bp, Homo sapiens
  Payload ID: 1585
  Gene Symbol: ATP6V0A2
  Gene Name: ATPase, H+ transporting, lysosomal V0 subunit a2
  ENST ID: ENST00000613625
  CDS Start-End: 211-1329
acctcgcggactgctgtggcggcagctggagcggcggccgcggtggcagaaccgggggcggccgctgcagtctggagccccatagtgcggggccgcggccaggccacaggaagagctcgaggcccgggccgcaccggctgagtgtgcgggcccgcgcggctcggagccgccgccgcccatcgagcccctccgggcgcgggtcggcccgccatggggtccctgttccggagcgagaccatgtgcctggcgcagctcttcctgcagtcgggcacggcctacgagtgcctcagcgccctgggcgagaaaggcctggtccagttccgagacctcaaccagaacgtaagttctttccaaagaaaatttgttggtgaggtgaagaggtgtgaagagctagagcgaatattggtgtatttggtacaggaaattaatagagctgatattccccttcctgaaggagaggccagccctcctgcgccacccctgaaacaggttctagaaatgcaggagcagttgcagaagctcgaggttgaactgagagaagtcactaagaacaaggagaaactgaggaaaaacttgctggaactgatagagtacactcacatgctgagagtgacaaagacctttgtgaaacgcaatgttgagtttgaacccacttatgaagaattcccttccttagagagtgattctttgttggattacagctgtatgcagaggctgggagcaaaactgggatttgtgtctggcctaattaaccaaggaaaagtggaagcatttgaaaaaatgttgtggagagtctgcaaagggtacaccatcgtgtcctatgcagaactggatgaatcccttgaagaccctgaaacaggggaagtcataaaatggtatgtctttttaatatccttttggggagagcagattggccacaaggttaagaagatatgtgattgctaccactgccacgtgtacccctatccaaacacagccgaggagcggagggagatccaggaggggctgaacacccgcatccaggatctctacactgtactgcacaaaaccgaggactatttgaggcaagtgctatgtaaagccgccgagtctgtctacagccgtgtgatccaggtgaagaaaatgaaggccatctatcacatgctgaacatgtgcagctttgacgtgaccaacaagtgcctcattgctgaggtctggtgtcccgaggcggatctgcaggacctgcgccgggcactggaggagggctcggtaaggctgccttcctctcctctgccaggaacagaagagagactgatggaactgataaattcagagaaaaaaaggaagtgagaatttcatagagtaatgagaatgcagtgtgttgactcttcttttgtttttttaaaatattaattaacaaaattaaaatagagatggggttttgctgtgttgcccaggctggtctcaaactcctggccccgagcgatcctcctgcctcagccttggctctgtttttgaactgaaattatggtgagctggtcattcaaagctgtatgtgagtacatgtgtttttaaattgctcttttgagtaattcattcacatggtgtaaaagtgaaaagaaataaaagagtatgaaagac

SEQ ID NO: 109975 - DNA, 2709 bp, Homo sapiens
  Payload ID: 1586
  Gene Symbol: ATP6V0A4
  Gene Name: ATPase, H+ transporting, lysosomal V0 subunit a4
  Uniprot ID: Q9HBG4
  ENST ID: ENST00000353492
  CDS Start-End: 89-2611
gctggaggctgtgctgagtgcccggtgcaggtgagccggtcctgcggagttgtgccgagtgcctgctgcagaccgaggctgggccaagatggtgtctgtgtttcgaagcgaggagatgtgtttgtcacaactgtttctccaggtggaagctgcatattgctgtgtggctgagctcggagagctcggattggttcagttcaaagatttaaatatgaatgtgaacagctttcaaaggaaatttgtgaatgaagtcagaaggtgtgaatcactggagagaatcctccgttttctggaagacgagatgcaaaatgagattgtagttcagttgctcgagaaaagcccactgaccccgctcccacgggaaatgattaccctggagactgttctagaaaaactggaaggagagttacaggaagccaaccagaaccagcaggccttgaaacaaagcttcctagaactgacagaactgaaatacctcctgaagaaaacccaagacttctttgagacggaaaccaatttagctgatgatttctttactgaggacacttctggcctcctggagttgaaagcagtgcctgcatatatgaccggaaagttggggttcatagccggtgtgatcaacagggagaggatggcttcctttgagcggttactgtggcgaatctgccgaggaaacgtgtacttgaagttcagtgagatggacgcccctctggaggatcctgtgacgaaagaagaaattcagaagaacatattcatcatattttaccaaggagagcagctcaggcagaaaatcaagaagatctgtgatgggtttcgagccactgtctacccttgcccagagcctgcggtggagcgcagagagatgttggagagcgtcaatgtgaggctggaagatttaatcaccgtcataacacaaacagagtctcaccgccagcgcctgctgcaggaagccgctgccaactggcactcctggctcatcaaggtgcagaagatgaaagctgtctaccacatcctgaacatgtgcaacatcgacgtcacccagcagtgtgtcatcgccgagatctggttcccggtggcagatgccacacgtatcaagagggcactggagcaaggcatggaactaagtggctcctccatggcccccatcatgaccacagtgcaatctaaaacagcccctcccacatttaacaggaccaataaattcacagctggcttccagaatattgttgatgcctatggtgtcggcagctaccgggagataaacccagccccctacaccatcatcactttccccttcctgttcgctgtgatgtttggagactgtggtcatggaaccgtgatgctcctggctgcactttggatgattctgaatgagagacgcttgctctcccagaagacagacaatgagatttggaacaccttcttccacgggcgctatctgatcctacttatgggcatcttctccatctacacgggtttgatctacaatgactgcttctccaagtccttgaacatctttggctcttcttggagtgtccaacccatgttcagaaacggcacatggaatactcatgtaatggaggaaagtctatatctgcagctggacccagccataccaggagtgtattttggaaatccatacccgtttgggattgatccgatttggaacttggcttcaaacaaactcacatttctgaactcgtataaaatgaagatgtcggtgatcctgggaattgtccagatggttttcggtgtcatcctcagccttttcaatcacatatacttcagaagaactctcaacatcattctgcaatttatccctgagatgatttttatcctgtgtctgtttggatacctggttttcatgatcattttcaaatggtgctgctttgacgtccatgtatctcagcacgcccccagcatcctcatccacttcatcaacatgtttctgtttaactacagtgactcttccaacgcacccctctacaaacatcagcaagaagtccaaagtttctttgtggttatggctttgatttctgtgccgtggatgcttctgattaagccgtttattcttagagccagtcatcggaaatcccagctgcaggcatccaggatccaagaagatgccactgagaacattgaaggtgatagctccagcccttctagccgttctggccagaggacttctgcagatacccacggggctctggacgaccatggagaagagttcaactttggagacgtctttgtccaccaagccatccacaccatcgagtactgcctgggctgcatttcaaacacagcctcctacctgcggctctgggccctcagcctggctcatgcacaactgtctgaagtgctctggactatggtgatgaacagcggccttcagacgcgaggctggggaggaatcgtcggggtttttattatttttgccgtatttgctgtcctgacagtagccatccttctgatcatggagggcctctctgctttcctgcacgccctgcgactgcactgggttgagttccagaacaagttctatgtcggggatggttacaagttttctccattctcctttaaacacatcctggatggcacagccgaggagtaggctgagggctgcacctcccacggtggtcaccatgccaatgaaggaagttcagtcttgtctttgatatcagcccctgcaaggcgctcaatgggaaggtt

SEQ ID NO: 109976 - DNA, 3135 bp, Homo sapiens
  Payload ID: 1586
  Gene Symbol: ATP6V0A4
  Gene Name: ATPase, H+ transporting, lysosomal V0 subunit a4
  Uniprot ID: Q9HBG4
  ENST ID: ENST00000310018
  CDS Start-End: 284-2806
ataacgctacctgccgagcaagccgagtggagggaggcaaaggccaggctgaggatcagggtggcccgggtggcagcggggaggcgctgcatgctggaggctgtgctgagtgcccggtgcaggtgagccggtcctgcggagttgtgccgagtgcctgctgcagtctcatttccagttcctccatgacgtggcaagtgaagacaggaatgaaaggaatgtaaagcagcttttctctgaagagaagaagagagagagacacagccaagaccgaggctgggccaagatggtgtctgtgtttcgaagcgaggagatgtgtttgtcacaactgtttctccaggtggaagctgcatattgctgtgtggctgagctcggagagctcggattggttcagttcaaagatttaaatatgaatgtgaacagctttcaaaggaaatttgtgaatgaagtcagaaggtgtgaatcactggagagaatcctccgttttctggaagacgagatgcaaaatgagattgtagttcagttgctcgagaaaagcccactgaccccgctcccacgggaaatgattaccctggagactgttctagaaaaactggaaggagagttacaggaagccaaccagaaccagcaggccttgaaacaaagcttcctagaactgacagaactgaaatacctcctgaagaaaacccaagacttctttgagacggaaaccaatttagctgatgatttctttactgaggacacttctggcctcctggagttgaaagcagtgcctgcatatatgaccggaaagttggggttcatagccggtgtgatcaacagggagaggatggcttcctttgagcggttactgtggcgaatctgccgaggaaacgtgtacttgaagttcagtgagatggacgcccctctggaggatcctgtgacgaaagaagaaattcagaagaacatattcatcatattttaccaaggagagcagctcaggcagaaaatcaagaagatctgtgatgggtttcgagccactgtctacccttgcccagagcctgcggtggagcgcagagagatgttggagagcgtcaatgtgaggctggaagatttaatcaccgtcataacacaaacagagtctcaccgccagcgcctgctgcaggaagccgctgccaactggcactcctggctcatcaaggtgcagaagatgaaagctgtctaccacatcctgaacatgtgcaacatcgacgtcacccagcagtgtgtcatcgccgagatctggttcccggtggcagatgccacacgtatcaagagggcactggagcaaggcatggaactaagtggctcctccatggcccccatcatgaccacagtgcaatctaaaacagcccctcccacatttaacaggaccaataaattcacagctggcttccagaatattgttgatgcctatggtgtcggcagctaccgggagataaacccagccccctacaccatcatcactttccccttcctgttcgctgtgatgtttggagactgtggtcatggaaccgtgatgctcctggctgcactttggatgattctgaatgagagacgcttgctctcccagaagacagacaatgagatttggaacaccttcttccacgggcgctatctgatcctacttatgggcatcttctccatctacacgggtttgatctacaatgactgcttctccaagtccttgaacatctttggctcttcttggagtgtccaacccatgttcagaaacggcacatggaatactcatgtaatggaggaaagtctatatctgcagctggacccagccataccaggagtgtattttggaaatccatacccgtttgggattgatccgatttggaacttggcttcaaacaaactcacatttctgaactcgtataaaatgaagatgtcggtgatcctgggaattgtccagatggttttcggtgtcatcctcagccttttcaatcacatatacttcagaagaactctcaacatcattctgcaatttatccctgagatgatttttatcctgtgtctgtttggatacctggttttcatgatcattttcaaatggtgctgctttgacgtccatgtatctcagcacgcccccagcatcctcatccacttcatcaacatgtttctgtttaactacagtgactcttccaacgcacccctctacaaacatcagcaagaagtccaaagtttctttgtggttatggctttgatttctgtgccgtggatgcttctgattaagccgtttattcttagagccagtcatcggaaatcccagctgcaggcatccaggatccaagaagatgccactgagaacattgaaggtgatagctccagcccttctagccgttctggccagaggacttctgcagatacccacggggctctggacgaccatggagaagagttcaactttggagacgtctttgtccaccaagccatccacaccatcgagtactgcctgggctgcatttcaaacacagcctcctacctgcggctctgggccctcagcctggctcatgcacaactgtctgaagtgctctggactatggtgatgaacagcggccttcagacgcgaggctggggaggaatcgtcggggtttttattatttttgccgtatttgctgtcctgacagtagccatccttctgatcatggagggcctctctgctttcctgcacgccctgcgactgcactgggttgagttccagaacaagttctatgtcggggatggttacaagttttctccattctcctttaaacacatcctggatggcacagccgaggagtaggctgagggctgcacctcccacggtggtcaccatgccaatgaaggaagttcagtcttgtctttgatatcagcccctgcaaggcgctcaatgggaaggttgttcttggctcacctgaagcatgaaactgtgtattatttggacgtcagcctgtggatttgatacgacttaaccacgtcagaggaaggactttggcaagtgatattgtcttcatgtggggtattaattctcaaataataaagtaattgacaaatgaggggagaatgctaaacagatgtcttcttgcaatattttaaatattgtatttgagaaaataaacatctgagtcattc

SEQ ID NO: 109977 - DNA, 3090 bp, Homo sapiens
  Payload ID: 1586
  Gene Symbol: ATP6V0A4
  Gene Name: ATPase, H+ transporting, lysosomal V0 subunit a4
  Uniprot ID: Q9HBG4
  ENST ID: ENST00000393054
  CDS Start-End: 239-2761
aacagagctgcctcctggctctttgggagcctgggaggagaaggagccgggaggggcgctgcggggaagccacctgcggattcactggctgctgctccgcccaggactgctagcaagcacggagggctgccagacctggggctccctgctccgtgcgtcaggttggggaaaccaccgtctgccccagaccctgacccaggacccgcctggaggaagctgggaccgaggctgggccaagatggtgtctgtgtttcgaagcgaggagatgtgtttgtcacaactgtttctccaggtggaagctgcatattgctgtgtggctgagctcggagagctcggattggttcagttcaaagatttaaatatgaatgtgaacagctttcaaaggaaatttgtgaatgaagtcagaaggtgtgaatcactggagagaatcctccgttttctggaagacgagatgcaaaatgagattgtagttcagttgctcgagaaaagcccactgaccccgctcccacgggaaatgattaccctggagactgttctagaaaaactggaaggagagttacaggaagccaaccagaaccagcaggccttgaaacaaagcttcctagaactgacagaactgaaatacctcctgaagaaaacccaagacttctttgagacggaaaccaatttagctgatgatttctttactgaggacacttctggcctcctggagttgaaagcagtgcctgcatatatgaccggaaagttggggttcatagccggtgtgatcaacagggagaggatggcttcctttgagcggttactgtggcgaatctgccgaggaaacgtgtacttgaagttcagtgagatggacgcccctctggaggatcctgtgacgaaagaagaaattcagaagaacatattcatcatattttaccaaggagagcagctcaggcagaaaatcaagaagatctgtgatgggtttcgagccactgtctacccttgcccagagcctgcggtggagcgcagagagatgttggagagcgtcaatgtgaggctggaagatttaatcaccgtcataacacaaacagagtctcaccgccagcgcctgctgcaggaagccgctgccaactggcactcctggctcatcaaggtgcagaagatgaaagctgtctaccacatcctgaacatgtgcaacatcgacgtcacccagcagtgtgtcatcgccgagatctggttcccggtggcagatgccacacgtatcaagagggcactggagcaaggcatggaactaagtggctcctccatggcccccatcatgaccacagtgcaatctaaaacagcccctcccacatttaacaggaccaataaattcacagctggcttccagaatattgttgatgcctatggtgtcggcagctaccgggagataaacccagccccctacaccatcatcactttccccttcctgttcgctgtgatgtttggagactgtggtcatggaaccgtgatgctcctggctgcactttggatgattctgaatgagagacgcttgctctcccagaagacagacaatgagatttggaacaccttcttccacgggcgctatctgatcctacttatgggcatcttctccatctacacgggtttgatctacaatgactgcttctccaagtccttgaacatctttggctcttcttggagtgtccaacccatgttcagaaacggcacatggaatactcatgtaatggaggaaagtctatatctgcagctggacccagccataccaggagtgtattttggaaatccatacccgtttgggattgatccgatttggaacttggcttcaaacaaactcacatttctgaactcgtataaaatgaagatgtcggtgatcctgggaattgtccagatggttttcggtgtcatcctcagccttttcaatcacatatacttcagaagaactctcaacatcattctgcaatttatccctgagatgatttttatcctgtgtctgtttggatacctggttttcatgatcattttcaaatggtgctgctttgacgtccatgtatctcagcacgcccccagcatcctcatccacttcatcaacatgtttctgtttaactacagtgactcttccaacgcacccctctacaaacatcagcaagaagtccaaagtttctttgtggttatggctttgatttctgtgccgtggatgcttctgattaagccgtttattcttagagccagtcatcggaaatcccagctgcaggcatccaggatccaagaagatgccactgagaacattgaaggtgatagctccagcccttctagccgttctggccagaggacttctgcagatacccacggggctctggacgaccatggagaagagttcaactttggagacgtctttgtccaccaagccatccacaccatcgagtactgcctgggctgcatttcaaacacagcctcctacctgcggctctgggccctcagcctggctcatgcacaactgtctgaagtgctctggactatggtgatgaacagcggccttcagacgcgaggctggggaggaatcgtcggggtttttattatttttgccgtatttgctgtcctgacagtagccatccttctgatcatggagggcctctctgctttcctgcacgccctgcgactgcactgggttgagttccagaacaagttctatgtcggggatggttacaagttttctccattctcctttaaacacatcctggatggcacagccgaggagtaggctgagggctgcacctcccacggtggtcaccatgccaatgaaggaagttcagtcttgtctttgatatcagcccctgcaaggcgctcaatgggaaggttgttcttggctcacctgaagcatgaaactgtgtattatttggacgtcagcctgtggatttgatacgacttaaccacgtcagaggaaggactttggcaagtgatattgtcttcatgtggggtattaattctcaaataataaagtaattgacaaatgaggggagaatgctaaacagatgtcttcttgcaatattttaaatattgtatttgagaaaataaacatctgagtcattc

SEQ ID NO: 109978 - DNA, 3709 bp, Homo sapiens
  Payload ID: 1587
  Gene Symbol: ATP4A
  Gene Name: ATPase, H+/K+ exchanging, alpha polypeptide
  Uniprot ID: P20648
  ENST ID: ENST00000262623
  CDS Start-End: 30-3137
gttgggtgggagcacaggcaccgggcaccatggggaaggccgagaactatgagctctactcggtggagctgggtcctggccctggcggggacatggctgccaagatgagcaagaagaagaaggcgggtggcgggggtggcaagaggaaggagaagctggagaacatgaagaaggagatggagattaacgaccaccagctgtcagtggcggagctggaacagaaataccagaccagtgccaccaagggcctctctgcgagcctggctgctgagctgctgctgcgggatgggcccaacgcactgcggccaccacggggcaccccagagtacgtcaagttcgcgaggcagctggccgggggcctgcagtgcctcatgtgggttgccgccgccatctgcctcatcgcctttgccatccaggctagtgagggggacctcaccaccgacgacaatctgtacctggcaatcgctctcattgctgtggttgtcgtcaccggctgctttggctactaccaggaattcaagagcaccaacatcatcgccagctttaagaaccttgtgccacagcaagccactgtcatccgcgatggagacaaattccagatcaacgctgaccaactggtggtgggcgacctggtggagatgaaaggtggggacagagtgcccgccgacatccgcatcctggcggcccagggctgcaaggtggacaactcctcgctgacaggggagtctgagccacagacccgctcacccgagtgcacgcacgagagccctctggagacccgcaacatcgccttcttctccaccatgtgccttgagggcaccgtgcagggcctggtggtgaacacgggcgaccgcaccatcattgggcgcatcgcatcgctggcgtcgggggtggaaaacgagaagacacccatcgctatcgagatcgagcattttgtggacatcatcgcgggcctggccattctcttcggtgccacattttttattgtggccatgtgcattggctacaccttcctgcgggccatggtcttcttcatggccatcgtggtggcctatgtgcctgaggggctgctggccactgtcacagtctgcctgtccctgacagccaagcgcctggccagtaagaactgcgtggtcaagaacctggaggcggtggagacattgggctccacttcggtgatctgctcggacaagacagggactctcactcagaaccgcatgactgtgtcccatctgtggtttgacaaccacatccacacagctgacaccacggaagaccagtcagggcagacgtttgaccagtcctcggagacgtggcgggcgctgtgccgggtgctcaccctgtgcaaccgcgccgccttcaagtccggccaggatgcagtgcctgtgcccaagcgcatcgtgattggagacgcatcggagacggcgctgctcaagttctcggagctgacgctgggcaacgccatgggctaccgggaccgcttcccaaaagtctgcgagatacccttcaactccaccaacaagttccagctgtccatccatacgctggaggacccgcgggacccgcgacacttgctggtgatgaagggcgcccccgagcgcgtgctggagcgctgcagctccatccttatcaagggccaggagctgccgctggacgagcagtggcgcgaggccttccagaccgcctacctcagcctgggaggcctgggcgaacgcgtgctcggcttctgccagctctacctgaatgagaaggactacccgcctggctatgccttcgacgtagaggccatgaactttccatctagcggcctctgctttgcgggacttgtatccatgattgacccaccccgggccaccgtccctgatgctgtgctcaagtgtcgcaccgcaggcatccgggtgatcatggtaacgggtgaccaccccatcaccgccaaggccattgcagccagtgtgggcatcatctcggaaggcagcgagacagtggaggacatcgctgcccgcctccgtgtgcccgtagaccaggttaatcgcaaggatgcccgtgcctgtgtgatcaatggcatgcagctgaaggacatggacccatcggaactggtcgaggccctgcgcacccaccccgagatggtgtttgcgcgcaccagcccccagcagaagctggtgatcgtggagagctgccagcggctgggtgcgattgtggccgtcacgggggatggtgtgaatgactccccagctctgaagaaggcagacatcggagtagccatgggcatcgctggctcagatgctgccaaaaatgcagctgacatgatcctgctggatgacaactttgcctccattgtgacaggcgtggagcagggtcgactgatcttcgacaacctgaagaagtctattgcctacacattgaccaagaacatcccagagctgacaccctacctcatctacatcaccgtcagcgtgcccctgcccctcgggtgcatcaccatcctcttcatcgaactctgcactgacattttcccatctgtgtccctggcatatgaaaaggccgagagtgacatcatgcacctgcgtccacgcaacccaaagcgtgacagattggtcaacgagcccctggctgcctactcctacttccagattggtgccattcagtcctttgctggcttcactgactacttcacggcaatggcccaggagggctggttcccactgctgtgcgtggggctgcgggcgcagtgggaggaccaccacctacaagatctgcaggacagctacggccaggagtggacattcgggcagcgcctgtaccagcagtacacctgctacaccgtgttcttcatcagcattgaggtgtgccagatcgccgatgtcctcatccgcaagacgcgccgtctctctgccttccagcaaggcttcttcaggaataagatcctggtgatcgccatcgtgttccaggtctgcatcggctgcttcctgtgctactgccccggcatgcccaacatcttcaacttcatgcccattcggttccagtggtggctggtccccctgccctacggcatcctcatcttcgtctatgatgagatccggaagcttggagttcgctgttgcccagggagctggtgggaccaggaactctactattagagggacgactgccttcaagcatccctgcaactgccacagcaggtgggggcagggctcgtgggaccctctggacagccaccaagatatctgagcaaccaagagtcccagccccaccagtatctgcttctgtagcccacggcaccccaaacttggagggacctgcccactcccctcccccattcccaaggttcgcacctcctggagcagcagcgcctgggcagtcctctgggctggcctcgggaaagccgccacctgtggtggcggtggggctctgacagggagtacagctgaccgcttctggagggtgtttctgttcttaggactccagtccaggctggacggctgcctgagggcccttcgttaaagacacgcttgtgtcctgggcgatggtaataaaaccagctcatgctgactgtgctgtatctggtgccaggcactgtcctcagcgtctctcattagtgcttgtgatctcccacagtcctgtacatgggggctgtttatccagggctgcacctccagtgcctagtacacagcctggcacatagtaggtcctcaataaacctgccttgggg

SEQ ID NO: 109979 - DNA, 650 bp, Homo sapiens
  Payload ID: 1587
  Gene Symbol: ATP4A
  Gene Name: ATPase, H+/K+ exchanging, alpha polypeptide
  ENST ID: ENST00000592767
  CDS Start-End: 1-103
ggagctgccgctggacgagcagtggcgcgaggccttccagaccgcctacctcagcctgggaggcctgggcgaacgcgtgctcggtgatcatggtaacgggtgaccaccccatcaccgccaaggccattgcagccagtgtgggcatcatctcggaaggcagcgagacagtggaggacatcgctgcccgcctccgtgtgcccgtagaccaggttaatcgcaaggatgcccgtgcctgtgtgatcaatggcatgcagctgaaggacatggacccatcggaactggtcgaggccctgcgcacccaccccgagatggtgtttgcgcgcaccagcccccagcagaagctggtgatcgtggagagctgccagcggctggtcgactgatcttcgacaacctgaagaagtctattgcctacacattgaccaagaacatcccagagctgacaccctacctcatctacatcaccgtcagcgtgcccctgcccctcgggtgcatcaccatcctcttcatcgaactctgcactgacattttcccatctgtgtccctggcatatgaaaaggccgagagtgacatcatgcacctgcgtccacgcaacccaaagcgtgacagattggtcaacgagcccctggctgcctactcctacttccagattg

SEQ ID NO: 109980 - DNA, 1488 bp, Homo sapiens
  Payload ID: 1588
  Gene Symbol: ATP4B
  Gene Name: ATPase, H+/K+ exchanging, beta polypeptide
  Uniprot ID: P51164
  ENST ID: ENST00000335288
  CDS Start-End: 43-918
gagggtgcagggagcagacgggaggatctcaggccagggacgatggcggctctgcaggagaagaagacgtgtggccagcgcatggaggagttccagcgttactgctggaacccggacacggggcagatgctgggccgcaccctgtcccggtgggtgtggatcagcctgtactacgtggccttctacgtggtgatgactgggctcttcgccctgtgcctctatgtgctgatgcagacagtggacccgtacacaccggactaccaagaccagctacggtcaccaggggtaaccttaaggccggatgtttacggggagaaaggcctggaaattgtctacaacgtctctgataacagaacctgggcagacctcacacagactctccacgccttcctagcaggctactctccagcagcccaggaggacagcatcaactgcacctccgagcagtacttcttccaggagagtttccgcgctcccaaccacaccaagttctcctgcaagttcacggcagatatgctgcagaactgctcaggcctggcggatcccaacttcggctttgaagaaggaaagccatgttttattattaaaatgaacaggatcgtcaagttcctccccagcaacggctcggcccccagagtggactgcgccttcctggaccagccccgcgagctcggccagccgctgcaggtcaagtactaccctcccaacggcaccttcagtctgcactacttcccttattacgggaagaaagcccagccccactacagcaaccccctggtggcagcgaagctcctcaacatccccaggaacgctgaggtcgccatcgtgtgcaaggtcatggcggagcacgtgaccttcaacaatccccacgacccgtatgaagggaaagtggagttcaaactcaagattgagaagtgaaacggtttgcgcaggggtcctgggcacgcctgcggggtcgctcaaggacaccctcctggttgggcttaccttgcccgtcagttccctgccaaatcatccccaaagtggtttggagcaacggtgttgtcagtgtgcgaactccagagaagcgcccacatctgaaggacctgctcgcgagtatcagttcttccttgttgaattcttacagtttttagatggaatttgctgctataagaatgtccagctaccatgggaacgcaaggcagcaactctctaattaaccaggtcataaaaacgattcgtcttctatgtagacatcactttcttactataatttatttttctacacttcaatatgaactgccccccccacattaatataaaaactactaatgcactgatatgaaacacggcttacactaatgacattctgaattcttgcttttaaaattgcaattcctaagttgtaaacataaaatatattaaagttactcttattgtatgtaaaaaaagaaatcgtgtttcctgatatgggagaaattaaataaaaaccaaacgcttccttaaaaa

SEQ ID NO: 109981 - DNA, 3732 bp, Homo sapiens
  Payload ID: 1589
  Gene Symbol: ATP12A
  Gene Name: ATPase, H+/K+ transporting, nongastric, alpha polypeptide
  Uniprot ID: P54707
  ENST ID: ENST00000218548
  CDS Start-End: 334-3471
aatcctggactctcccgacccctagctgtcggtccccctccctgcgcgcgcgccggcgggtttcctaccctccgaggcgtccgctggcctgcgccctggcggggacgtgggcggggcgggcggcatttaaggctggtgccacctccccggtgcagcggctggcgatcggccgcggaggtgcgtgcagggcccgcgccgccgccggtatctccaccgccaacacctcagccactgccactgccacagccacacgaggccccccaccgtgcgctccgccgctgcggtcccggatccgcgctccacgcccgcagcccgcggcgccaccagcccagcatgcaccagaaaaccccagaaatttactccgtggagctcagcggaactaaggacatcgtgaaaacagacaagggggatggcaaggagaagtataggggtctgaagaacaactgcctggaactcaaaaagaaaaatcacaaagaggagtttcagaaagaactccatctggatgaccacaaactcagcaatagggaattggaagagaaatatggcacagacatcattatgggtctctccagcaccagagctgccgagctcctggcccgggatgggcccaactccctcacccctcccaagcagacgcctgagatcgtcaagttcctcaagcagatggtgggggggttctctatcctcctgtgggtgggcgcctttctctgttggattgcatatgggattcagtactccagcgacaagtctgcatccctgaacaacgtgtacttgggctgtgtgcttggtctggtggtcattttaacggggatctttgcttattaccaagaggcaaaaagcaccaacatcatgtccagcttcaataagatgatccctcagcaagctctcgtcatccgagattccgagaagaagaccatcccttcagagcagctggtggtgggggacattgtggaggtcaaaggaggagaccagatccctgcagacatcagggtgctgtcttctcaggggtgtcgggtggataactcatctctcacgggggagtctgagccccagccccgctcctctgagtttacccatgaaaaccccctggaaacaaagaacatctgcttctattccacaacgtgtctggaagcatctacttcccctgtaggcactgtcaccggcatggttatcaacacgggtgaccgcaccatcattggccatattgcctcattggcctcaggagttggaaatgagaagacgcccattgccattgagatcgagcactttgttcacattgtggcaggagtggctgtctccatcggcatccttttcttcatcatcgctgtgtccctgaagtatcaagtcctggactccatcatcttcctcattggcatcattgtggccaatgtgcccgagggcctcctggccactgtcactgtgaccctgtcgctgacagcaaaacggatggccaagaagaactgcctggtgaagaacctggaggctgtggagaccctcggctccacctccatcatctgctcggacaagactgggacactgacccagaacaggatgacagtggcccatctgtggttcgacaatcagatctttgtggctgacaccagtgaggaccattcaaaccaagtctttgaccaaagctctaggacttgggcctccttatccaagataataacattgtgtaaccgagcagagttcaagccaggacaggaaaatgtccccatcatgaagaaagctgtgattggagatgcctcagaaactgctcttttaaaattctcagaggtcattttgggtgatgtgatggaaattagaaaaagaaaccgcaaagtagctgaaatcccttttaactctactaataaatttcagctctccatccacgagatggatgacccccacggcaagcgcttcctcatggtgatgaagggggcccctgagcgcatcctagagaaatgcagcaccatcatgatcaacggcgaggagcacccactggacaagagcactgccaagaccttccacacagcctacatggagctgggcgggttgggcgagcgtgtgctgggtttctgtcatctctacctgccagcagacgagtttccagaaacctactcatttgacatagacgctatgaactttccgacctccaacctctgttttgtgggactcttgtcaatgatcgatccccctcggtccaccgtgccagatgcagtcaccaaatgccggagtgcagggatcaaggttattatggttactggtgatcatcccatcacagccaaagctattgccaagagtgtggggatcatttcagccaacagtgaaacagtggaagacattgcacatcgcctcaacattgctgtggagcaagttaacaaacgggatgccaaggccgctgtggtgactggcatggagctgaaggacatgagctcagaacagctggatgagatcttagccaactaccaggagattgtctttgcccggacatccccccagcagaagctgatcattgtggagggctgtcagaggcaggatgctgttgttgctgtgaccggggatggagttaatgactctccggctctaaagaaggcagacattgggattgccatggggatagcaggttctgatgcagccaaaaatgcagccgacatggtcttgctggacgacaacttcgcatccatcgtcacaggggtggaggaaggtcgcctgatctttgacaacctcaagaagactattgcttattccctgaccaagaacattgccgagctgtgcccctttctgatctacatcattgtcgggctccccctgcccattggcaccatcaccattctgttcattgacttggggacagacattatcccctccattgccttggcgtacgagaaagctgaaagtgacatcatgaacaggaagcctcgccacaagaataaggacaggctggtgaaccagccgctcgctgtgtactcatacctgcacattggcctcatgcaagccctgggagctttccttgtgtatttcaccgtctatgcacaagagggctttctgccccgcactctcattaacctgcgggtagaatgggagaaggactacgtgaatgacttgaaagacagctatgggcaggaatggacaaggtaccagagggaatacctagaatggacgggctacacggctttctttgttggcatcctagtccagcaaatagcagatctgatcatcaggaaaacccggaggaattccatcttccagcagggtctcttcagaaataaagtcatctgggtggggatcacctcacagatcatcattggtctgatcctctcctatggcctcggaagtgtcacagccttgagtttcaccatgcttagggctcagtactggtttgtggctgtgccgcacgccatcctgatctgggtgtatgatgaggtgcggaagctcttcatcaggctctaccctggaagctggtgggataagaacatgtattattaagaccacctcccttcctatgtctctcagcagcacgttggggcacacttgttcatcttctgaccgtttgctgggctattcccctgcagtgcagacatcgtcaaaattcagacaagaggaaattttcatgcagaaagctgtatgcaggatgctcactgatgttttgcactttaaaactgaaattcaactctttatataggattttcttttctatctccatctcctcattaaaaaatacgtacatttcgaggtaatggtataggg

SEQ ID NO: 109982 - DNA, 4258 bp, Homo sapiens
  Payload ID: 1589
  Gene Symbol: ATP12A
  Gene Name: ATPase, H+/K+ transporting, nongastric, alpha polypeptide
  Uniprot ID: P54707
  ENST ID: ENST00000381946
  CDS Start-End: 168-3287
cggccgcggaggtgcgtgcagggcccgcgccgccgccggtatctccaccgccaacacctcagccactgccactgccacagccacacgaggccccccaccgtgcgctccgccgctgcggtcccggatccgcgctccacgcccgcagcccgcggcgccaccagcccagcatgcaccagaaaaccccagaaatttactccgtggagctcagcggaactaaggacatcgtgaaaacagacaagggggatggcaaggagaagtataggggtctgaagaacaactgcctggaactcaaaaagaaaaatcacaaagaggagtttcagaaagaactccatctggatgaccacaaactcagcaatagggaattggaagagaaatatggcacagacatcattatgggtctctccagcaccagagctgccgagctcctggcccgggatgggcccaactccctcacccctcccaagcagacgcctgagatcgtcaagttcctcaagcagatggtgggggggttctctatcctcctgtgggtgggcgcctttctctgttggattgcatatgggattcagtactccagcgacaagtctgcatccctgaacaacgtgtacttgggctgtgtgcttggtctggtggtcattttaacggggatctttgcttattaccaagaggcaaaaagcaccaacatcatgtccagcttcaataagatgatccctcagcaagctctcgtcatccgagattccgagaagaagaccatcccttcagagcagctggtggtgggggacattgtggaggtcaaaggaggagaccagatccctgcagacatcagggtgctgtcttctcaggggtgtcgggtggataactcatctctcacgggggagtctgagccccagccccgctcctctgagtttacccatgaaaaccccctggaaacaaagaacatctgcttctattccacaacgtgtctggaaggcactgtcaccggcatggttatcaacacgggtgaccgcaccatcattggccatattgcctcattggcctcaggagttggaaatgagaagacgcccattgccattgagatcgagcactttgttcacattgtggcaggagtggctgtctccatcggcatccttttcttcatcatcgctgtgtccctgaagtatcaagtcctggactccatcatcttcctcattggcatcattgtggccaatgtgcccgagggcctcctggccactgtcactgtgaccctgtcgctgacagcaaaacggatggccaagaagaactgcctggtgaagaacctggaggctgtggagaccctcggctccacctccatcatctgctcggacaagactgggacactgacccagaacaggatgacagtggcccatctgtggttcgacaatcagatctttgtggctgacaccagtgaggaccattcaaaccaagtctttgaccaaagctctaggacttgggcctccttatccaagataataacattgtgtaaccgagcagagttcaagccaggacaggaaaatgtccccatcatgaagaaagctgtgattggagatgcctcagaaactgctcttttaaaattctcagaggtcattttgggtgatgtgatggaaattagaaaaagaaaccgcaaagtagctgaaatcccttttaactctactaataaatttcagctctccatccacgagatggatgacccccacggcaagcgcttcctcatggtgatgaagggggcccctgagcgcatcctagagaaatgcagcaccatcatgatcaacggcgaggagcacccactggacaagagcactgccaagaccttccacacagcctacatggagctgggcgggttgggcgagcgtgtgctgggtttctgtcatctctacctgccagcagacgagtttccagaaacctactcatttgacatagacgctatgaactttccgacctccaacctctgttttgtgggactcttgtcaatgatcgatccccctcggtccaccgtgccagatgcagtcaccaaatgccggagtgcagggatcaaggttattatggttactggtgatcatcccatcacagccaaagctattgccaagagtgtggggatcatttcagccaacagtgaaacagtggaagacattgcacatcgcctcaacattgctgtggagcaagttaacaaacgggatgccaaggccgctgtggtgactggcatggagctgaaggacatgagctcagaacagctggatgagatcttagccaactaccaggagattgtctttgcccggacatccccccagcagaagctgatcattgtggagggctgtcagaggcaggatgctgttgttgctgtgaccggggatggagttaatgactctccggctctaaagaaggcagacattgggattgccatggggatagcaggttctgatgcagccaaaaatgcagccgacatggtcttgctggacgacaacttcgcatccatcgtcacaggggtggaggaaggtcgcctgatctttgacaacctcaagaagactattgcttattccctgaccaagaacattgccgagctgtgcccctttctgatctacatcattgtcgggctccccctgcccattggcaccatcaccattctgttcattgacttggggacagacattatcccctccattgccttggcgtacgagaaagctgaaagtgacatcatgaacaggaagcctcgccacaagaataaggacaggctggtgaaccagccgctcgctgtgtactcatacctgcacattggcctcatgcaagccctgggagctttccttgtgtatttcaccgtctatgcacaagagggctttctgccccgcactctcattaacctgcgggtagaatgggagaaggactacgtgaatgacttgaaagacagctatgggcaggaatggacaaggtaccagagggaatacctagaatggacgggctacacggctttctttgttggcatcctagtccagcaaatagcagatctgatcatcaggaaaacccggaggaattccatcttccagcagggtctcttcagaaataaagtcatctgggtggggatcacctcacagatcatcattggtctgatcctctcctatggcctcggaagtgtcacagccttgagtttcaccatgcttagggctcagtactggtttgtggctgtgccgcacgccatcctgatctgggtgtatgatgaggtgcggaagctcttcatcaggctctaccctggaagctggtgggataagaacatgtattattaagaccacctcccttcctatgtctctcagcagcacgttggggcacacttgttcatcttctgaccgtttgctgggctattcccctgcagtgcagacatcgtcaaaattcagacaagaggaaattttcatgcagaaagctgtatgcaggatgctcactgatgttttgcactttaaaactgaaattcaactctttatataggattttcttttctatctccatctcctcattaaaaaatacgtacatttcgaggtaatggtatagggaagaatgtgtttatgtgtatttgaaactccttgatgttaatagtcttgtgtaacccaggcatctactggggcctgccttaagctctagctaggattgctcagaactcctttccacaccctattaaaggccccatgacctccctaagatttctgcagatcccctgagaaggtatgttttcatggtctccttgctcgaaaaaggccaactcacccgagggtctgcaggagatggaagtggcggcaggtttacatcacagcagcacgcatgacctcagctttgactcgtttaactctgagacgtccttcttgaaggcccttgccacagtttccctggccacgccaccccatcccacctctggtcatctccccagccctttatgccccgtcgccctccacccctacatcagctcctccaaaactgagctcccagttcattttgcatatcctaactcaaaatgctcagctaatccaaggggactttctttaccaggattcaaccctagtagagagctgttatggtttcaatagtcatatttatttcttgtaaaacagttgccaggtgctctccagcaataacgttttgtcagtcatgtttcatgttttaacttaggtgtattcatgtgtgacacttccatgttgacaggcccggaaaggcctcatttttaactaaaagatgttttataaacccaggtttaattgtggtgttctaa

SEQ ID NO: 109983 - DNA, 3654 bp, Homo sapiens
  Payload ID: 1590
  Gene Symbol: ATP1A1
  Gene Name: ATPase, Na+/K+ transporting, alpha 1 polypeptide
  Uniprot ID: P05023
  ENST ID: ENST00000295598
  CDS Start-End: 253-3324
ctggggcgcagagcagcggcgggaggaggcggacacgtggcaacagcggtagcagcccgggcggcggcagcaacagcggcggcggcatcggcccgagccgccggccgccctcccaccctcccgccccgcggcagccctagctccctccacttggctcccctggtcccgctcgctcggccgggagctgctctgtgcttttctctctgattctccagcgacaggacccggcgccgggcactgagcaccgccaccatggggaagggggttggacgtgataagtatgagcctgcagctgtttcagaacaaggtgataaaaagggcaaaaagggcaaaaaagacagggacatggatgaactgaagaaagaagtttctatggatgatcataaacttagccttgatgaacttcatcgtaaatatggaacagacttgagccggggattaacatctgctcgtgcagctgagatcctggcgcgagatggtcccaacgccctcactccccctcccactactcctgaatggatcaagttttgtcggcagctctttggggggttctcaatgttactgtggattggagcgattctttgtttcttggcttatagcatccaagctgctacagaagaggaacctcaaaacgataatctgtacctgggtgtggtgctatcagccgttgtaatcataactggttgcttctcctactatcaagaagctaaaagttcaaagatcatggaatccttcaaaaacatggtccctcagcaagcccttgtgattcgaaatggtgagaaaatgagcataaatgcggaggaagttgtggttggggatctggtggaagtaaaaggaggagaccgaattcctgctgacctcagaatcatatctgcaaatggctgcaaggtggataactcctcgctcactggtgaatcagaaccccagactaggtctccagatttcacaaatgaaaaccccctggagacgaggaacattgccttcttttcaaccaattgtgttgaaggcaccgcacgtggtattgttgtctacactggggatcgcactgtgatgggaagaattgccacacttgcttctgggctggaaggaggccagacccccattgctgcagaaattgaacattttatccacatcatcacgggtgtggctgtgttcctgggtgtgtctttcttcatcctttctctcatccttgagtacacctggcttgaggctgtcatcttcctcatcggtatcatcgtagccaatgtgccggaaggtttgctggccactgtcacggtctgtctgacacttactgccaaacgcatggcaaggaaaaactgcttagtgaagaacttagaagctgtggagaccttggggtccacgtccaccatctgctctgataaaactggaactctgactcagaaccggatgacagtggcccacatgtggtttgacaatcaaatccatgaagctgatacgacagagaatcagagtggtgtctcttttgacaagacttcagctacctggcttgctctgtccagaattgcaggtctttgtaacagggcagtgtttcaggctaaccaggaaaacctacctattcttaagcgggcagttgcaggagatgcctctgagtcagcactcttaaagtgcatagagctgtgctgtggttccgtgaaggagatgagagaaagatacgccaaaatcgtcgagatacccttcaactccaccaacaagtaccagttgtctattcataagaaccccaacacatcggagccccaacacctgttggtgatgaagggcgccccagaaaggatcctagaccgttgcagctctatcctcctccacggcaaggagcagcccctggatgaggagctgaaagacgcctttcagaacgcctatttggagctggggggcctcggagaacgagtcctaggtttctgccacctctttctgccagatgaacagtttcctgaagggttccagtttgacactgacgatgtgaatttccctatcgataatctgtgctttgttgggctcatctccatgattgaccctccacgggcggccgttcctgatgccgtgggcaaatgtcgaagtgctggaattaaggtcatcatggtcacaggagaccatccaatcacagctaaagctattgccaaaggtgtgggcatcatctcagaaggcaatgagaccgtggaagacattgctgcccgcctcaacatcccagtcagccaggtgaaccccagggatgccaaggcctgcgtagtacacggcagtgatctaaaggacatgacctccgagcagctggatgacattttgaagtaccacactgagatagtgtttgccaggacctcccctcagcagaagctcatcattgtggaaggctgccaaagacagggtgctatcgtggctgtgactggtgacggtgtgaatgactctccagctttgaagaaagcagacattggggttgctatggggattgctggctcagatgtgtccaagcaagctgctgacatgattcttctggatgacaactttgcctcaattgtgactggagtagaggaaggtcgtctgatctttgataacttgaagaaatccattgcttataccttaaccagtaacattcccgagatcaccccgttcctgatatttattattgcaaacattccactaccactggggactgtcaccatcctctgcattgacttgggcactgacatggttcctgccatctccctggcttatgagcaggctgagagtgacatcatgaagagacagcccagaaatcccaaaacagacaaacttgtgaatgagcggctgatcagcatggcctatgggcagattggaatgatccaggccctgggaggcttctttacttactttgtgattctggctgagaacggcttcctcccaattcacctgttgggcctccgagtggactgggatgaccgctggatcaacgatgtggaagacagctacgggcagcagtggacctatgagcagaggaaaatcgtggagttcacctgccacacagccttcttcgtcagtatcgtggtggtgcagtgggccgacttggtcatctgtaagaccaggaggaattcggtcttccagcaggggatgaagaacaagatcttgatatttggcctctttgaagagacagccctggctgctttcctttcctactgccctggaatgggtgttgctcttaggatgtatcccctcaaacctacctggtggttctgtgccttcccctactctcttctcatcttcgtatatgacgaagtcagaaaactcatcatcaggcgacgccctggcggctgggtggagaaggaaacctactattagccccccgtcctgcacgccgtggagcatcaggccacacactctgcatccgacacccaccccctctttgtgtacttcagtcttggagtttggaactctaccctggtaggaaagcaccgcagcatgtggggaagcaagacgtcctggaatgaagcatgtagctctatggggggaggggggagggctgcctgaaaaccatccatctgtggaaatgacagcggggaaggtttttatgtgcctttttgtttttgtaaaaaaggaacacccggaaagactgaaagaatacattttatatctggatttttacaaataaagatggctattataatggaa

SEQ ID NO: 109984 - DNA, 698 bp, Homo sapiens
  Payload ID: 1590
  Gene Symbol: ATP1A1
  Gene Name: ATPase, Na+/K+ transporting, alpha 1 polypeptide
  ENST ID: ENST00000369494
  CDS Start-End: 265-698
caagagctgtaccgaaagaggcaccaacaaatgtggttgctccataatggagagaatgtcaagaatgttgactatctttagacctgcttcattaatagataagatagaaactaaagaacccacccagttggaagaagttattagtcaagtagtgctgcacacgtgaccacagaagttaaaaaggttggacgtgataagtatgagcctgcagctgtttcagaacaaggtgataaaaagggcaaaaagggcaaaaaagacagggacatggatgaactgaagaaagaagtttctatggatgatcataaacttagccttgatgaacttcatcgtaaatatggaacagacttgagccggggattaacatctgctcgtgcagctgagatcctggcgcgagatggtcccaacgccctcactccccctcccactactcctgaatggatcaagttttgtcggcagctctttggggggttctcaatgttactgtggattggagcgattctttgtttcttggcttatagcatccaagctgctacagaagaggaacctcaaaacgataatctgtacctgggtgtggtgctatcagccgttgtaatcataactggttgcttctcctactatcaagaagctaaaagttcaaagatcatggaatccttcaaaaacatggtccctcagcaagcccttgtgattcgaaatggtga

SEQ ID NO: 109985 - DNA, 3572 bp, Homo sapiens
  Payload ID: 1590
  Gene Symbol: ATP1A1
  Gene Name: ATPase, Na+/K+ transporting, alpha 1 polypeptide
  Uniprot ID: P05023
  ENST ID: ENST00000369496
  CDS Start-End: 266-3244
gatatgtaataatgtctttgcaaagcaaagaatataaacagtataaaagtactagcatttagatgtattgtatcatttaatccttaaaaacatgaaatgaggttggcactattctttatctccacgctgtggaagaggaaattgaaatgtagaagttagtaacttgcctaaggatacactgctggttggacgtgataagtatgagcctgcagctgtttcagaacaaggtgataaaaagggcaaaaagggcaaaaaagacagggacatggatgaactgaagaaagaagtttctatggatgatcataaacttagccttgatgaacttcatcgtaaatatggaacagacttgagccggggattaacatctgctcgtgcagctgagatcctggcgcgagatggtcccaacgccctcactccccctcccactactcctgaatggatcaagttttgtcggcagctctttggggggttctcaatgttactgtggattggagcgattctttgtttcttggcttatagcatccaagctgctacagaagaggaacctcaaaacgataatctgtacctgggtgtggtgctatcagccgttgtaatcataactggttgcttctcctactatcaagaagctaaaagttcaaagatcatggaatccttcaaaaacatggtccctcagcaagcccttgtgattcgaaatggtgagaaaatgagcataaatgcggaggaagttgtggttggggatctggtggaagtaaaaggaggagaccgaattcctgctgacctcagaatcatatctgcaaatggctgcaaggtggataactcctcgctcactggtgaatcagaaccccagactaggtctccagatttcacaaatgaaaaccccctggagacgaggaacattgccttcttttcaaccaattgtgttgaaggcaccgcacgtggtattgttgtctacactggggatcgcactgtgatgggaagaattgccacacttgcttctgggctggaaggaggccagacccccattgctgcagaaattgaacattttatccacatcatcacgggtgtggctgtgttcctgggtgtgtctttcttcatcctttctctcatccttgagtacacctggcttgaggctgtcatcttcctcatcggtatcatcgtagccaatgtgccggaaggtttgctggccactgtcacggtctgtctgacacttactgccaaacgcatggcaaggaaaaactgcttagtgaagaacttagaagctgtggagaccttggggtccacgtccaccatctgctctgataaaactggaactctgactcagaaccggatgacagtggcccacatgtggtttgacaatcaaatccatgaagctgatacgacagagaatcagagtggtgtctcttttgacaagacttcagctacctggcttgctctgtccagaattgcaggtctttgtaacagggcagtgtttcaggctaaccaggaaaacctacctattcttaagcgggcagttgcaggagatgcctctgagtcagcactcttaaagtgcatagagctgtgctgtggttccgtgaaggagatgagagaaagatacgccaaaatcgtcgagatacccttcaactccaccaacaagtaccagttgtctattcataagaaccccaacacatcggagccccaacacctgttggtgatgaagggcgccccagaaaggatcctagaccgttgcagctctatcctcctccacggcaaggagcagcccctggatgaggagctgaaagacgcctttcagaacgcctatttggagctggggggcctcggagaacgagtcctaggtttctgccacctctttctgccagatgaacagtttcctgaagggttccagtttgacactgacgatgtgaatttccctatcgataatctgtgctttgttgggctcatctccatgattgaccctccacgggcggccgttcctgatgccgtgggcaaatgtcgaagtgctggaattaaggtcatcatggtcacaggagaccatccaatcacagctaaagctattgccaaaggtgtgggcatcatctcagaaggcaatgagaccgtggaagacattgctgcccgcctcaacatcccagtcagccaggtgaaccccagggatgccaaggcctgcgtagtacacggcagtgatctaaaggacatgacctccgagcagctggatgacattttgaagtaccacactgagatagtgtttgccaggacctcccctcagcagaagctcatcattgtggaaggctgccaaagacagggtgctatcgtggctgtgactggtgacggtgtgaatgactctccagctttgaagaaagcagacattggggttgctatggggattgctggctcagatgtgtccaagcaagctgctgacatgattcttctggatgacaactttgcctcaattgtgactggagtagaggaaggtcgtctgatctttgataacttgaagaaatccattgcttataccttaaccagtaacattcccgagatcaccccgttcctgatatttattattgcaaacattccactaccactggggactgtcaccatcctctgcattgacttgggcactgacatggttcctgccatctccctggcttatgagcaggctgagagtgacatcatgaagagacagcccagaaatcccaaaacagacaaacttgtgaatgagcggctgatcagcatggcctatgggcagattggaatgatccaggccctgggaggcttctttacttactttgtgattctggctgagaacggcttcctcccaattcacctgttgggcctccgagtggactgggatgaccgctggatcaacgatgtggaagacagctacgggcagcagtggacctatgagcagaggaaaatcgtggagttcacctgccacacagccttcttcgtcagtatcgtggtggtgcagtgggccgacttggtcatctgtaagaccaggaggaattcggtcttccagcaggggatgaagaacaagatcttgatatttggcctctttgaagagacagccctggctgctttcctttcctactgccctggaatgggtgttgctcttaggatgtatcccctcaaacctacctggtggttctgtgccttcccctactctcttctcatcttcgtatatgacgaagtcagaaaactcatcatcaggcgacgccctggcggctgggtggagaaggaaacctactattagccccccgtcctgcacgccgtggagcatcaggccacacactctgcatccgacacccaccccctctttgtgtacttcagtcttggagtttggaactctaccctggtaggaaagcaccgcagcatgtggggaagcaagacgtcctggaatgaagcatgtagctctatggggggaggggggagggctgcctgaaaaccatccatctgtggaaatgacagcggggaaggtttttatgtgcctttttgtttttgtaaaaaaggaacacccggaaagactgaaagaatacattttatatctggatttttacaaataaagatggctattataatgg

SEQ ID NO: 109986 - DNA, 579 bp, Homo sapiens
  Payload ID: 1590
  Gene Symbol: ATP1A1
  Gene Name: ATPase, Na+/K+ transporting, alpha 1 polypeptide
  ENST ID: ENST00000440951
  CDS Start-End: 1-474
agacagcccagaaatcccaaaacagacaaacttgtgaatgagcggctgatcagcatggcctatgggcagattggaatgatccaggccctgggaggcttctttacttactttgtgattctggctgagaacggcttcctcccaattcacctgttgggcctccgagtggactgggatgaccgctggatcaacgatgtggaagacagctacgggcagcagtggacctatgagcagaggaaaatcgtggagttcacctgccacacagccttcttcgtcagtatcgtggtggtgcagtgggccgacttggtcatctgtaagaccaggaggaattcggtcttccagcaggggatgaagaacaagatcttgatatttggcctctttgaagagacagccctggctgctttcctttcctactgccctggaatgggtgttgctcttaggatgtatcccctcaagactctgacgcagtacagttaatctgtgcacaggaaagaagagctgtttgaagaggttattcggtaaatgcagagaatgtctttgtagtataaattattgctctatataaaactgcttgtaagtttt

SEQ ID NO: 109987 - DNA, 654 bp, Homo sapiens
  Payload ID: 1590
  Gene Symbol: ATP1A1
  Gene Name: ATPase, Na+/K+ transporting, alpha 1 polypeptide
  ENST ID: ENST00000418797
  CDS Start-End: 336-654
agcgcccggggaggccatccgcaggtgggcgcggggcctggattccacagaggggcggagtccctcagtcaggcgctggctgcaatcacacccgagcgccagccccctccagcatccctgagtcccagaggagatcgccgaagcgctggaaaagccgttccgcccacgacttctggtgccgggtcggcggcgactgggggagcccagttccgagaccgtaccgcacccactgcggacctcctgggccctacatagttggacgtgataagtatgagcctgcagctgtttcagaacaaggtgataaaaagggcaaaaagggcaaaaaagacagggacatggatgaactgaagaaagaagtttctatggatgatcataaacttagccttgatgaacttcatcgtaaatatggaacagacttgagccggggattaacatctgctcgtgcagctgagatcctggcgcgagatggtcccaacgccctcactccccctcccactactcctgaatggatcaagttttgtcggcagctctttggggggttctcaatgttactgtggattggagcgattctttgtttcttggcttatagcatccaagctgctacagaagaggaacctcaaaacgataatctgtacctgggtgtggtgctatcag

SEQ ID NO: 109988 - DNA, 3763 bp, Homo sapiens
  Payload ID: 1590
  Gene Symbol: ATP1A1
  Gene Name: ATPase, Na+/K+ transporting, alpha 1 polypeptide
  Uniprot ID: P05023
  ENST ID: ENST00000537345
  CDS Start-End: 364-3435
agcagcgggggcggccccgggactgagccggcatccctgagcctggctcccctccctgcgaccgccgtcacctccttctccttccttttccctccgccctccgtgccctgaggaaaggcgcgctcctccccttcccctggggcgctccgccggggcctcctcccgggcctccgttcccgccgcggccccggttccggcgggggcagcctccgggttcggggctccttctcctggggacgctggggcttagcttgctccgcgcagaggcggccgccctcccccaaagaaaaaactggctgcttctaagtgcgaagccggctgggcgggctggtgccagaaagggtgtgtcttcactgccctaagatggcctttaaggttggacgtgataagtatgagcctgcagctgtttcagaacaaggtgataaaaagggcaaaaagggcaaaaaagacagggacatggatgaactgaagaaagaagtttctatggatgatcataaacttagccttgatgaacttcatcgtaaatatggaacagacttgagccggggattaacatctgctcgtgcagctgagatcctggcgcgagatggtcccaacgccctcactccccctcccactactcctgaatggatcaagttttgtcggcagctctttggggggttctcaatgttactgtggattggagcgattctttgtttcttggcttatagcatccaagctgctacagaagaggaacctcaaaacgataatctgtacctgggtgtggtgctatcagccgttgtaatcataactggttgcttctcctactatcaagaagctaaaagttcaaagatcatggaatccttcaaaaacatggtccctcagcaagcccttgtgattcgaaatggtgagaaaatgagcataaatgcggaggaagttgtggttggggatctggtggaagtaaaaggaggagaccgaattcctgctgacctcagaatcatatctgcaaatggctgcaaggtggataactcctcgctcactggtgaatcagaaccccagactaggtctccagatttcacaaatgaaaaccccctggagacgaggaacattgccttcttttcaaccaattgtgttgaaggcaccgcacgtggtattgttgtctacactggggatcgcactgtgatgggaagaattgccacacttgcttctgggctggaaggaggccagacccccattgctgcagaaattgaacattttatccacatcatcacgggtgtggctgtgttcctgggtgtgtctttcttcatcctttctctcatccttgagtacacctggcttgaggctgtcatcttcctcatcggtatcatcgtagccaatgtgccggaaggtttgctggccactgtcacggtctgtctgacacttactgccaaacgcatggcaaggaaaaactgcttagtgaagaacttagaagctgtggagaccttggggtccacgtccaccatctgctctgataaaactggaactctgactcagaaccggatgacagtggcccacatgtggtttgacaatcaaatccatgaagctgatacgacagagaatcagagtggtgtctcttttgacaagacttcagctacctggcttgctctgtccagaattgcaggtctttgtaacagggcagtgtttcaggctaaccaggaaaacctacctattcttaagcgggcagttgcaggagatgcctctgagtcagcactcttaaagtgcatagagctgtgctgtggttccgtgaaggagatgagagaaagatacgccaaaatcgtcgagatacccttcaactccaccaacaagtaccagttgtctattcataagaaccccaacacatcggagccccaacacctgttggtgatgaagggcgccccagaaaggatcctagaccgttgcagctctatcctcctccacggcaaggagcagcccctggatgaggagctgaaagacgcctttcagaacgcctatttggagctggggggcctcggagaacgagtcctaggtttctgccacctctttctgccagatgaacagtttcctgaagggttccagtttgacactgacgatgtgaatttccctatcgataatctgtgctttgttgggctcatctccatgattgaccctccacgggcggccgttcctgatgccgtgggcaaatgtcgaagtgctggaattaaggtcatcatggtcacaggagaccatccaatcacagctaaagctattgccaaaggtgtgggcatcatctcagaaggcaatgagaccgtggaagacattgctgcccgcctcaacatcccagtcagccaggtgaaccccagggatgccaaggcctgcgtagtacacggcagtgatctaaaggacatgacctccgagcagctggatgacattttgaagtaccacactgagatagtgtttgccaggacctcccctcagcagaagctcatcattgtggaaggctgccaaagacagggtgctatcgtggctgtgactggtgacggtgtgaatgactctccagctttgaagaaagcagacattggggttgctatggggattgctggctcagatgtgtccaagcaagctgctgacatgattcttctggatgacaactttgcctcaattgtgactggagtagaggaaggtcgtctgatctttgataacttgaagaaatccattgcttataccttaaccagtaacattcccgagatcaccccgttcctgatatttattattgcaaacattccactaccactggggactgtcaccatcctctgcattgacttgggcactgacatggttcctgccatctccctggcttatgagcaggctgagagtgacatcatgaagagacagcccagaaatcccaaaacagacaaacttgtgaatgagcggctgatcagcatggcctatgggcagattggaatgatccaggccctgggaggcttctttacttactttgtgattctggctgagaacggcttcctcccaattcacctgttgggcctccgagtggactgggatgaccgctggatcaacgatgtggaagacagctacgggcagcagtggacctatgagcagaggaaaatcgtggagttcacctgccacacagccttcttcgtcagtatcgtggtggtgcagtgggccgacttggtcatctgtaagaccaggaggaattcggtcttccagcaggggatgaagaacaagatcttgatatttggcctctttgaagagacagccctggctgctttcctttcctactgccctggaatgggtgttgctcttaggatgtatcccctcaaacctacctggtggttctgtgccttcccctactctcttctcatcttcgtatatgacgaagtcagaaaactcatcatcaggcgacgccctggcggctgggtggagaaggaaacctactattagccccccgtcctgcacgccgtggagcatcaggccacacactctgcatccgacacccaccccctctttgtgtacttcagtcttggagtttggaactctaccctggtaggaaagcaccgcagcatgtggggaagcaagacgtcctggaatgaagcatgtagctctatggggggaggggggagggctgcctgaaaaccatccatctgtggaaatgacagcggggaaggtttttatgtgcctttttgtttttgtaaaaaaggaacacccggaaagactgaaagaatacattttatatctggatttttacaaataaagatggctattataatgg

SEQ ID NO: 109989 - DNA, 5421 bp, Homo sapiens
  Payload ID: 1591
  Gene Symbol: ATP1A2
  Gene Name: ATPase, Na+/K+ transporting, alpha 2 polypeptide
  Uniprot ID: P50993
  ENST ID: ENST00000361216
  CDS Start-End: 90-3152
gtctccgactgtcccagacgggctggtgtgggcttgggatcctcctggtgacctctcccgctaaggtccctcagccactctgccccaagatgggccgtggggctggccgtgagtactcacctgccgccaccacggcagagaatgggggcggcaagaagaaacagaaggagaaggaactggatgagctgaagaaggaggtggcaatggatgaccacaagctgtccttggatgagctgggccgcaaataccaagtggacctgtccaagggcctcaccaaccagcgggctcaggacgttctggctcgagatgggcccaacgccctcacaccacctcccacaacccctgagtgggtcaagttctgccgtcagcttttcggggggttctccatcctgctgtggattggggctatcctctgcttcctggcctacggcatccaggctgccatggaggatgaaccatccaacgacaatctatatctgggtgtggtgctggcagctgtggtcattgtcactggctgcttctcctactaccaggaggccaagagctccaagatcatggattccttcaagaacatggtacctcagcaagcccttgtgatccgggagggagagaagatgcagatcaacgcagaggaagtggtggtgggagacctggtggaggtgaagggtggagaccgcgtccctgctgacctccggatcatctcttctcatggctgtaaggtggataactcatccttaacaggagagtcggagccccagacccgctcccccgagttcacccatgagaaccccctggagacccgcaatatctgtttcttctccaccaactgtgttgaaggcactgccaggggcattgtgattgccacaggagaccggacggtgatgggccgcatagctactctcgcctcaggcctggaggttgggcggacacccatagcaatggagattgaacacttcatccagctgatcacaggggtcgctgtattcctgggggtctccttcttcgtgctctccctcatcctgggctacagctggctggaggcagtcatcttcctcatcggcatcatagtggccaacgtgcctgaggggcttctggccactgtcactgtgtgcctgaccctgacagccaagcgcatggcacggaagaactgcctggtgaagaacctggaggcggtggagacgctgggctccacgtccaccatctgctcggacaagacgggcaccctcacccagaaccgcatgaccgtcgcccacatgtggttcgacaaccaaatccatgaggctgacaccaccgaagatcagtctggggccacttttgacaaacgatcccctacgtggacggccctgtctcgaattgctggtctctgcaaccgcgccgtcttcaaggcaggacaggagaacatctccgtgtctaagcgggacacagctggtgatgcctctgagtcagctctgctcaagtgcattgagctctcctgtggctcagtgaggaaaatgagagacagaaaccccaaggtggcagagattcctttcaactctaccaacaagtaccagctgtctatccacgagcgagaagacagcccccagagccacgtgctggtgatgaagggggccccagagcgcattctggaccggtgctccaccatcctggtgcagggcaaggagatcccgctcgacaaggagatgcaagatgcctttcaaaatgcctacatggagctggggggacttggggagcgtgtgctgggattctgtcaactgaatctgccatctggaaagtttcctcggggcttcaaattcgacacggatgagctgaactttcccacggagaagctttgctttgtggggctcatgtctatgattgaccctccccgggctgctgtgccagatgctgtgggcaagtgccgaagcgcaggcatcaaggtgatcatggtaaccggggatcaccctatcacagccaaggccattgccaaaggcgtgggcatcatatcagagggtaacgagactgtggaggacattgcagcccggctcaacattcccatgagtcaagtcaaccccagagaagccaaggcatgcgtggtgcacggctctgacctgaaggacatgacatcggagcagctcgatgagatcctcaagaaccacacagagatcgtctttgctcgaacgtctccccagcagaagctcatcattgtggagggatgtcagaggcagggagccattgtggccgtgacgggtgacggggtgaacgactcccctgcattgaagaaggctgacattggcattgccatgggcatctctggctctgacgtctctaagcaggcagccgacatgatcctgctggatgacaactttgcctccatcgtcacgggggtggaggagggccgcctgatctttgacaacttgaagaaatccatcgcctacaccctgaccagcaacatccccgagatcacccccttcctgctgttcatcattgccaacatccccctacctctgggcactgtgaccatcctttgcattgacctgggcacagatatggtccctgccatctccttggcctatgaggcagctgagagtgatatcatgaagcggcagccacgaaactcccagacggacaagctggtgaatgagaggctcatcagcatggcctacggacagatcgggatgatccaggcactgggtggcttcttcacctactttgtgatcctggcagagaacggtttcctgccatcacggctactgggaatccgcctcgactgggatgaccggaccatgaatgatctggaggacagctatggacaggagtggacctatgagcagcggaaggtggtggagttcacgtgccacacggcattctttgccagcatcgtggtggtgcagtgggctgacctcatcatctgcaagacccgccgcaactcagtcttccagcagggcatgaagaacaagatcctgatttttgggctcctggaggagacggcgttggctgcctttctctcttactgcccaggcatgggtgtagccctccgcatgtacccgctcaaagtcacctggtggttctgcgccttcccctacagcctcctcatcttcatctatgatgaggtccgaaagctcatcctgcggcggtatcctggtggctgggtggagaaggagacatactactgaccccattggaagaagaaccaggcatggaaagatggggagctctggaggtgttgtggggatggtgatggagagggatggaaataacgggtggcattgggtggcaacatttggggagagataatgaggcaactcagcaggctaagttgcggggtatataaattggggtgatgaccccatagacctaactgtgaacaatcagattagacactatgtgttagagtccccccgaccagatccttttccatcccactccactatgttgtctattttttctgaggaattaagggttaccccaccctgcccactcccatcccttcaaccccacttcctactgtaatagatcagcatccaaaagcaggaacccatctaaaccagaaggaagccctctcagatcaccccagcctcactccatttcccacttccacccccgttagcttcctgcaggactctatccctggcttccccttcagaccttgcaatcacaaaaggttcttctggtgagtgcaagagcctgagactggaaaaggtggacttgtctcccagtcgaggctggtaagggaccttcagggagagctgggcagacaggtgggagatggaggtagggctggctggaggaaggaaacaacaaaggaagtgaggtagtgccaatgacaggacatttgacatgagtctccagatagatgtcgtggactccagctctacgtcccacattttagaataccccaccagcagaacaaactcagatctcatcagggtagcagcagaggcaggaccagaaggcaatcaagagcttccagaaatgccacacttgtgtgccacagagttccccgctgacccttggttaggggtcctcttagtccacaaggtccggatgtcactcatgtacttaataacacttcaccttctgtaatactaagtcctcagagctccatgctgttctgaaagggatggccacaagttctttcccagcctcttccattccctttcttttcatgcccatcccgatgaacctgcatcattccccgacactgccaagccaaccctggaaaaggagttcgctggccattggctagaatcagggtggagaagttccctgaaccttcctgtctcccagggacatgtatgcttccagggacaagcttaggtcatgaacatggtcagaacctttggacaagaggaaaaatactaagagatttgctttttctgggtgcggtggctcatgcctgtaatcccagcactttgggaggccgaggcaggtggatcatgaggtcaggagttcgaggcgagcctggccaacatggtgaaaccctgtctctactaaaagtacaaaaaattagccagtcatggtggcacacgcctgtaatctcagctactcaggaggctgaggcaggagaattgcttgaacctgtgaggaagaggttgcagtgagctgagatcgtgccattacactccagcctgggcgaaagggtgagactccatctcaaaaaaaaaaaaaatgatttgcttttgacgtcttaggtggcagggctgttccctccaggcaaatgcccttcaaaccgacgatcattgtgcccacttaccctgggctggagagttggtttcaggttcctacaggagatagctttctttcccttactccctatctaacacttttgctctgcaggcagccttgcccattctctaagcctggcttagaaggcactgggaatgtcctgtagagagagacctagataggtcatgcaagtgagaaagacatctgaggaaaatggaagacctaaggcagacaggaaggaagcacaaaagacaagcattgggtcagacccataaaccacctcccaaaggctgtcatttcattgcactggaattttgctttatcagaagcaaggaagtaagggagtcattgccttgggcctgggaatctaagtgggagacaatattaatttggatccgattaattggagattactaactgtggacaaaagtttatctttgcacaatcaataaaaatggcatttttttagtaaattaagagcataaacaatattgctagaggtggcatgtttagtctaccaaaaacaatacttttcaggcactttagaaatatccttttagaagcagcgagtgcatgggctaattatcatcaatctttatgtatttgttaaagaaacatctacaggatctttattggtgaccttttgtaagacattagtttgaggtactacctatgtacttgaaaataataaagtggcatttctttatgaaaaaaaaa

SEQ ID NO: 109990 - DNA, 3338 bp, Homo sapiens
  Payload ID: 1591
  Gene Symbol: ATP1A2
  Gene Name: ATPase, Na+/K+ transporting, alpha 2 polypeptide
  ENST ID: ENST00000392233
  CDS Start-End: 86-3115
ccgactgtcccagacgggctggtgtgggcttgggatcctcctggtgacctctcccgctaaggtccctcagccactctgccccaagatgggccgtggggctggccgtgagtactcacctgccgccaccacggcagagaatgggggcggcaagaagaaacagaaggagaaggaactggatgagctgaagaaggaggtggcaatggatgaccacaagctgtccttggatgagctgggccgcaaataccaagtggacctgtccaagggcctcaccaaccagcgggctcaggacgttctggctcgagatgggcccaacgccctcacaccacctcccacaacccctgagtgggtcaagttctgccgtcagcttttcggggggttctccatcctgctgtggattggggctatcctctgcttcctggcctacggcatccaggctgccatggaggatgaaccatccaacgacaatctatatctgggtgtggtgctggcagctgtggtcattgtcactggctgcttctcctactaccaggaggccaagagctccaagatcatggattccttcaagaacatggtacctcagcaagcccttgtgatccgggagggagagaagatgcagatcaacgcagaggaagtggtggtgggagacctggtggaggtgaagggtggagaccgcgtccctgctgacctccggatcatctcttctcatggctgtaaggtggataactcatccttaacaggagagtcggagccccagacccgctcccccgagttcacccatgagaaccccctggagacccgcaatatctgtttcttctccaccaactgtgttgaaggcactgccaggggcattgtgattgccacaggagaccggacggtgatgggccgcatagctactctcgcctcaggcctggaggttgggcggacacccatagcaatggagattgaacacttcatccagctgatcacaggggtcgctgtattcctgggggtctccttcttcgtgctctccctcatcctgggctacagctggctggaggcagtcatcttcctcatcggcatcatagtggccaacgtgcctgaggggcttctggccactgtcactgtgtgcctgaccctgacagccaagcgcatggcacggaagaactgcctggtgaagaacctggaggcggtggagacgctgggctccacgtccaccatctgctcggacaagacgggcaccctcacccagaaccgcatgaccgtcgcccacatgtggttcgacaaccaaatccatgaggctgacaccaccgaagatcagtctggggccacttttgacaaacgatcccctacgtggacggccctgtctcgaattgctggtctctgcaaccgcgccgtcttcaaggcaggacaggagaacatctccgtgtctaagcgggacacagctggtgatgcctctgagtcagctctgctcaagtgcattgagctctcctgtggctcagtgaggaaaatgagagacagaaaccccaaggtggcagagattcctttcaactctaccaacaagtaccagctgtctatccacgagcgagaagacagcccccagagccacgtgctggtgatgaagggggccccagagcgcattctggaccggtgctccaccatcctggtgcagggcaaggagatcccgctcgacaaggagatgcaagatgcctttcaaaatgcctacatggagctggggggacttggggagcgtgtgctgggattctgtcaactgaatctgccatctggaaagtttcctcggggcttcaaattcgacacggatgagctgaactttcccacggagaagctttgctttgtggggctcatgtctatgattgaccctccccgggctgctgtgccagatgctgtgggcaagtgccgaagcgcaggcatcaaggtgatcatggtaaccggggatcaccctatcacagccaaggccattgccaaaggcgtgggcatcatatcagagggtaacgagactgtggaggacattgcagcccggctcaacattcccatgagtcaagtcaaccccagagaagccaaggcatgcgtggtgcacggctctgacctgaaggacatgacatcggagcagctcgatgagatcctcaagaaccacacagagatcgtctttgctcgaacgtctccccagcagaagctcatcattgtggagggatgtcagaggcagggagccattgtggccgtgacgggtgacggggtgaacgactcccctgcattgaagaaggctgacattggcattgccatgggcatctctggctctgacgtctctaagcaggcagccgacatgatcctgctggatgacaactttgcctccatcgtcacgggggtggaggagggccgcctgatctttgacaacttgaagaaatccatcgcctacaccctgaccagcaacatccccgagatcacccccttcctgctgttcatcattgccaacatccccctacctctgggcactgtgaccatcctttgcattgacctgggcacagatatggtccctgccatctccttggcctatgaggcagctgagagtgatatcatgaagcggcagccacgaaactcccagacggacaagctggtgaatgagaggctcatcagcatggcctacggacagatcgggatgatccaggcactgggtggcttcttcacctactttgtgatcctggcagagaacggtttcctgccatcacggctactgggaatccgcctcgactgggatgaccggaccatgaatgatctggaggacagctatggacaggagtggacctatgagcagcggaaggtggtggagttcacgtgccacacggcattctttgccagcatcgtggtggtgcagtgggctgacctcatcatctgcaagacccgccgcaactcagtcttccagcagggcatgaagaacaagatcctgatttttgggctcctggaggagacggcgttggctgcctttctctcttactgcccaggcatgggtgtagccctccgcatgtacccgctcaacctcctcatcttcatctatgatgaggtccgaaagctcatcctgcggcggtatcctggtggctgggtggagaaggagacatactactgaccccattggaagaagaaccaggcatggaaagatggggagctctggaggtgttgtggggatggtgatggagagggatggaaataacgggtggcattgggtggcaacatttggggagagataatgaggcaactcagcaggctaagttgcggggtatataaattggggtgatgaccccatagacctaactgtgaacaatcagattagacactatgtgttagagtcc

SEQ ID NO: 109991 - DNA, 4413 bp, Homo sapiens
  Payload ID: 1591
  Gene Symbol: ATP1A2
  Gene Name: ATPase, Na+/K+ transporting, alpha 2 polypeptide
  ENST ID: ENST00000447527
  CDS Start-End: 1-2144
tccagctgatcacaggggtcgctgtattcctgggggtctccttcttcgtgctctccctcatcctgggctacagctggctggaggcagtcatcttcctcatcggcatcatagtggccaacgtgcctgaggggcttctggccactgtcactgtgtgcctgaccctgacagccaagcgcatggcacggaagaactgcctggtgaagaacctggaggcggtggagacgctgggctccacgtccaccatctgctcggacaagacgggcaccctcacccagaaccgcatgaccgtcgcccacatgtggttcgacaaccaaatccatgaggctgacaccaccgaagatcagtctggggccacttttgacaaacgatcccctacgtggacggccctgtctcgaattgctggtctctgcaaccgcgccgtcttcaaggcaggacaggagaacatctccgtgtctaagcgggacacagctggtgatgcctctgagtcagctctgctcaagtgcattgagctctcctgtggctcagtgaggaaaatgagagacagaaaccccaaggtggcagagattcctttcaactctaccaacaagtaccagctgtctatccacgagcgagaagacagcccccagagccacgtgctggtgatgaagggggccccagagcgcattctggaccggtgctccaccatcctggtgcagggcaaggagatcccgctcgacaaggagatgcaagatgcctttcaaaatgcctacatggagctggggggacttggggagcgtgtgctgggattctgtcaactgaatctgccatctggaaagtttcctcggggcttcaaattcgacacggatgagctgaactttcccacggagaagctttgctttgtggggctcatgtctatgattgaccctccccgggctgctgtgccagatgctgtgggcaagtgccgaagcgcaggcatcaaggtgatcatggtaaccggggatcaccctatcacagccaaggccattgccaaaggcgtgggcatcatatcagagggtaacgagactgtggaggacattgcagcccggctcaacattcccatgagtcaagtcaaccccagagaagccaaggcatgcgtggtgcacggctctgacctgaaggacatgacatcggagcagctcgatgagatcctcaagaaccacacagagatcgtctttgctcgaacgtctccccagcagaagctcatcattgtggagggatgtcagaggcagggagccattgtggccgtgacgggtgacggggtgaacgactcccctgcattgaagaaggctgacattggcattgccatgggcatctctggctctgacgtctctaagcaggcagccgacatgatcctgctggatgacaactttgcctccatcgtcacgggggtggaggagggccgcctgatctttgacaacttgaagaaatccatcgcctacaccctgaccagcaacatccccgagatcacccccttcctgctgttcatcattgccaacatccccctacctctgggcactgtgaccatcctttgcattgacctgggcacagatatggtccctgccatctccttggcctatgaggcagctgagagtgatatcatgaagcggcagccacgaaactcccagacggacaagctggtgaatgagaggctcatcagcatggcctacggacagatcgagaacggtttcctgccatcacggctactgggaatccgcctcgactgggatgaccggaccatgaatgatctggaggacagctatggacaggagtggacctatgagcagcggaaggtggtggagttcacgtgccacacggcattctttgccagcatcgtggtggtgcagtgggctgacctcatcatctgcaagacccgccgcaactcagtcttccagcagggcatgaagaacaagatcctgatttttgggctcctggaggagacggcgttggctgcctttctctcttactgcccaggcatgggtgtagccctccgcatgtacccgctcaaagtcacctggtggttctgcgccttcccctacagcctcctcatcttcatctatgatgaggtccgaaagctcatcctgcggcggtatcctggtggctgggtggagaaggagacatactactgaccccattggaagaagaaccaggcatggaaagatggggagctctggaggtgttgtggggatggtgatggagagggatggaaataacgggtggcattgggtggcaacatttggggagagataatgaggcaactcagcaggctaagttgcggggtatataaattggggtgatgaccccatagacctaactgtgaacaatcagattagacactatgtgttagagtccccccgaccagatccttttccatcccactccactatgttgtctattttttctgaggaattaagggttaccccaccctgcccactcccatcccttcaaccccacttcctactgtaatagatcagcatccaaaagcaggaacccatctaaaccagaaggaagccctctcagatcaccccagcctcactccatttcccacttccacccccgttagcttcctgcaggactctatccctggcttccccttcagaccttgcaatcacaaaaggttcttctggtgagtgcaagagcctgagactggaaaaggtggacttgtctcccagtcgaggctggtaagggaccttcagggagagctgggcagacaggtgggagatggaggtagggctggctggaggaaggaaacaacaaaggaagtgaggtagtgccaatgacaggacatttgacatgagtctccagatagatgtcgtggactccagctctacgtcccacattttagaataccccaccagcagaacaaactcagatctcatcagggtagcagcagaggcaggaccagaaggcaatcaagagcttccagaaatgccacacttgtgtgccacagagttccccgctgacccttggttaggggtcctcttagtccacaaggtccggatgtcactcatgtacttaataacacttcaccttctgtaatactaagtcctcagagctccatgctgttctgaaagggatggccacaagttctttcccagcctcttccattccctttcttttcatgcccatcccgatgaacctgcatcattccccgacactgccaagccaaccctggaaaaggagttcgctggccattggctagaatcagggtggagaagttccctgaaccttcctgtctcccagggacatgtatgcttccagggacaagcttaggtcatgaacatggtcagaacctttggacaagaggaaaaatactaagagatttgctttttctgggtgcggtggctcatgcctgtaatcccagcactttgggaggccgaggcaggtggatcatgaggtcaggagttcgaggcgagcctggccaacatggtgaaaccctgtctctactaaaagtacaaaaaattagccagtcatggtggcacacgcctgtaatctcagctactcaggaggctgaggcaggagaattgcttgaacctgtgaggaagaggttgcagtgagctgagatcgtgccattacactccagcctgggcgaaagggtgagactccatctcaaaaaaaaaaaaaatgatttgcttttgacgtcttaggtggcagggctgttccctccaggcaaatgcccttcaaaccgacgatcattgtgcccacttaccctgggctggagagttggtttcaggttcctacaggagatagctttctttcccttactccctatctaacacttttgctctgcaggcagccttgcccattctctaagcctggcttagaaggcactgggaatgtcctgtagagagagacctagataggtcatgcaagtgagaaagacatctgaggaaaatggaagacctaaggcagacaggaaggaagcacaaaagacaagcattgggtcagacccataaaccacctcccaaaggctgtcatttcattgcactggaattttgctttatcagaagcaaggaagtaagggagtcattgccttgggcctgggaatctaagtgggagacaatattaatttggatccgattaattggagattactaactgtggacaaaagtttatctttgcacaatcaataaaaatggcatttttttagtaaattaagagcataaacaatattgctagaggtggcatgtttagtctaccaaaaacaatacttttcaggcactttagaaatatccttttagaagcagcgagtgcatgggctaattatcatcaatctttatgtatttgttaaagaaacatctacaggatctttattggtgaccttttgtaagacattagtttgaggtactacctatgtacttgaaaataataaagtggcatttctttatgaaaaaaaaa

SEQ ID NO: 109992 - DNA, 3597 bp, Homo sapiens
  Payload ID: 1592
  Gene Symbol: ATP1A3
  Gene Name: ATPase, Na+/K+ transporting, alpha 3 polypeptide
  Uniprot ID: P13637
  ENST ID: ENST00000302102
  CDS Start-End: 201-3242
tcccgcggacgcgggcatatgaggaggcggaggcggcggccgccgcagcctctgtgcggtgggaccaacggacggacggacggacgcgcgcacctaccgaggcgcgggcgctgcagaggctcccagcccaagcctgagcctgagcccgccccgaggtccccgccccgcccgcctggctctctcgccgcggagccgccaagatgggggacaagaaagatgacaaggactcacccaagaagaacaagggcaaggagcgccgggacctggatgacctcaagaaggaggtggctatgacagagcacaagatgtcagtggaagaggtctgccggaaatacaacacagactgtgtgcagggtttgacccacagcaaagcccaggagatcctggcccgggatgggcctaacgcactcacgccaccgcctaccaccccagagtgggtcaagttttgccggcagctcttcgggggcttctccatcctgctgtggatcggggctatcctctgcttcctggcctacggtatccaggcgggcaccgaggacgacccctctggtgacaacctgtacctgggcatcgtgctggcggccgtggtgatcatcactggctgcttctcctactaccaggaggccaagagctccaagatcatggagtccttcaagaacatggtgccccagcaagccctggtgatccgggaaggtgagaagatgcaggtgaacgctgaggaggtggtggtcggggacctggtggagatcaagggtggagaccgagtgccagctgacctgcggatcatctcagcccacggctgcaaggtggacaactcctccctgactggcgaatccgagccccagactcgctctcccgactgcactcacgacaaccccttggagactcggaacatcaccttcttttccaccaactgtgtggaaggcacggctcggggcgtggtggtggccacgggcgaccgcactgtcatgggccgtatcgccaccctggcatcagggctggaggtgggcaagacgcccatcgccatcgagattgagcacttcatccagctcatcaccggcgtggctgtcttcctgggtgtctccttcttcatcctctccctcattctcggatacacctggcttgaggctgtcatcttcctcatcggcatcatcgtggccaatgtcccagagggtctgctggccactgtcactgtgtgtctgacgctgaccgccaagcgcatggcccggaagaactgcctggtgaagaacctggaggctgtagaaaccctgggctccacgtccaccatctgctcagataagacagggaccctcactcagaaccgcatgacagtcgcccacatgtggtttgacaaccagatccacgaggctgacaccactgaggaccagtcagggacctcatttgacaagagttcgcacacctgggtggccctgtctcacatcgctgggctctgcaatcgcgctgtcttcaagggtggtcaggacaacatccctgtgctcaagagggatgtggctggggatgcgtctgagtctgccctgctcaagtgcatcgagctgtcctctggctccgtgaagctgatgcgtgaacgcaacaagaaagtggctgagattcccttcaattccaccaacaaataccagctctccatccatgagaccgaggaccccaacgacaaccgatacctgctggtgatgaagggtgcccccgagcgcatcctggaccgctgctccaccatcctgctacagggcaaggagcagcctctggacgaggaaatgaaggaggccttccagaatgcctaccttgagctcggtggcctgggcgagcgcgtgcttggtttctgccattattacctgcccgaggagcagttccccaagggctttgccttcgactgtgatgacgtgaacttcaccacggacaacctctgctttgtgggcctcatgtccatgatcgacccaccccgggcagccgtccctgacgcggtgggcaagtgtcgcagcgcaggcatcaaggtcatcatggtcaccggcgatcaccccatcacggccaaggccattgccaagggtgtgggcatcatctctgagggcaacgagactgtggaggacatcgccgcccggctcaacattcccgtcagccaggttaacccccgggatgccaaggcctgcgtgatccacggcaccgacctcaaggacttcacctccgagcaaatcgacgagatcctgcagaatcacaccgagatcgtcttcgcccgcacatccccccagcagaagctcatcattgtggagggctgtcagagacagggtgcaattgtggctgtgaccggggatggtgtgaacgactcccccgctctgaagaaggccgacattggggtggccatgggcatcgctggctctgacgtctccaagcaggcagctgacatgatcctgctggacgacaactttgcctccatcgtcacaggggtggaggagggccgcctgatcttcgacaacctaaagaagtccattgcctacaccctgaccagcaatatcccggagatcacgcccttcctgctgttcatcatggccaacatcccgctgcccctgggcaccatcaccatcctctgcatcgatctgggcactgacatggtccctgccatctcactggcgtacgaggctgccgaaagcgacatcatgaagagacagcccaggaacccgcggacggacaaattggtcaatgagagactcatcagcatggcctacgggcagattggaatgatccaggctctcggtggcttcttctcttactttgtgatcctggcagaaaatggcttcttgcccggcaacctggtgggcatccggctgaactgggatgaccgcaccgtcaatgacctggaagacagttacgggcagcagtggacatacgagcagaggaaggtggtggagttcacctgccacacggccttctttgtgagcatcgttgtcgtccagtgggccgatctgatcatctgcaagacccggaggaactcggtcttccagcagggcatgaagaacaagatcctgatcttcgggctgtttgaggagacggccctggctgccttcctgtcctactgccccggcatggacgtggccctgcgcatgtaccctctcaagcccagctggtggttctgtgccttcccctacagtttcctcatcttcgtctacgacgaaatccgcaaactcatcctgcgcaggaacccagggggttgggtggagaaggaaacctactactgacctcagccccaccacatcgcccatctcttccccgtcccccaggcccaggaccgcccctgtcagtccccccaattttgtattctggggggaggagccctctcttcctgtggccccaccttggcccccaccccctccactatctcctgccgcccccactctggctggcttctctcccctgccccaaacctctctcctctctcttttctgtgtcagtttctctccctctcctcacccctctatccattcctcccgccccagccacctccctgggctcttttttactccccttcagccccccggctgatgccatctctggttctggacaattatcaaatatatcagtggggagagagaa

SEQ ID NO: 109993 - DNA, 3818 bp, Homo sapiens
  Payload ID: 1592
  Gene Symbol: ATP1A3
  Gene Name: ATPase, Na+/K+ transporting, alpha 3 polypeptide
  ENST ID: ENST00000441343
  CDS Start-End: 139-3818
gaccaacggacggacggacggacgcgcgcacctaccgaggcgcgggcgctgcagaggctcccagcccaagcctgagcctgagcccgccccgaggtccccgccccgcccgcctggctctctcgccgcggagccgccaagatgggggacaagaaagatgacaaggactcacccaagaagaacaagggcaaggagcgccgggacctggatgacctcaagaaggaggtggctatgacagagcacaagatgtcagtggaagaggtctgccggaaatacaacacagactgtgtgcagggtttgacccacagcaaagcccaggagatcctggcccgggatgggcctaacgcactcacgccaccgcctaccaccccagagtgggtcaagttttgccggcagctcttcgggggcttctccatcctgctgtggatcggggctatcctctgcttcctggcctacggtatccaggcgggcaccgaggacgacccctctggtgacaacctgtacctgggcatcgtgctggcggccgtggtgatcatcactggctgcttctcctactaccaggaggccaagagctccaagatcatggagtccttcaagaacatggtgccccagcaagccctggtgatccgggaaggtgagaagatgcaggtgaacgctgaggaggtggtggtcggggacctggtggagatcaagggtggagaccgagtgccagctgacctgcggatcatctcagcccacggctgcaaggtggacaactcctccctgactggcgaatccgagccccagactcgctctcccgactgcactcacgacaaccccttggagactcggaacatcaccttcttttccaccaactgtgtggaaggcacggctcggggcgtggtggtggccacgggcgaccgcactgtcatgggccgtatcgccaccctggcatcagggctggaggtgggcaagacgcccatcgccatcgagattgagcacttcatccagctcatcaccggcgtggctgtcttcctgggtgtctccttcttcatcctctccctcattctcggatacacctggcttgaggctgtcatcttcctcatcggcatcatcgtggccaatgtcccagagggtctgctggccactgtcactgtgtgtctgacgctgaccgccaagcgcatggcccggaagaactgcctggtgaagaacctggaggctgtagaaaccctgggctccacgtccaccatctgctcagataagacagggaccctcactcagaaccgcatgacagtcgcccacatgtggtttgacaaccagatccacgaggctgacaccactgaggaccagtcagggacctcatttgacaagagttcgcacacctgggtggccctgtctcacatcgctgggctctgcaatcgcgctgtcttcaagggtggtcaggacaacatccctgtgctcaagagggatgtggctggggatgcgtctgagtctgccctgctcaagtgcatcgagctgtcctctggctccgtgaagctgatgcgtgaacgcaacaagaaagtggctgagattcccttcaattccaccaacaaataccagctctccatccatgagaccgaggaccccaacgacaaccgatacctgctggtgatgaagggtgcccccgagcgcatcctggaccgctgctccaccatcctgctacagggcaaggagcagcctctggacgaggaaatgaaggaggccttccagaatgcctaccttgagctcggtggcctgggcgagcgcgtgcttggtttctgccattattacctgcccgaggagcagttccccaagggctttgccttcgactgtgatgacgtgaacttcaccacggacaacctctgctttgtgggcctcatgtccatgatcgacccaccccgggcagccgtccctgacgcggtgggcaagtgtcgcagcgcaggcatcaaggtcatcatggtcaccggcgatcaccccatcacggccaaggccattgccaagggtgtgggcatcatctctgagggcaacgagactgtggaggacatcgccgcccggctcaacattcccgtcagccaggttaacccccgggatgccaaggcctgcgtgatccacggcaccgacctcaaggacttcacctccgagcaaatcgacgagatcctgcagaatcacaccgagatcgtcttcgcccgcacatccccccagcagaagctcatcattgtggagggctgtcagagacagggtgcaattgtggctgtgaccggggatggtgtgaacgactcccccgctctgaagaaggccgacattggggtggccatgggcatcgctggctctgacgtctccaagcaggcagctgacatgatcctgctggacgacaactttgcctccatcgtcacaggggtggaggagggccgcctgatcttcgacaacctaaagaagtccattgcctacaccctgaccagcaatatcccggagatcacgcccttcctgctgttcatcatggccaacatcccgctgcccctgggcaccatcaccatcctctgcatcgatctgggcactgacatggtccctgccatctcactggcgtacgaggctgccgaaagcgacatcatgaagagacagcccaggaacccgcggacggacaaattggtcaatgagagactcatcagcatggcctacgggcagattggaatgatccaggctctcggtggcttcttctcttactttgtgatcctggcagaaaatggcttcttgcccggcaacctggtgggcatccggctgaactgggatgaccgcaccgtcaatgacctggaagacagttacgggcagcagtggacatacgagcagaggaaggtggtggagttcacctgccacacggccttctttgtgagcatcgttgtcgtccagtgggccgatctgatcatctgcaagacccggaggaactcggtcttccagcagggcatgaagaacaagatcctgatcttcgggctgtttgaggagacggccctggctgccttcctgtcctactgccccggcatggacgtggccctgcgcatgtaccctctcaagcccagctggtggttctgtgccttcccctacagtttcctcatcttcgtctacgacgaaatccgcaaactcatcctgcgcaggaacccagggggtgagggagctcggcaaggcagccgaggggggcggggggcagcagggtctcaggcagctggtcccaggctcccctcgccctgctggatggctctgccacctggttcccactcttctctctcttcccatctctccgggcacccactctgtcttctcacgggtctctgtctgtgtggtttccttgtctctctccctctctgtccctctctctgctgggcggctcgccttgcctgtctctctccatctcttactctgtctctttctttccttctttgtctctccaggttgggtggagaaggaaacctactactgacctcagccccaccacatcgcccatctcttccccgtcccccaggcccaggaccgcccctgtcagtccccccaattttgtattctggggggaggagccctctcttcctgtggccccaccttggcccccaccccctccactatctcctgccgcccccactctggctggcttctctcccctgccccaaacctctctcctctctcttttctgtgtcagtttctctccctctcctcacccctctatccattcctcccgccccagccacctccctgggctcttttttactccccttcagccccccggctgatgccatctctggttctggacaattatcaaatatatcagtggggagagagaa

SEQ ID NO: 109994 - DNA, 3427 bp, Homo sapiens
  Payload ID: 1592
  Gene Symbol: ATP1A3
  Gene Name: ATPase, Na+/K+ transporting, alpha 3 polypeptide
  Uniprot ID: P13637
  ENST ID: ENST00000543770
  CDS Start-End: 37-3111
gtgtgtgtgtgcagcccctcatgtaggggagcaggcatgggaggctgggaggaggagaggaacaggagagccacggacaagaaagatgacaaggactcacccaagaagaacaagggcaaggagcgccgggacctggatgacctcaagaaggaggtggctatgacagagcacaagatgtcagtggaagaggtctgccggaaatacaacacagactgtgtgcagggtttgacccacagcaaagcccaggagatcctggcccgggatgggcctaacgcactcacgccaccgcctaccaccccagagtgggtcaagttttgccggcagctcttcgggggcttctccatcctgctgtggatcggggctatcctctgcttcctggcctacggtatccaggcgggcaccgaggacgacccctctggtgacaacctgtacctgggcatcgtgctggcggccgtggtgatcatcactggctgcttctcctactaccaggaggccaagagctccaagatcatggagtccttcaagaacatggtgccccagcaagccctggtgatccgggaaggtgagaagatgcaggtgaacgctgaggaggtggtggtcggggacctggtggagatcaagggtggagaccgagtgccagctgacctgcggatcatctcagcccacggctgcaaggtggacaactcctccctgactggcgaatccgagccccagactcgctctcccgactgcactcacgacaaccccttggagactcggaacatcaccttcttttccaccaactgtgtggaaggcacggctcggggcgtggtggtggccacgggcgaccgcactgtcatgggccgtatcgccaccctggcatcagggctggaggtgggcaagacgcccatcgccatcgagattgagcacttcatccagctcatcaccggcgtggctgtcttcctgggtgtctccttcttcatcctctccctcattctcggatacacctggcttgaggctgtcatcttcctcatcggcatcatcgtggccaatgtcccagagggtctgctggccactgtcactgtgtgtctgacgctgaccgccaagcgcatggcccggaagaactgcctggtgaagaacctggaggctgtagaaaccctgggctccacgtccaccatctgctcagataagacagggaccctcactcagaaccgcatgacagtcgcccacatgtggtttgacaaccagatccacgaggctgacaccactgaggaccagtcagggacctcatttgacaagagttcgcacacctgggtggccctgtctcacatcgctgggctctgcaatcgcgctgtcttcaagggtggtcaggacaacatccctgtgctcaagagggatgtggctggggatgcgtctgagtctgccctgctcaagtgcatcgagctgtcctctggctccgtgaagctgatgcgtgaacgcaacaagaaagtggctgagattcccttcaattccaccaacaaataccagctctccatccatgagaccgaggaccccaacgacaaccgatacctgctggtgatgaagggtgcccccgagcgcatcctggaccgctgctccaccatcctgctacagggcaaggagcagcctctggacgaggaaatgaaggaggccttccagaatgcctaccttgagctcggtggcctgggcgagcgcgtgcttggtttctgccattattacctgcccgaggagcagttccccaagggctttgccttcgactgtgatgacgtgaacttcaccacggacaacctctgctttgtgggcctcatgtccatgatcgacccaccccgggcagccgtccctgacgcggtgggcaagtgtcgcagcgcaggcatcaaggtcatcatggtcaccggcgatcaccccatcacggccaaggccattgccaagggtgtgggcatcatctctgagggcaacgagactgtggaggacatcgccgcccggctcaacattcccgtcagccaggttaacccccgggatgccaaggcctgcgtgatccacggcaccgacctcaaggacttcacctccgagcaaatcgacgagatcctgcagaatcacaccgagatcgtcttcgcccgcacatccccccagcagaagctcatcattgtggagggctgtcagagacagggtgcaattgtggctgtgaccggggatggtgtgaacgactcccccgctctgaagaaggccgacattggggtggccatgggcatcgctggctctgacgtctccaagcaggcagctgacatgatcctgctggacgacaactttgcctccatcgtcacaggggtggaggagggccgcctgatcttcgacaacctaaagaagtccattgcctacaccctgaccagcaatatcccggagatcacgcccttcctgctgttcatcatggccaacatcccgctgcccctgggcaccatcaccatcctctgcatcgatctgggcactgacatggtccctgccatctcactggcgtacgaggctgccgaaagcgacatcatgaagagacagcccaggaacccgcggacggacaaattggtcaatgagagactcatcagcatggcctacgggcagattggaatgatccaggctctcggtggcttcttctcttactttgtgatcctggcagaaaatggcttcttgcccggcaacctggtgggcatccggctgaactgggatgaccgcaccgtcaatgacctggaagacagttacgggcagcagtggacatacgagcagaggaaggtggtggagttcacctgccacacggccttctttgtgagcatcgttgtcgtccagtgggccgatctgatcatctgcaagacccggaggaactcggtcttccagcagggcatgaagaacaagatcctgatcttcgggctgtttgaggagacggccctggctgccttcctgtcctactgccccggcatggacgtggccctgcgcatgtaccctctcaagcccagctggtggttctgtgccttcccctacagtttcctcatcttcgtctacgacgaaatccgcaaactcatcctgcgcaggaacccagggggttgggtggagaaggaaacctactactgacctcagccccaccacatcgcccatctcttccccgtcccccaggcccaggaccgcccctgtcagtccccccaattttgtattctggggggaggagccctctcttcctgtggccccaccttggcccccaccccctccactatctcctgccgcccccactctggctggcttctctcccctgccccaaacctctctcctctctcttttctgtgtcagtttctctccctctcctcacccctctatccattcctcccgccccagccacctccctgggctcttttttactccccttcagccccccggctgatgccatctctgg

SEQ ID NO: 109995 - DNA, 3618 bp, Homo sapiens
  Payload ID: 1592
  Gene Symbol: ATP1A3
  Gene Name: ATPase, Na+/K+ transporting, alpha 3 polypeptide
  Uniprot ID: P13637
  ENST ID: ENST00000545399
  CDS Start-End: 185-3265
atatgaggaggcggaggcggcggccgccgcagcctctgtgcggtgggaccaacggacggacggacggacgcgcgcacctaccgaggcgcgggcgctgcagaggctcccagcccaagcctgagcctgagcccgccccgaggtccccgccccgcccgcctggctctctcgccgcggagccgccaagatggggtctggtggctctgacagctatcgtatcgccacctcgcaggacaagaaagatgacaaggactcacccaagaagaacaagggcaaggagcgccgggacctggatgacctcaagaaggaggtggctatgacagagcacaagatgtcagtggaagaggtctgccggaaatacaacacagactgtgtgcagggtttgacccacagcaaagcccaggagatcctggcccgggatgggcctaacgcactcacgccaccgcctaccaccccagagtgggtcaagttttgccggcagctcttcgggggcttctccatcctgctgtggatcggggctatcctctgcttcctggcctacggtatccaggcgggcaccgaggacgacccctctggtgacaacctgtacctgggcatcgtgctggcggccgtggtgatcatcactggctgcttctcctactaccaggaggccaagagctccaagatcatggagtccttcaagaacatggtgccccagcaagccctggtgatccgggaaggtgagaagatgcaggtgaacgctgaggaggtggtggtcggggacctggtggagatcaagggtggagaccgagtgccagctgacctgcggatcatctcagcccacggctgcaaggtggacaactcctccctgactggcgaatccgagccccagactcgctctcccgactgcactcacgacaaccccttggagactcggaacatcaccttcttttccaccaactgtgtggaaggcacggctcggggcgtggtggtggccacgggcgaccgcactgtcatgggccgtatcgccaccctggcatcagggctggaggtgggcaagacgcccatcgccatcgagattgagcacttcatccagctcatcaccggcgtggctgtcttcctgggtgtctccttcttcatcctctccctcattctcggatacacctggcttgaggctgtcatcttcctcatcggcatcatcgtggccaatgtcccagagggtctgctggccactgtcactgtgtgtctgacgctgaccgccaagcgcatggcccggaagaactgcctggtgaagaacctggaggctgtagaaaccctgggctccacgtccaccatctgctcagataagacagggaccctcactcagaaccgcatgacagtcgcccacatgtggtttgacaaccagatccacgaggctgacaccactgaggaccagtcagggacctcatttgacaagagttcgcacacctgggtggccctgtctcacatcgctgggctctgcaatcgcgctgtcttcaagggtggtcaggacaacatccctgtgctcaagagggatgtggctggggatgcgtctgagtctgccctgctcaagtgcatcgagctgtcctctggctccgtgaagctgatgcgtgaacgcaacaagaaagtggctgagattcccttcaattccaccaacaaataccagctctccatccatgagaccgaggaccccaacgacaaccgatacctgctggtgatgaagggtgcccccgagcgcatcctggaccgctgctccaccatcctgctacagggcaaggagcagcctctggacgaggaaatgaaggaggccttccagaatgcctaccttgagctcggtggcctgggcgagcgcgtgcttggtttctgccattattacctgcccgaggagcagttccccaagggctttgccttcgactgtgatgacgtgaacttcaccacggacaacctctgctttgtgggcctcatgtccatgatcgacccaccccgggcagccgtccctgacgcggtgggcaagtgtcgcagcgcaggcatcaaggtcatcatggtcaccggcgatcaccccatcacggccaaggccattgccaagggtgtgggcatcatctctgagggcaacgagactgtggaggacatcgccgcccggctcaacattcccgtcagccaggttaacccccgggatgccaaggcctgcgtgatccacggcaccgacctcaaggacttcacctccgagcaaatcgacgagatcctgcagaatcacaccgagatcgtcttcgcccgcacatccccccagcagaagctcatcattgtggagggctgtcagagacagggtgcaattgtggctgtgaccggggatggtgtgaacgactcccccgctctgaagaaggccgacattggggtggccatgggcatcgctggctctgacgtctccaagcaggcagctgacatgatcctgctggacgacaactttgcctccatcgtcacaggggtggaggagggccgcctgatcttcgacaacctaaagaagtccattgcctacaccctgaccagcaatatcccggagatcacgcccttcctgctgttcatcatggccaacatcccgctgcccctgggcaccatcaccatcctctgcatcgatctgggcactgacatggtccctgccatctcactggcgtacgaggctgccgaaagcgacatcatgaagagacagcccaggaacccgcggacggacaaattggtcaatgagagactcatcagcatggcctacgggcagattggaatgatccaggctctcggtggcttcttctcttactttgtgatcctggcagaaaatggcttcttgcccggcaacctggtgggcatccggctgaactgggatgaccgcaccgtcaatgacctggaagacagttacgggcagcagtggacatacgagcagaggaaggtggtggagttcacctgccacacggccttctttgtgagcatcgttgtcgtccagtgggccgatctgatcatctgcaagacccggaggaactcggtcttccagcagggcatgaagaacaagatcctgatcttcgggctgtttgaggagacggccctggctgccttcctgtcctactgccccggcatggacgtggccctgcgcatgtaccctctcaagcccagctggtggttctgtgccttcccctacagtttcctcatcttcgtctacgacgaaatccgcaaactcatcctgcgcaggaacccagggggttgggtggagaaggaaacctactactgacctcagccccaccacatcgcccatctcttccccgtcccccaggcccaggaccgcccctgtcagtccccccaattttgtattctggggggaggagccctctcttcctgtggccccaccttggcccccaccccctccactatctcctgccgcccccactctggctggcttctctcccctgccccaaacctctctcctctctcttttctgtgtcagtttctctccctctcctcacccctctatccattcctcccgccccagccacctccctgggctcttttttactccccttcagccccccggctgatgccatctctggttctggacaattatcaaatatatcagtggggagagag

SEQ ID NO: 109996 - DNA, 889 bp, Homo sapiens
  Payload ID: 1592
  Gene Symbol: ATP1A3
  Gene Name: ATPase, Na+/K+ transporting, alpha 3 polypeptide
  ENST ID: ENST00000473086
  CDS Start-End: 136-889
gagaagactggagaaagaatagagggctgagaccagaggtgaagcgggagggacaagaaagatgacaaggactcacccaagaagaacaagggcaaggagcgccgggacctggatgacctcaagaaggaggtggctatgacagagcacaagatgtcagtggaagaggtctgccggaaatacaacacagactgtgtgcagggtttgacccacagcaaagcccaggagatcctggcccgggatgggcctaacgcactcacgccaccgcctaccaccccagagtgggtcaagttttgccggcagctcttcgggggcttctccatcctgctgtggatcggggctatcctctgcttcctggcctacggtatccaggcgggcaccgaggacgacccctctggtgacaacctgtacctgggcatcgtgctggcggccgtggtgatcatcactggctgcttctcctactaccaggaggccaagagctccaagatcatggagtccttcaagaacatggtgccccagcaagccctggtgatccgggaaggtgagaagatgcaggtgaacgctgaggaggtggtggtcggggacctggtggagatcaagggtggagaccgagtgccagctgacctgcggatcatctcagcccacggctgcaaggtggacaactcctccctgactggcgaatccgagccccagactcgctctcccgactgcactcacgacaaccccttggagactcggaacatcaccttcttttccaccaactgtgtggaaggcacggctcggggcgtggtggtggccacgggcgaccgcactgtcatgggccgtatcgccaccctggcatcagggctggaggtgggcaagacgcccatcgccatcgagattgagcacttca

SEQ ID NO: 109997 - DNA, 3458 bp, Homo sapiens
  Payload ID: 1592
  Gene Symbol: ATP1A3
  Gene Name: ATPase, Na+/K+ transporting, alpha 3 polypeptide
  ENST ID: ENST00000602133
  CDS Start-End: 154-3105
aagatgggggtaggtgctgagccggctgggcgccgcttccgtgtgacattgtggggccggtgacattgggacaagaaagatgacaaggactcacccaagaagaacaagggcaaggagcgccgggacctggatgacctcaagaaggaggtggctatgacagagcacaagatgtcagtggaagaggtctgccggaaatacaacacagactgtgtgcagggtttgacccacagcaaagcccaggagatcctggcccgggatgggcctaacgcactcacgccaccgcctaccaccccagagtgggtcaagttttgccggcagctcttcgggggcttctccatcctgctgtggatcggggctatcctctgcttcctggcctacggtatccaggcgggcaccgaggacgacccctctggtgacaacctgtacctgggcatcgtgctggcggccgtggtgatcatcactggctgcttctcctactaccaggaggccaagagctccaagatcatggagtccttcaagaacatggtgccccagcaagccctggtgatccgggaaggtgagaagatgcaggtgaacgctgaggaggtggtggtcggggacctggtggagatcaagggtggagaccgagtgccagctgacctgcggatcatctcagcccacggctgcaaggtggacaactcctccctgactggcgaatccgagccccagactcgctctcccgactgcactcacgacaaccccttggagactcggaacatcaccttcttttccaccaactgtgtggaaggcacggctcggggcgtggtggtggccacgggcgaccgcactgtcatgggccgtatcgccaccctggcatcagggctggaggtgggcaagacgcccatcgccatcgagattgagcacttcatccagctcatcaccggcgtggctgtcttcctgggtgtctccttcttcatcctctccctcattctcggatacacctggcttgaggctgtcatcttcctcatcggcatcatcgtggccaatgtcccagagggtctgctggccactgtcactgtgtgtctgacgctgaccgccaagcgcatggcccggaagaactgcctggtgaagaacctggaggctgtagaaaccctgggctccacgtccaccatctgctcagataagacagggaccctcactcagaaccgcatgacagtcgcccacatgtggtttgacaaccagatccacgaggctgacaccactgaggaccagtcagggacctcatttgacaagagttcgcacacctgggtggccctgtctcacatcgctgggctctgcaatcgcgctgtcttcaagggtggtcaggacaacatccctgtgctcaagagggatgtggctggggatgcgtctgagtctgccctgctcaagtgcatcgagctgtcctctggctccgtgaagctgatgcgtgaacgcaacaagaaagtggctgagattcccttcaattccaccaacaaataccagctctccatccatgagaccgaggaccccaacgacaaccgatacctgctggtgatgaagggtgcccccgagcgcatcctggaccgctgctccaccatcctgctacagggcaaggagcagcctctggacgaggaaatgaaggaggccttccagaatgcctaccttgagctcggtggcctgggcgagcgcgtgcttggtttctgccattattacctgcccgaggagcagttccccaagggctttgccttcgactgtgatgacgtgaacttcaccacggacaacctctgctttgtgggcctcatgtccatgatcgacccaccccgggcagccgtccctgacgcggtgggcaagtgtcgcagcgcaggcatcaaggtcatcatggtcaccggcgatcaccccatcacggccaaggccattgccaagggtgtgggcatcatctctgagggcaacgagactgtggaggacatcgccgcccggctcaacattcccgtcagccaggttaacccccgggatgccaaggcctgcgtgatccacggcaccgacctcaaggacttcacctccgagcaaatcgacgagatcctgcagaatcacaccgagatcgtcttcgcccgcacatccccccagcagaagctcatcattgtggagggctgtcagagacagggtgcaattgtggctgtgaccggggatggtgtgaacgactcccccgctctgaagaaggccgacattggggtggccatgggcatcgctggctctgacgtctccaagcaggcagctgacatgatcctgctggacgacaactttgcctccatcgtcacaggggtggaggagggccgcctgatcttcgacaacctaaagaagtccattgcctacaccctgaccagcaatatcccggagatcacgcccttcctgctgttcatcatggccaacatcccgctgcccctgggcaccatcaccatcctctgcatcgatctgggcactgacatggtccctgccatctcactggcgtacgaggctgccgaaagcgacatcatgaagagacagcccaggaacccgcggacggacaaattggtcaatgagagactcatcagcatggcctacgggcagattggaatgatccaggctctcggtggcttcttctcttactttgtgatcctggcagaaaatggcttcttgcccggcaacctggtgggcatccggctgaactgggatgaccgcaccgtcaatgacctggaagacagttacgggcagcagtggacatacgagcagaggaaggtggtggagttcacctgccacacggccttctttgtgagcatcgttgtcgtccagtgggccgatctgatcatctgcaagacccggaggaactcggtcttccagcagggcatgaagaacaagatcctgatcttcgggctgtttgaggagacggccctggctgccttcctgtcctactgccccggcatggacgtggccctgcgcatgtaccctctcaagcccagctggtggttctgtgccttcccctacagtttcctcatcttcgtctacgacgaaatccgcaaactcatcctgcgcaggaacccagggggttgggtggagaaggaaacctactactgacctcagccccaccacatcgcccatctcttccccgtcccccaggcccaggaccgcccctgtcagtccccccaattttgtattctggggggaggagccctctcttcctgtggccccaccttggcccccaccccctccactatctcctgccgcccccactctggctggcttctctcccctgccccaaacctctctcctctctcttttctgtgtcagtttctctccctctcctcacccctctatccattcctcccgccccagccacctccctgggctcttttttactccccttcagccccccggctgatgccatctctggttctggacaattatcaaatatatcagtggggagagag

SEQ ID NO: 109998 - DNA, 3839 bp, Homo sapiens
  Payload ID: 1593
  Gene Symbol: ATP1A4
  Gene Name: ATPase, Na+/K+ transporting, alpha 4 polypeptide
  Uniprot ID: Q13733
  ENST ID: ENST00000368081
  CDS Start-End: 472-3561
agcaaccacagggcctgggactggggggttcccagatccttgaagctcactccgcctcctcactctcactgcatttcccaccttcctgtgggccttgcggcatcttcatcactgaggcacctggttacgcttcacctcttgtttcctgccctcactgcattccctcacctctacctttttatccttccaccctaggcttctctcctccctcttccctcactcctgactcttcctcttcccagcggacggctggaggaccgctcagtctctcctctctcacttcccttcctctctctcaccttcaccacccaacacctccctccctgcctctttctttctgctccctcattctctccccaccactctcttctcgtggcccccttgcccgcgcgccctcttcccttccccttgcctcactctctcagctttcttcccacagttgagctcgggcagctctttctggggatagctatggggctttgggggaagaaagggacagtggctccccatgaccagagtccaagacgaagacctaaaaaagggcttatcaagaaaaaaatggtgaagagggaaaaacagaagcgcaatatggaggaactgaagaaggaagtggtcatggatgatcacaaattaaccttggaagagctgagcaccaagtactccgtggacctgacaaagggccatagccaccaaagggcaaaggaaatcctgactcgaggtggacccaatactgttaccccaccccccaccactccagaatgggtcaaattctgtaagcaactgttcggaggcttctccctcctactatggactggggccattctctgctttgtggcctacagcatccagatatatttcaatgaggagcctaccaaagacaacctctacctgagcatcgtactgtccgtcgtggtcatcgtcactggctgcttctcctattatcaggaggccaagagctccaagatcatggagtcttttaagaacatggtgcctcagcaagctctggtaattcgaggaggagagaagatgcaaattaatgtacaagaggtggtgttgggagacctggtggaaatcaagggtggagaccgagtccctgctgacctccggcttatctctgcacaaggatgtaaggtggacaactcatccttgactggggagtcagaaccccagagccgctcccctgacttcacccatgagaaccctctggagacccgaaacatctgcttcttttccaccaactgtgtggaaggaaccgcccggggtattgtgattgctacgggagactccacagtgatgggcagaattgcctccctgacgtcaggcctggcggttggccagacacctatcgctgctgagatcgaacacttcatccatctgatcactgtggtggccgtcttccttggtgtcactttttttgcgctctcacttctcttgggctatggttggctggaggctatcatttttctcattggcatcattgtggccaatgtgcctgaggggctgttggccacagtcactgtgtgcctgaccctcacagccaagcgcatggcgcggaagaactgcctggtgaagaacctggaggcggtggagacgctgggctccacgtccaccatctgctcagacaagacgggcaccctcacccagaaccgcatgaccgtcgcccacatgtggtttgatatgaccgtgtatgaggccgacaccactgaagaacagactggaaaaacatttaccaagagctctgatacctggtttatgctggcccgaatcgctggcctctgcaaccgggctgactttaaggctaatcaggagatcctgcccattgctaagagggccacaacaggtgatgcttccgagtcagccctcctcaagttcatcgagcagtcttacagctctgtggcggagatgagagagaaaaaccccaaggtggcagagattccctttaattctaccaacaagtaccagatgtccatccaccttcgggaggacagctcccagacccacgtactgatgatgaagggtgctccggagaggatcttggagttttgttctacctttcttctgaatgggcaggagtactcaatgaacgatgaaatgaaggaagccttccaaaatgcctacttagaactgggaggtctgggggaacgtgtgctaggcttctgcttcttgaatctgcctagcagcttctccaagggattcccatttaatacagatgaaataaatttccccatggacaacctttgttttgtgggcctcatatccatgattgaccctccccgagctgcagtgcctgatgctgtgagcaagtgtcgcagtgcaggaattaaggtgatcatggtaacaggagatcatcccattacagctaaggccattgccaagggtgtgggcatcatctcagaaggcactgagacggcagaggaagtcgctgcccggcttaagatccctatcagcaaggtcgatgccagtgctgccaaagccattgtggtgcatggtgcagaactgaaggacatacagtccaagcagcttgatcagatcctccagaaccaccctgagatcgtgtttgctcggacctcccctcagcagaagctcatcattgtcgagggatgtcagaggctgggagccgttgtggccgtgacaggtgacggggtgaacgactcccctgcgctgaagaaggctgacattggcattgccatgggcatctctggctctgacgtctctaagcaggcagccgacatgatcctgctggatgacaactttgcctccatcgtcacgggggtggaggagggccgcctgatctttgacaacctgaagaaatccatcatgtacaccctgaccagcaacatccccgagatcacgcccttcctgatgttcatcatcctcggtatacccctgcctctgggaaccataaccatcctctgcattgatctcggcactgacatggtccctgccatctccttggcttatgagtcagctgaaagcgacatcatgaagaggcttccaaggaacccaaagacggataatctggtgaaccaccgtctcattggcatggcctatggacagattgggatgatccaggctctggctggattctttacctactttgtaatcctggctgagaatggttttaggcctgttgatctgctgggcatccgcctccactgggaagataaatacttgaatgacctggaggacagctacggacagcagtggacctatgagcaacgaaaagttgtggagttcacatgccaaacggccttttttgtcaccatcgtggttgtgcagtgggcggatctcatcatctccaagactcgccgcaactcacttttccagcagggcatgagaaacaaagtcttaatatttgggatcctggaggagacactcttggctgcatttctgtcctacactccaggcatggacgtggccctgcgaatgtacccactcaagataacctggtggctctgtgccattccctacagtattctcatcttcgtctatgatgaaatcagaaaactcctcatccgtcagcacccggatggctgggtggaaagggagacgtactactaaactcagcagatgaagagcttcatgtgacacaggggtgttgtgagagctgggatggggccagagattataagtttgacacaacatctgagacactaggatgaattatcttggatgagaaagatgggcaatcctgggctggcttgagggaatcatgggcagaggatgaggtgggctgaagggaagcccagcctgcatctagctggagccccgcagggaggggcatggtcctgctgaatcccgtagccagtctagacagtaaatgtctggaaaagccctca

SEQ ID NO: 109999 - DNA, 886 bp, Homo sapiens
  Payload ID: 1593
  Gene Symbol: ATP1A4
  Gene Name: ATPase, Na+/K+ transporting, alpha 4 polypeptide
  Uniprot ID: Q13733
  ENST ID: ENST00000470705
  CDS Start-End: 111-608
caccagcccagccagaagcaagtcccagcccccagccctcccctggcctaccttttggggcccttctctgaaccaggctcccctgtcctgcaactctgtcattcacagggatgatccaggctctggctggattctttacctactttgtaatcctggctgagaatggttttaggcctgttgatctgctgggcatccgcctccactgggaagataaatacttgaatgacctggaggacagctacggacagcagtggacctatgagcaacgaaaagttgtggagttcacatgccaaacggccttttttgtcaccatcgtggttgtgcagtgggcggatctcatcatctccaagactcgccgcaactcacttttccagcagggcatgagaaacaaagtcttaatatttgggatcctggaggagacactcttggctgcatttctgtcctacactccaggcatggacgtggccctgcgaatgtacccactcaagataacctggtggctctgtgccattccctacagtattctcatcttcgtctatgatgaaatcagaaaactcctcatccgtcagcacccggatggctgggtggaaagggagacgtactactaaactcagcagatgaagagcttcatgtgacacaggggtgttgtgagagctgggatggggccagagattataagtttgacacaacatctgagacactaggatgaattatcttggatgagaaagatgggcaatcctgggctggcttgagggaatcatgggcagaggatgaggtgggctgaagggaagcccagcctgcatctagctggagccccgcagggaggggcatggtcctgctgaatcccgtagccagtctagacagtaaatgtctggaaaagccctca

SEQ ID NO: 110000 - DNA, 3800 bp, Homo sapiens
  Payload ID: 1593
  Gene Symbol: ATP1A4
  Gene Name: ATPase, Na+/K+ transporting, alpha 4 polypeptide
  ENST ID: ENST00000477338
  CDS Start-End: 456-2009
gggactggggggttcccagatccttgaagctcactccgcctcctcactctcactgcatttcccaccttcctgtgggccttgcggcatcttcatcactgaggcacctggttacgcttcacctcttgtttcctgccctcactgcattccctcacctctacctttttatccttccaccctaggcttctctcctccctcttccctcactcctgactcttcctcttcccagcggacggctggaggaccgctcagtctctcctctctcacttcccttcctctctctcaccttcaccacccaacacctccctccctgcctctttctttctgctccctcattctctccccaccactctcttctcgtggcccccttgcccgcgcgccctcttcccttccccttgcctcactctctcagctttcttcccacagttgagctcgggcagctctttctggggatagctatggggctttgggggaagaaagggacagtggctccccatgaccagagtccaagacgaagacctaaaaaagggcttatcaagaaaaaaatggtgaagagggaaaaacagaagcgcaatatggaggaactgaagaaggaagtggtcatggatgatcacaaattaaccttggaagagctgagcaccaagtactccgtggacctgacaaagggccatagccaccaaagggcaaaggaaatcctgactcgaggtggacccaatactgttaccccaccccccaccactccagaatgggtcaaattctgtaagcaactgttcggaggcttctccctcctactatggactggggccattctctgctttgtggcctacagcatccagatatatttcaatgaggagcctaccaaagacaacctctacctgagcatcgtactgtccgtcgtggtcatcgtcactggctgcttctcctattatcaggaggccaagagctccaagatcatggagtcttttaagaacatggtgcctcagcaagctctggtaattcgaggaggagagaagatgcaaattaatgtacaagaggtggtgttgggagacctggtggaaatcaagggtggagaccgagtccctgctgacctccggcttatctctgcacaaggatgtaaggtggacaactcatccttgactggggagtcagaaccccagagccgctcccctgacttcacccatgagaaccctctggagacccgaaacatctgcttcttttccaccaactgtgtggaaggaaccgcccggggtattgtgattgctacgggagactccacagtgatgggcagaattgcctccctgacgtcaggcctggcggttggccagacacctatcgctgctgagatcgaacacttcatccatctgatcactgtggtggccgtcttccttggtgtcactttttttgcgctctcacttctcttgggctatggttggctggaggctatcatttttctcattggcatcattgtggccaatgtgcctgaggggctgttggccacagtcactgtgtgcctgaccctcacagccaagcgcatggcgcggaagaactgcctggtgaagaacctggaggcggtggagacgctgggctccacgtccaccatctgctcagacaagacgggcaccctcacccagaaccgcatgaccgtcgcccacatgtggtttgatatgaccgtgtatgaggccgacaccactgaagaacagactggaaaaacatttaccaagagctctgatacctggtttatgctggcccgaatcgctggcctctgcaaccgggctgactttaaggctaatcaggagatcctgcccattgctaagagggccacaacaggtgatgcttccgagtcagccctcctcaagttcatcgagcagtcttacagctctgtggcggagatgagagagaaaaaccccaaggtggcagagattccctttaattctaccaacaagtaccaggtacagaacccacaaagatgtccatccaccttcgggaggacagctcccagacccacgtactgatgatgaagggtgctccggagaggatcttggagttttgttctacctttcttctgaatgggcaggagtactcaatgaacgatgaaatgaaggaagccttccaaaatgcctacttagaactgggaggtctgggggaacgtgtgctaggcttctgcttcttgaatctgcctagcagcttctccaagggattcccatttaatacagatgaaataaatttccccatggacaacctttgttttgtgggcctcatatccatgattgaccctccccgagctgcagtgcctgatgctgtgagcaagtgtcgcagtgcaggaattaaggtgatcatggtaacaggagatcatcccattacagctaaggccattgccaagggtgtgggcatcatctcagaaggcactgagacggcagaggaagtcgctgcccggcttaagatccctatcagcaaggtcgatgccagtgctgccaaagccattgtggtgcatggtgcagaactgaaggacatacagtccaagcagcttgatcagatcctccagaaccaccctgagatcgtgtttgctcggacctcccctcagcagaagctcatcattgtcgagggatgtcagaggctgggagccgttgtggccgtgacaggtgacggggtgaacgactcccctgcgctgaagaaggctgacattggcattgccatgggcatctctggctctgacgtctctaagcaggcagccgacatgatcctgctggatgacaactttgcctccatcgtcacgggggtggaggagggccgcctgatctttgacaacctgaagaaatccatcatgtacaccctgaccagcaacatccccgagatcacgcccttcctgatgttcatcatcctcggtatacccctgcctctgggaaccataaccatcctctgcattgatctcggcactgacatggtccctgccatctccttggcttatgagtcagctgaaagcgacatcatgaagaggcttccaaggaacccaaagacggataatctgggatgatccaggctctggctggattctttacctactttgtaatcctggctgagaatggttttaggcctgttgatctgctgggcatccgcctccactgggaagataaatacttgaatgacctggaggacagctacggacagcagtggacctatgagcaacgaaaagttgtggagttcacatgccaaacggccttttttgtcaccatcgtggttgtgcagtgggcggatctcatcatctccaagactcgccgcaactcacttttccagcagggcatgagaaacaaagtcttaatatttgggatcctggaggagacactcttggctgcatttctgtcctacactccaggcatggacgtggccctgcgaatgtacccactcaagataacctggtggctctgtgccattccctacagtattctcatcttcgtctatgatgaaatcagaaaactcctcatccgtcagcacccggatggctgggtggaaagggagacgtactactaaactcagcagatgaagagcttcatgtgacacaggggtgttgtgagagctgggatggggccagagattataagtttgacacaacatctgagacactaggatgaattatcttggatgagaaagatgggcaatcctgggctggcttgagggaatcatgggcagaggatgaggtgggctgaagggaagcccagcctgcatctagctggagccccgcagggaggggcatggtcctgctgaatcccgtagccagtctagacagtaaatgtctggaaaagccctca

SEQ ID NO: 110001 - DNA, 1883 bp, Homo sapiens
  Payload ID: 1594
  Gene Symbol: ATP1B1
  Gene Name: ATPase, Na+/K+ transporting, beta 1 polypeptide
  Uniprot ID: P05026
  ENST ID: ENST00000367815
  CDS Start-End: 508-1419
aattcctcggctcctggcgggagtgccggtggcgccccgcagtccgcttgtccgtccttccctctctgactctcctaccccgggcctgtctctgcagaggtcaggggaggcgggggcccagcacacgtccccagtggcagcgggagcggcagctacgggttcgcggagcccccgaccccccaagggctagaggagcgctcggcggaccaaagaaagcccgcgagcggctgcgcgcccaccaataggtgcggggctcggagccgcgcagcctgcgccgtccctccctccgcccccgccccgccgccgccgccgccgccgcctccccctcctcctgctcctgccttggctcctccgccgcgcgtctcgcactccgagagccgcagcggcagcggcgcgtcctgcctgcagagagccaggccggagaagccgagcggcgcagaggacgccagggcgcgcgccgcagccacccaccctccggaccgcggcagctgctgacccgccatcgccatggcccgcgggaaagccaaggaggagggcagctggaagaaattcatctggaactcagagaagaaggagtttctgggcaggaccggtggcagttggtttaagatccttctattctacgtaatattttatggctgcctggctggcatcttcatcggaaccatccaagtgatgctgctcaccatcagtgaatttaagcccacatatcaggaccgagtggccccgccaggattaacacagattcctcagatccagaagactgaaatttcctttcgtcctaatgatcccaagagctatgaggcatatgtactgaacatagttaggttcctggaaaagtacaaagattcagcccagagggatgacatgatttttgaagattgtggcgatgtgcccagtgaaccgaaagaacgaggagactttaatcatgaacgaggagagcgaaaggtctgcagattcaagcttgaatggctgggaaattgctctggattaaatgatgaaacttatggctacaaagagggcaaaccgtgcattattataaagctcaaccgagttctaggcttcaaacctaagcctcccaagaatgagtccttggagacttacccagtgatgaagtataacccaaatgtccttcccgttcagtgcactggcaagcgagatgaagataaggataaagttggaaatgtggagtattttggactgggcaactcccctggttttcctctgcagtattatccgtactatggcaaactcctgcagcccaaatacctgcagcccctgctggccgtacagttcaccaatcttaccatggacactgaaattcgcatagagtgtaaggcgtacggtgagaacattgggtacagtgagaaagaccgttttcagggacgttttgatgtaaaaattgaagttaagagctgatcacaagcacaaatctttcccactagccatttaataagttaaaaaaagatacaaaaacaaaaacctactagtcttgaacaaactgtcatacgtatgggacctacacttaatctatatgctttacactagctttctgcatttaataggttagaatgtaaattaaagtgtagcaatagcaacaaaatatttattctactgtaaatgacaaaagaaaaagaaaaattgagccttgggacgtgcccatttttactgtaaattatgattccgtaactgacttgtagtaagcagtgtttctggcccctaagtattgctgccttgtgtattttatttagtgtacagtactacaggtgcatactctggtcatttttcaagccatgttttattgtatctgttttctactttatgtgagcaaggtttgctgtccaaggtgtaaatattcaacgggaataaaactggcatggtaa

SEQ ID NO: 110002 - DNA, 2608 bp, Homo sapiens
  Payload ID: 1594
  Gene Symbol: ATP1B1
  Gene Name: ATPase, Na+/K+ transporting, beta 1 polypeptide
  Uniprot ID: P05026
  ENST ID: ENST00000367816
  CDS Start-End: 530-1441
gcccacaaggggcacagccgggcagtcaggaaccggggctgccggctgggctggcctgcaaagaagagggaagggccggaactgcaaccgcagtggcggggagtgcgagggggcggcagaggtcaggggaggcgggggcccagcacacgtccccagtggcagcgggagcggcagctacgggttcgcggagcccccgaccccccaagggctagaggagcgctcggcggaccaaagaaagcccgcgagcggctgcgcgcccaccaataggtgcggggctcggagccgcgcagcctgcgccgtccctccctccgcccccgccccgccgccgccgccgccgccgcctccccctcctcctgctcctgccttggctcctccgccgcgcgtctcgcactccgagagccgcagcggcagcggcgcgtcctgcctgcagagagccaggccggagaagccgagcggcgcagaggacgccagggcgcgcgccgcagccacccaccctccggaccgcggcagctgctgacccgccatcgccatggcccgcgggaaagccaaggaggagggcagctggaagaaattcatctggaactcagagaagaaggagtttctgggcaggaccggtggcagttggtttaagatccttctattctacgtaatattttatggctgcctggctggcatcttcatcggaaccatccaagtgatgctgctcaccatcagtgaatttaagcccacatatcaggaccgagtggccccgccaggattaacacagattcctcagatccagaagactgaaatttcctttcgtcctaatgatcccaagagctatgaggcatatgtactgaacatagttaggttcctggaaaagtacaaagattcagcccagagggatgacatgatttttgaagattgtggcgatgtgcccagtgaaccgaaagaacgaggagactttaatcatgaacgaggagagcgaaaggtctgcagattcaagcttgaatggctgggaaattgctctggattaaatgatgaaacttatggctacaaagagggcaaaccgtgcattattataaagctcaaccgagttctaggcttcaaacctaagcctcccaagaatgagtccttggagacttacccagtgatgaagtataacccaaatgtccttcccgttcagtgcactggcaagcgagatgaagataaggataaagttggaaatgtggagtattttggactgggcaactcccctggttttcctctgcagtattatccgtactatggcaaactcctgcagcccaaatacctgcagcccctgctggccgtacagttcaccaatcttaccatggacactgaaattcgcatagagtgtaaggcgtacggtgagaacattgggtacagtgagaaagaccgttttcagggacgttttgatgtaaaaattgaagttaagagctgatcacaagcacaaatctttcccactagccatttaataagttaaaaaaagatacaaaaacaaaaacctactagtcttgaacaaactgtcatacgtatgggacctacacttaatctatatgctttacactagctttctgcatttaataggttagaatgtaaattaaagtgtagcaatagcaacaaaatatttattctactgtaaatgacaaaagaaaaagaaaaattgagccttgggacgtgcccatttttactgtaaattatgattccgtaactgacttgtagtaagcagtgtttctggcccctaagtattgctgccttgtgtattttatttagtgtacagtactacaggtgcatactctggtcatttttcaagccatgttttattgtatctgttttctactttatgtgagcaaggtttgctgtccaaggtgtaaatattcaacgggaataaaactggcatggtaattttttttttttttttttttttgttttttggctctttcaaaggtaatggcccatcgatgagcatttttaacatactccatagtcttttcctgtggtgttaggtctttatttttatttttttcctgggggctggggtgggggtttgtcatgggggaactgccctttaaattttaagtgacactacagaaaaacacaaaaaggtgatgggttgtgttatgcttgtattgaatgctgtcttgacatctcttgccttgtcctccggtatgttctaaagctgtgtctgagatctggatctgcccatcactttggctagtgacagggctaattaatttgctttatacattttcttttactttccttttttcctttctggaggcatcacatgctggtgctgtgtctttatgaatgttttaaccattttcatggtggaagaattttatatttatgcagttgtacaattttatttttttctgcaagaaaaagtgtaatgtatgaaataaaccaaagtcacttgtttgaaaataaatctttattttgaactttataaaaagcaatgcagtaccccatagactggtgttaaatgttgtctacagtgcaaaatccatgttctaacatatgtaataattgccaggagtacagtgctcttgttgatcttgtattcagtcaggttaaaacaacggacaataaaagaatgaacacattc

SEQ ID NO: 110003 - DNA, 718 bp, Homo sapiens
  Payload ID: 1594
  Gene Symbol: ATP1B1
  Gene Name: ATPase, Na+/K+ transporting, beta 1 polypeptide
  ENST ID: ENST00000494797
  CDS Start-End: 329-718
atcatgaccatcaccaccaacaccactggcaccaccactgcagtcattcagggagtcctgaacagaggccgattggtgttcctgcttgggaggatctgtgggaatcggcaggagaatgagtcagggaaatagtgcttagctgacattttgaaatggaagaagctggaatatatgaatttttgtaaagaaaaaaaaatgcagcctgtgagtctctcttgattgaaaattaaagggttaataatgcatcacacttcaagttaagatccttctattctacgtaatattttatggctgcctggctggcatcttcatcggaaccatccaagtgatgctgctcaccatcagtgaatttaagcccacatatcaggaccgagtggccccgccaggattaacacagattcctcagatccagaagactgaaatttcctttcgtcctaatgatcccaagagctatgaggcatatgtactgaacatagttaggttcctggaaaagtacaaagattcagcccagagggatgacatgatttttgaagattgtggcgatgtgcccagtgaaccgaaagaacgaggagactttaatcatgaacgaggagagcgaaaggtctgcagattcaagcttgaatggctgggaaattgctctggattaaatgatgaaacttatggctacaaagagggcaaaccgtgcattattataaagctcaaccgagttctaggcttc

SEQ ID NO: 110004 - DNA, 3153 bp, Homo sapiens
  Payload ID: 1595
  Gene Symbol: ATP1B2
  Gene Name: ATPase, Na+/K+ transporting, beta 2 polypeptide
  Uniprot ID: P14415
  ENST ID: ENST00000250111
  CDS Start-End: 408-1280
ccacctctctctgcctttttgtaccccgctttttttctgcgttctgctcggtttttgtagccgtctgtttttgcaccccatttcgttttgtttctagacggtttggtggggggtgaagctgcattcataccccttcctcttgttattctcccctgctctgacagcaccccttttcatcgcagttggggggcctaggatcggtgcatcttccgccgcgctgccagcaccccgcagcgcgtggtcgtgcaccccggaatctgcagcagctgcatatctgaggggggtctcctttgcccgcgccgccttcgctccccgtgcttttgggtgtgtggagggcttcagcgcgcggcgcccccgcttctccgcaaccccccgccccgcgcccggactcgccccgcgccaccaagatggtcatccagaaagagaagaagagctgcgggcaggtggttgaggagtggaaggagttcgtgtggaacccgaggacgcaccagtttatgggccgcaccgggaccagctgggcctttatcctcctcttctacctcgttttttatgggttcctcaccgccatgttcaccctcaccatgtgggtgatgctgcagactgtctccgaccatacccccaagtaccaggaccgactggccacaccgggcttgatgattcgccccaagactgagaaccttgatgtcattgtcaatgtcagtgacactgaaagctgggaccagcatgttcagaagctcaacaagttcttggagccttacaacgactctatccaagcccaaaagaatgatgtctgccgccctggacgctattacgaacagccagataatggagtcctcaactaccccaaacgtgcctgccaattcaaccggacccagctgggcaactgctccggcattggggactccacccactatggttacagcactgggcagccctgtgtcttcatcaagatgaaccgggtcatcaacttctatgcaggagcaaaccagagcatgaatgttacctgtgctgggaagcgagatgaagatgctgagaatctcggcaacttcgtcatgttccccgccaacggcaacatcgacctcatgtacttcccctactatggcaaaaagttccacgtgaactacacacagcccctggtggctgtgaagttcctgaatgtgacccccaacgtggaggtgaatgtagaatgtcgcatcaacgccgccaacatcgccacagacgatgagcgagacaagttcgccggccgcgtggccttcaaactccgcatcaacaaaacctgaggccccttcctcccaccccatctctctcctgtggatgctcctggaatgtccctgaccctgcctgatccctccctcacccaccccaaaggtatttttgataacagagctatgacttgtctgagcctcacatccttttccttgacttctcaacccagcctgaagtccattgcggttccgtcactcgcctttcccaccaacttctcccaacctcagatcagtcagacagggagctgggctaagatggccacggaggagttaggagcctttctagttctggtttagctgtgagagctatccactctcctgcctgcatatcccctgagagttataggaagtgcccactgacccacccacccacctacaccccccgccacacacacacacaaacgtgcacacgcgtctcatttgacccctttgcttccagagatgaatgtggcactccctccttccattcctaagctctggccaccgtcccttgatctctcatactttctccctgtctacacagtcgccatcttggtgactttgaatttatctggctcctgggcaggtcttctcctcctctccatccctattccctcctctgaaatgcacccctttgtaattgaggacaaggtggttctgtggccttttccctctttgctggcacgttctgcttctcaccctctggtgactctgtgagctgggaaatgagggactggaagtgaggcctgtgttgacccttcctgaaaatcctctagcagcccccgacttcagcagtttctttctttgtttttttgagatggagtttcgctcttgttgcccaggctggagtgcaatggtgcaatctcagctcactgcaacttccgcatcccaggttcaagcgattctcccgcctcaggttcccgagtagctgggactacaggcatgtgccaccatgcccggctaatttctttctttctttttttttttttttgcattttttagtagagatgggggtttctccttgttggtcaggctggtctcgaactcccgacctcaggtgatccacctgcctcggcctcccaaagtgttgggattacaggcgtgagccaccgcgcccggccttcagtttcttcctaggccgttctgtcacccaaatagctgctacccagaggggcggggttgacctaggctgaatatccactttgtttttatggatggctcccttcccccattcgccttcccagaatatccttcaagttccacttcccagggagctctgggggaggggcggccattctggctccgtccccagtggccaccttggaaacatcggctggctttgggactattccacctccttcccctgagcccagatctgcccccaccatcctttctctggcttcttttagcaagttatcaactaatcactaactccttccttttcctctgcatgccagcctgaaaattccaaatctagcctctgaatgtcttggctccatctcttcagacccctttgcctttaaaaaaaaaacaaaaacaaaaacaaaaaaacccataatgcccacagaatgtcaaatgaggggcctcctgcctcctgctctgaatattctgtagctgtagaggcattttaaccctttgtcctccagcatcccttcacttcctcatcctctctaacctcctttttctttttttaatgctgcagcctccacactccacccacaggtggacccttccctttttctctagctggatctgtgtttcttcccttcgggcccccatgttttcctgcacccgccctaccatggtctctctctgcagttatttaatgcctgtgtcagatctactgtaaaaagaggattaagtaaaataaaatgagagcaattatatatataaatatatatcatacaca

SEQ ID NO: 110005 - DNA, 580 bp, Homo sapiens
  Payload ID: 1595
  Gene Symbol: ATP1B2
  Gene Name: ATPase, Na+/K+ transporting, beta 2 polypeptide
  ENST ID: ENST00000577026
  CDS Start-End: 81-580
agatgcaacatggacacagaattctggggaacctacaacgtgtgggagttcagccagactccagatgagtataaggcttgatgattcgccccaagactgagaaccttgatgtcattgtcaatgtcagtgacactgaaagctgggaccagcatgttcagaagctcaacaagttcttggagccttacaacgactctatccaagcccaaaagaatgatgtctgccgccctggacgctattacgaacagccagataatggagtcctcaactaccccaaacgtgcctgccaattcaaccggacccagctgggcaactgctccggcattggggactccacccactatggttacagcactgggcagccctgtgtcttcatcaagatgaaccgggtcatcaacttctatgcaggagcaaaccagagcatgaatgttacctgtgctgggaagcgagatgaagatgctgagaatctcggcaacttcgtcatgttccccgccaacggcaacatcgacctcatgtacttcccctactatggcaaaaagttccacgtgaactacacacagcccctggtggctgtgaagttcct

SEQ ID NO: 110006 - DNA, 557 bp, Homo sapiens
  Payload ID: 1595
  Gene Symbol: ATP1B2
  Gene Name: ATPase, Na+/K+ transporting, beta 2 polypeptide
  ENST ID: ENST00000577113
  CDS Start-End: 1-518
acgaacagccagataatggagtcctcaactaccccaaacgtgcctgccaattcaaccggacccagctgggcaactgctccggcattggggactccacccactatggttacagcactgggcagccctgtgtcttcatcaagatgaaccgggtcatcaacttctatgcaggagcaaaccagagcatgaatgttacctgtgctgggaagaggccccatcaccatagaaacaaggggaaactgattcctgaggatgggcgagatgaagatgctgagaatctcggcaacttcgtcatgttccccgccaacggcaacatcgacctcatgtacttcccctactatggcaaaaagttccacgtgaactacacacagcccctggtggctgtgaagttcctgaatgtgacccccaacgtggaggtgaatgtagaatgtcgcatcaacgccgccaacatcgccacagacgatgagcgagacaagttcgccggccgcgtggccttcaaactccgcatcaacaaaacctgaggccccttcctcccaccccatctctctcctgtggatgct

SEQ ID NO: 110007 - DNA, 1811 bp, Homo sapiens
  Payload ID: 1596
  Gene Symbol: ATP1B3
  Gene Name: ATPase, Na+/K+ transporting, beta 3 polypeptide
  Uniprot ID: P54709
  ENST ID: ENST00000286371
  CDS Start-End: 189-1028
ccaagcggccgcccggcgcggcgcggcgcagtcggctcgagtactccccgtaacgaggaggtgttctcggccgtcccacccttcactgccgtctccgggctgcgccgccggagccgggacgcgcctccgcagccctcgccgcctccatccccgcggccgcagctcctctcgccgtccgcgcgcacaccatgacgaagaacgagaagaagtccctcaaccagagcctggccgagtggaagctcttcatctacaacccgaccaccggagaattcctggggcgcaccgccaagagctggggtttgatcttgctcttctacctagttttttatgggttcctggctgcactcttctcattcacgatgtgggttatgcttcagactctcaacgatgaggttccaaaataccgtgaccagattcctagcccaggactcatggtttttccaaaaccagtgaccgcattggaatatacattcagtaggtctgatccaacttcgtatgcagggtacattgaagaccttaagaagtttctaaaaccatatactttagaagaacagaagaacctcacagtctgtcctgatggagcactttttgaacagaagggtccagtttatgttgcatgtcagtttcctatttcattacttcaagcatgcagtggtatgaatgatcctgattttggctattctcaaggaaacccttgtattcttgtgaaaatgaacagaataattggattaaagcctgaaggagtgccaaggatagattgtgtttcaaagaatgaagatataccaaatgtagcagtttatcctcataatggaatgatagacttaaaatatttcccatattatgggaaaaaactgcatgttgggtatctacagccattggttgctgttcaggtcagctttgctcctaacaacactgggaaagaagtaacagttgagtgcaagattgatggatcagccaacctaaaaagtcaggatgatcgtgacaagtttttgggacgagttatgttcaaaatcacagcacgtgcatagtatgagtaggatatctccacagagtaaatgttgtgttgtctgtcttcattttgtaacagctggaccttccattctagaattatgagaccaccttggagaaaggtgtgtggtacatgacattgggttacatcataacgtgcttccagatcatagtgttcagtgtcctctgaagtaactgcctgttgcctctgctgccctttgaaccagtgtacagtcgccagatagggaccggtgaacacctgattccaaacatgtaggatgggggtcttgtcctctttttatgtggtttaattgccaagtgtctaaagcttaatatgccgtgctatgtaaatattttatggatataacaactgtcatattttgatgtcaacagagttttagggataaaatggtacccggccaacatcaagtgactttatagctgcaagaaatgtggtatgtggagaagttctgtatgtgaggaaggaaaaaaagaaaataaaagtgtgtttgaaaaatattatcttgggttctttgtaaaatttattttttacatgctgaattagcctcgatctttttgattaagagcacaaacttttttttgtaaaacatgtaaaaaaaaaaactgggattaatttttagtgttggaactgcctcttattttaggctgtagataaaatagcatttttaggttagccagtgtgactatgcacctaattttttatgagattaaattcataagacttaatttgtacaatagtttgtgaaatatcttgttactgcttttatttagcagactgtgga

SEQ ID NO: 110008 - DNA, 734 bp, Homo sapiens
  Payload ID: 1596
  Gene Symbol: ATP1B3
  Gene Name: ATPase, Na+/K+ transporting, beta 3 polypeptide
  ENST ID: ENST00000475483
  CDS Start-End: 334-734
gtcacagagcccagagagcgtcctgtaggaacgtcacagagcccagagaacgcctggggacggtcggggaggcagttcggggaggggacgattaagttccctcagagaggaagccgcgggccgactggagtcgttttcgtgctctccgcacccgcccgccgcgggtagcatcttctcagcgccccggcgcccaggaacgcccaggaaacccagtcctcctcctaagcaacctgcggcgcggggacgcccgccttttgctattattataaacgtttgatcttgctcttctacctagttttttatgggttcctggctgcactcttctcattcacgatgtgggttatgcttcagactctcaacgatgaggttccaaaataccgtgaccagattcctagcccaggactcatggtttttccaaaaccagtgaccgcattggaatatacattcagtaggtctgatccaacttcgtatgcagggtacattgaagaccttaagaagtttctaaaaccatatactttagaagaacagaagaacctcacagtctgtcctgatggagcactttttgaacagaagggtccagtttatgttgcatgtcagtttcctatttcattacttcaagcatgcagtggtatgaatgatcctgattttggctattctcaaggaaacccttgtattcttgtgaaaatgaacagaataattggattaaagcctgaaggagtgccaaggatagattg

SEQ ID NO: 110009 - DNA, 421 bp, Homo sapiens
  Payload ID: 1596
  Gene Symbol: ATP1B3
  Gene Name: ATPase, Na+/K+ transporting, beta 3 polypeptide
  ENST ID: ENST00000487199
  CDS Start-End: 1-84
ataattggattaaagcctgaaggagtgccaaggatagattgtgtttcaaagttagttggcgtgctagtcatcagtgctatctgagatttaatgaaatatggtgcattttccttaagacaaataatgtaaaagatggaatgaagatataccaaatgtagcagtttatcctcataatggaatgatagacttaaaatatttcccatattatgggaaaaaactgcatgttgggtatctacagccattggttgctgttcaggtcagctttgctcctaacaacactgggaaagaagtaacagttgagtgcaagattgatggatcagccaacctaaaaagtcaggatgatcgtgacaagtttttgggacgagttatgttcaaaatcacagcacgtgcatagtatgagtaggatatctccacagagtaa

SEQ ID NO: 110010 - DNA, 1951 bp, Homo sapiens
  Payload ID: 1596
  Gene Symbol: ATP1B3
  Gene Name: ATPase, Na+/K+ transporting, beta 3 polypeptide
  ENST ID: ENST00000465172
  CDS Start-End: 187-321
aagcggccgcccggcgcggcgcggcgcagtcggctcgagtactccccgtaacgaggaggtgttctcggccgtcccacccttcactgccgtctccgggctgcgccgccggagccgggacgcgcctccgcagccctcgccgcctccatccccgcggccgcagctcctctcgccgtccgcgcgcacaccatgacgaagaacgagaagaagtccctcaaccagagcctggccgagtggaagctcttcatctacaacccgaccaccggagaattcctggggcgcaccgccaagagctggggatcgcagtatgtggtagggaagtgatgctgtctgaaggtgacatcctgttctcctctcttctgtcctctccatccttattttggccacctggtttgatcttgctcttctacctagttttttatgggttcctggctgcactcttctcattcacgatgtgggttatgcttcagactctcaacgatgaggttccaaaataccgtgaccagattcctagcccaggactcatggtttttccaaaaccagtgaccgcattggaatatacattcagtaggtctgatccaacttcgtatgcagggtacattgaagaccttaagaagtttctaaaaccatatactttagaagaacagaagaacctcacagtctgtcctgatggagcactttttgaacagaagggtccagtttatgttgcatgtcagtttcctatttcattacttcaagcatgcagtggtatgaatgatcctgattttggctattctcaaggaaacccttgtattcttgtgaaaatgaacagaataattggattaaagcctgaaggagtgccaaggatagattgtgtttcaaagacaaataatgtaaaagatggaatgaagatataccaaatgtagcagtttatcctcataatggaatgatagacttaaaatatttcccatattatgggaaaaaactgcatgttgggtatctacagccattggttgctgttcaggtcagctttgctcctaacaacactgggaaagaagtaacagttgagtgcaagattgatggatcagccaacctaaaaagtcaggatgatcgtgacaagtttttgggacgagttatgttcaaaatcacagcacgtgcatagtatgagtaggatatctccacagagtaaatgttgtgttgtctgtcttcattttgtaacagctggaccttccattctagaattatgagaccaccttggagaaaggtgtgtggtacatgacattgggttacatcataacgtgcttccagatcatagtgttcagtgtcctctgaagtaactgcctgttgcctctgctgccctttgaaccagtgtacagtcgccagatagggaccggtgaacacctgattccaaacatgtaggatgggggtcttgtcctctttttatgtggtttaattgccaagtgtctaaagcttaatatgccgtgctatgtaaatattttatggatataacaactgtcatattttgatgtcaacagagttttagggataaaatggtacccggccaacatcaagtgactttatagctgcaagaaatgtggtatgtggagaagttctgtatgtgaggaaggaaaaaaagaaaataaaagtgtgtttgaaaaatattatcttgggttctttgtaaaatttattttttacatgctgaattagcctcgatctttttgattaagagcacaaacttttttttgtaaaacatgtaaaaaaaaaaactgggattaatttttagtgttggaactgcctcttattttaggctgtagataaaatagcatttttaggttagccagtgtgactatgcacctaattttttatgagattaaattcataagacttaatttgtacaatagtttgtgaaatatcttgttactgcttttatttagcagactgtggactgtaataaagtatataaattgtgaaatat

SEQ ID NO: 110011 - DNA, 837 bp, Homo sapiens
  Payload ID: 1596
  Gene Symbol: ATP1B3
  Gene Name: ATPase, Na+/K+ transporting, beta 3 polypeptide
  ENST ID: ENST00000462082
  CDS Start-End: 87-356
cttcatctacaacccgaccaccggagaattcctggggcgcaccgccaagagctggggtttgatcttgctcttctacctagttttttatgggttcctggctgcactcttctcattcacgatgtgggttatgcttcagactctcaacgatgaggttccaaaataccgtgaccagattcctagcccaggttgggtatctacagccattggttgctgttcaggtcagctttgctcctaacaacactgggaaagaagtaacagttgagtgcaagattgatggatcagccaacctaaaaagtcaggatgatcgtgacaagtttttgggacgagttatgttcaaaatcacagcacgtgcatagtatgagtaggatatctccacagagtaaatgttgtgttgtctgtcttcattttgtaacagctggaccttccattctagaattatgagaccaccttggagaaaggtgtgtggtacatgacattgggttacatcataacgtgcttccagatcatagtgttcagtgtcctctgaagtaactgcctgttgcctctgctgccctttgaaccagtgtacagtcgccagatagggaccggtgaacacctgattccaaacatgtaggatgggggtcttgtcctctttttatgtggtttaattgccaagtgtctaaagcttaatatgccgtgctatgtaaatattttatggatataacaactgtcatattttgatgtcaacagagttttagggataaaatggtacccggccaacatcaagtgactttatagctgcaagaaatgtggtatgtggagaagttctgtatgtgaggaaggaaaaaaagaaaataa

SEQ ID NO: 110012 - DNA, 1708 bp, Homo sapiens
  Payload ID: 1596
  Gene Symbol: ATP1B3
  Gene Name: ATPase, Na+/K+ transporting, beta 3 polypeptide
  ENST ID: ENST00000466678
  CDS Start-End: 1-131
cgaagaacgagaagaagtccctcaaccagagcctggccgagtggaagctcttcatctacaacccgaccaccggagaattcctggggcgcaccgccaagagctggggatcgcagtatgtggtagggaagtgatgctgtctgaaggtgacatcctgttctcctctcttctgtcctctccatccttattttggccacctggtttgatcttgctcttctacctagttttttatgggttcctggctgcactcttctcattcacgatgtgggttatgcttcagactctcaacgatgaggttccaaaataccgtgaccagattcctagcccaggactcatggtttttccaaaaccagtgaccgcattggaatatacattcagtaggtctgatccaacttcgtatgcagggtacattgaagaccttaagaagtttctaaaaccatatactttagaagaacagaagaacctcacagtctgtcctgatggagcactttttgaacagaagggtccagtttatgttgcatgtcagtttcctatttcattacttcaagcatgcagtggtatgaatgatcctgattttggctattctcaaggaaacccttgtattcttgtgaaaatgaacagaataattggattaaagcctgaaggagtgccaaggatagattgtgtttcaaagaatgaagatataccaaatgtagcagtttatcctcataatggaatgatagacttaaaatatttcccatattatgggaaaaaactgcatgttgggtatctacagccattggttgctgttcaggtcagctttgctcctaacaacactgggaaagaagtaacagttgagtgcaagattgatggatcagccaacctaaaaagtcaggatgatcgtgacaagtttttgggacgagttatgttcaaaatcacagcacgtgcatagtatgagtaggatatctccacagagtaaatgttgtgttgtctgtcttcattttgtaacagctggaccttccattctagaattatgagaccaccttggagaaaggtgtgtggtacatgacattgggttacatcataacgtgcttccagatcatagtgttcagtgtcctctgaagtaactgcctgttgcctctgctgccctttgaaccagtgtacagtcgccagatagggaccggtgaacacctgattccaaacatgtaggatgggggtcttgtcctctttttatgtggtttaattgccaagtgtctaaagcttaatatgccgtgctatgtaaatattttatggatataacaactgtcatattttgatgtcaacagagttttagggataaaatggtacccggccaacatcaagtgactttatagctgcaagaaatgtggtatgtggagaagttctgtatgtgaggaaggaaaaaaagaaaataaaagtgtgtttgaaaaatattatcttgggttctttgtaaaatttattttttacatgctgaattagcctcgatctttttgattaagagcacaaacttttttttgtaaaacatgtaaaaaaaaaaactgggattaatttttagtgttggaactgcctcttattttaggctgtagataaaatagcatttttaggttagccagtgtgactatgcacctaattttttatgagattaaattcataagacttaatttgtacaatagtttgtgaaatatcttgttactgcttttatttagcagactgt

SEQ ID NO: 110013 - DNA, 418 bp, Homo sapiens
  Payload ID: 1596
  Gene Symbol: ATP1B3
  Gene Name: ATPase, Na+/K+ transporting, beta 3 polypeptide
  ENST ID: ENST00000495216
  CDS Start-End: 60-418
cttgaatttggacagtgaaaaggcccttaaaaaggatcgcagtatgtggtagggaagtgatgctgtctgaaggtgacatcctgttctcctctcttctgtcctctccatccttattttggccacctggtttgatcttgctcttctacctagttttttatgggttcctggctgcactcttctcattcacgatgtgggttatgcttcagactctcaacgatgaggttccaaaataccgtgaccagattcctagcccaggactcatggtttttccaaaaccagtgaccgcattggaatatacattcagtaggtctgatccaacttcgtatgcagggtacattgaagaccttaagaagtttctaaaaccatatactttagaagaacagaagaacctcacagtctgtcctgatggagcactttt

SEQ ID NO: 110014 - DNA, 3868 bp, Homo sapiens
  Payload ID: 1597
  Gene Symbol: ATP1B4
  Gene Name: ATPase, Na+/K+ transporting, beta 4 polypeptide
  Uniprot ID: Q9UN42
  ENST ID: ENST00000218008
  CDS Start-End: 58-1131
ctccagaactctcacccgattgcctgcctctgctgcgtctttgcccactgaacagccatgagaaggcaactccggtccagaagggctccatcctttccttacagttatcgctacagactcgatgatccggatgaagcgaaccagaactacttagcagatgaagaggaggaagcagaagaagaggctcgggtgacggtggtgcccaaatcggaggaggaggaagaagaggaggagaaagaagaggaggaagaggaggaaaaggaggaggaagagggtcaaggtcagccaacaggcaatgcctggtggcagaaattgcagatcatgagtgaatacctgtgggatccagagagaaggatgtttctggcccgaacaggtcagagttggagcctgatcttactcatttacttcttcttctatgcctccttggctgctgtgatcaccctctgcatgtacacactatttctgaccatcagtccctatataccaaccttcacggagcgggtaaagcctcctggagttatgatcagacccttcgcccatagccttaacttcaacttcaacgtttctgaacccgacacttggcagcattatgtgattagcctaaatggctttctccagggttataatgacagtcttcaagaggaaatgaatgtagattgtcccccggggcagtacttcatccaagatggcaatgaggatgaggacaagaaggcctgccaatttaagcgctccttcctaaagaactgctctggtctggaggacccaacttttggatactctactggacagccctgcatccttctaaagatgaaccggattgtaggctttcgtcctgagcttggagatcctgtgaaggtttcctgcaaagttcagagaggtgatgaaaatgacatccgatccatcagttactacccagagtcggcttcttttgacctccgctactacccttactacggcaaactgactcacgttaactacacatcccccttggtggcaatgcactttacagacgtggtgaagaaccaagcagtgcctgtgcagtgccaactgaagggcaaaggcgtcataaatgatgtcatcaatgatcgttttgtgggcagggtaatctttaccctgaacatagaaacttaagaacttcagggggccattcttaccagttctgtttctgttttatctcatggtatctctggtagcacctgaattctttttcttcaattaggacacagccagatggacatctaagacagccgatcatctttccttgcctatgacatgtgtataaaatgacattgtgggagctgttcgattttttaaaggtagtgtctcctgatgacaaacagagtatattaatttcctttccctccacttaaaactaaagcctgttcttgctgctggtaatctccctgtagcgtaaacatagtatctgataaaatttacaatagccacgcaatagccatcaaggagaatttctattatgattataaattcatcatgttttctaaaattctgttggttttagaggtcagattcctcccaaccaggctaataacctaacacatgtttaaaaaaaatctgcctaagccgggtgtggtggcatgcatctgtagtcccacctattcaggagattaaggcaggaggatcacttgagcccaggaggtcaaggctgcagtgagctgcactgcattccagcctgggtgacagagtgagatcctgtctctgaagaaaaaaaaaacctgcctggcaaggtccttccctgggaatcaccactcggtccaacctagacaaccaagaccgctatacctaaagacctctatatcctggtgcctaagaaacttctgcctcccacagacaactaagtgcttattcaaagactaggttattttcaactgggaaaaaagcagtgctaacaggatattgttctgggatagagatgaagaccgtccttgtgactttttaaagaggtggggctcactgcaactggggagaacacttagcatatggatatgattggtgtttgattccttgctctctggtgtaatcgtctaaaggcaaacattcctgcaaacaggtttttctcagcttcaggcagaggagacaacatggaagaagattcccaccagctaattcttcttgggctatttgtttgacagtagcatgatgttttttgagaccatcaggggtggttacatagaccagcagctacagctctggaaattgaaatcataatctgtcaatgaatacatgacaagacagaacgttccttgccaggccaggcaaaagccaaggcccattagccagtttagcatttactttaaaaatgacatgaggcagattcttatccaggatgtggatcagccaggtcactttgtcttatctttggtcacctgatcactcaactgcttcttaacacctccaccagggggaaggctggcacaaggagaaaaaaaaagcaagcatcagcgaatagtatagtgtctcagggtccgaagcaagtttaaatgccacctaggaggatccaaagtctgaatctcctctacaatgtttcctttctcccaaaacagggaactgactgtctggtagtgaagacaagcaagtggagaagttatacgatatagtttaatgagagttaaaaaactagtatgtggaaagctatgggaatatgaggaaaaatatcttgagctaagaaagtagcagaggaaatttcacatgcaaagccacagtcatgaagagaccatggtgtgtctgggtaactgtgagcagtttatgtaactggaatgaaaagggctcagaggaatggcagggatggcaagagatccagctagagaggtattcagggatggaaagaggactttgagttttatccaataggtgaaaatgagtaattaaagcattttaatcagggaggctctgtgatcacatttgtgttttattttattttactttattatttatttgtttatttttgagatggagtttcgctgttgtcacccaggctggagtgcagtggtgtgatctcggctcactgcaacctccacctcccggattcaagtgattctccagcctcagcctcctgagtagctgggattacaggcacacaccaccatgcccagctaacttttgtatttttggcggagacagggtttcaccatgttggccaggctggtctcgaactcctgacctcaagtgatccgcctgcctcagcctcccacagtgctgggattacaggcgtgagccaccgcacccggcttgcaatttagaaagggcacttggcaaccactatgtgaagggtgattggagaaggacaagactgtggaatggggaataaggaaggaggagtttggagaatgactccaaaggtttgagcttggctagaaccggtaagatggtgacattgttgatcaagactgggaatataagagagaagcaggtttggagagatcaattttgaacattttagacatgattttctattggtcagacattgatgtggagatgtaaacacatgtagggttggtgagaaggaaagatgagaacaaaagcaacattgggttaagggaactcgcttaagaaattttaagctatttaatcttgggaactgaagccagtcatgtaaacatactataccaatctagtccctaacagtgttttttctcttgtggcagaaagaattgctgttcctctttggaatctccttcccagacaccttcaaagtcttattgacacagtaaagggaggccaaccactactaacaagttctagaagatataggatcttctatagtaggttaatggaaaatacaaaaacaaacaaacatacaatgaaactgcctcctctcaacccattttcttaacaaattcaattttcaaaa

SEQ ID NO: 110015 - DNA, 3856 bp, Homo sapiens
  Payload ID: 1597
  Gene Symbol: ATP1B4
  Gene Name: ATPase, Na+/K+ transporting, beta 4 polypeptide
  Uniprot ID: Q9UN42
  ENST ID: ENST00000361319
  CDS Start-End: 58-1119
ctccagaactctcacccgattgcctgcctctgctgcgtctttgcccactgaacagccatgagaaggcaactccggtccagaagggctccatcctttccttacagttatcgctacagactcgatgatccggatgaagcgaaccagaactacttagcagatgaagaggaggaagcagaagaagaggctcgggtgacggtggtgcccaaatcggaggaggaggaagaagaggaggagaaagaagaggaggaagaggaggaaaaggaggaggaagagggtcaaggtcagccaacaggcaatgcctggtggcagaaattgcagatcatgagtgaatacctgtgggatccagagagaaggatgtttctggcccgaacaggcctgatcttactcatttacttcttcttctatgcctccttggctgctgtgatcaccctctgcatgtacacactatttctgaccatcagtccctatataccaaccttcacggagcgggtaaagcctcctggagttatgatcagacccttcgcccatagccttaacttcaacttcaacgtttctgaacccgacacttggcagcattatgtgattagcctaaatggctttctccagggttataatgacagtcttcaagaggaaatgaatgtagattgtcccccggggcagtacttcatccaagatggcaatgaggatgaggacaagaaggcctgccaatttaagcgctccttcctaaagaactgctctggtctggaggacccaacttttggatactctactggacagccctgcatccttctaaagatgaaccggattgtaggctttcgtcctgagcttggagatcctgtgaaggtttcctgcaaagttcagagaggtgatgaaaatgacatccgatccatcagttactacccagagtcggcttcttttgacctccgctactacccttactacggcaaactgactcacgttaactacacatcccccttggtggcaatgcactttacagacgtggtgaagaaccaagcagtgcctgtgcagtgccaactgaagggcaaaggcgtcataaatgatgtcatcaatgatcgttttgtgggcagggtaatctttaccctgaacatagaaacttaagaacttcagggggccattcttaccagttctgtttctgttttatctcatggtatctctggtagcacctgaattctttttcttcaattaggacacagccagatggacatctaagacagccgatcatctttccttgcctatgacatgtgtataaaatgacattgtgggagctgttcgattttttaaaggtagtgtctcctgatgacaaacagagtatattaatttcctttccctccacttaaaactaaagcctgttcttgctgctggtaatctccctgtagcgtaaacatagtatctgataaaatttacaatagccacgcaatagccatcaaggagaatttctattatgattataaattcatcatgttttctaaaattctgttggttttagaggtcagattcctcccaaccaggctaataacctaacacatgtttaaaaaaaatctgcctaagccgggtgtggtggcatgcatctgtagtcccacctattcaggagattaaggcaggaggatcacttgagcccaggaggtcaaggctgcagtgagctgcactgcattccagcctgggtgacagagtgagatcctgtctctgaagaaaaaaaaaacctgcctggcaaggtccttccctgggaatcaccactcggtccaacctagacaaccaagaccgctatacctaaagacctctatatcctggtgcctaagaaacttctgcctcccacagacaactaagtgcttattcaaagactaggttattttcaactgggaaaaaagcagtgctaacaggatattgttctgggatagagatgaagaccgtccttgtgactttttaaagaggtggggctcactgcaactggggagaacacttagcatatggatatgattggtgtttgattccttgctctctggtgtaatcgtctaaaggcaaacattcctgcaaacaggtttttctcagcttcaggcagaggagacaacatggaagaagattcccaccagctaattcttcttgggctatttgtttgacagtagcatgatgttttttgagaccatcaggggtggttacatagaccagcagctacagctctggaaattgaaatcataatctgtcaatgaatacatgacaagacagaacgttccttgccaggccaggcaaaagccaaggcccattagccagtttagcatttactttaaaaatgacatgaggcagattcttatccaggatgtggatcagccaggtcactttgtcttatctttggtcacctgatcactcaactgcttcttaacacctccaccagggggaaggctggcacaaggagaaaaaaaaagcaagcatcagcgaatagtatagtgtctcagggtccgaagcaagtttaaatgccacctaggaggatccaaagtctgaatctcctctacaatgtttcctttctcccaaaacagggaactgactgtctggtagtgaagacaagcaagtggagaagttatacgatatagtttaatgagagttaaaaaactagtatgtggaaagctatgggaatatgaggaaaaatatcttgagctaagaaagtagcagaggaaatttcacatgcaaagccacagtcatgaagagaccatggtgtgtctgggtaactgtgagcagtttatgtaactggaatgaaaagggctcagaggaatggcagggatggcaagagatccagctagagaggtattcagggatggaaagaggactttgagttttatccaataggtgaaaatgagtaattaaagcattttaatcagggaggctctgtgatcacatttgtgttttattttattttactttattatttatttgtttatttttgagatggagtttcgctgttgtcacccaggctggagtgcagtggtgtgatctcggctcactgcaacctccacctcccggattcaagtgattctccagcctcagcctcctgagtagctgggattacaggcacacaccaccatgcccagctaacttttgtatttttggcggagacagggtttcaccatgttggccaggctggtctcgaactcctgacctcaagtgatccgcctgcctcagcctcccacagtgctgggattacaggcgtgagccaccgcacccggcttgcaatttagaaagggcacttggcaaccactatgtgaagggtgattggagaaggacaagactgtggaatggggaataaggaaggaggagtttggagaatgactccaaaggtttgagcttggctagaaccggtaagatggtgacattgttgatcaagactgggaatataagagagaagcaggtttggagagatcaattttgaacattttagacatgattttctattggtcagacattgatgtggagatgtaaacacatgtagggttggtgagaaggaaagatgagaacaaaagcaacattgggttaagggaactcgcttaagaaattttaagctatttaatcttgggaactgaagccagtcatgtaaacatactataccaatctagtccctaacagtgttttttctcttgtggcagaaagaattgctgttcctctttggaatctccttcccagacaccttcaaagtcttattgacacagtaaagggaggccaaccactactaacaagttctagaagatataggatcttctatagtaggttaatggaaaatacaaaaacaaacaaacatacaatgaaactgcctcctctcaacccattttcttaacaaattcaattttcaaaa

SEQ ID NO: 110016 - DNA, 4644 bp, Homo sapiens
  Payload ID: 1597
  Gene Symbol: ATP1B4
  Gene Name: ATPase, Na+/K+ transporting, beta 4 polypeptide
  ENST ID: ENST00000539306
  CDS Start-End: 85-1029
aaccagtgtctcctgtaccagcagaagctccagaactctcacccgattgcctgcctctgctgcgtctttgcccactgaacagccatgagaaggcaactccggtccagaagggctccatcctttccttacagttatcgctacagactcgatgatccggatgaagcgaaccagaactacttagcagatgaagaggaggaagcagaagaagaggctcgggtgacggtggtgcccaaatcggaggaggaggaagaagaggaggagaaagaagaggaggaagaggaggaaaaggaggaggaagagggtcaaggtcagccaacaggcaatgcctggtggcagaaattgcagatcatgagtgaatacctgtgggatccagagagaaggatgtttctggcccgaacaggtcagagttggagagttatgatcagacccttcgcccatagccttaacttcaacttcaacgtttctgaacccgacacttggcagcattatgtgattagcctaaatggctttctccagggttataatgacagtcttcaagaggaaatgaatgtagattgtcccccggggcagtacttcatccaagatggcaatgaggatgaggacaagaaggcctgccaatttaagcgctccttcctaaagaactgctctggtctggaggacccaacttttggatactctactggacagccctgcatccttctaaagatgaaccggattgtaggctttcgtcctgagcttggagatcctgtgaaggtttcctgcaaagttcagagaggtgatgaaaatgacatccgatccatcagttactacccagagtcggcttcttttgacctccgctactacccttactacggcaaactgactcacgttaactacacatcccccttggtggcaatgcactttacagacgtggtgaagaaccaagcagtgcctgtgcagtgccaactgaagggcaaaggcgtcataaatgatgtcatcaatgatcgttttgtgggcagggtaatctttaccctgaacatagaaacttaagaacttcagggggccattcttaccagttctgtttctgttttatctcatggtatctctggtagcacctgaattctttttcttcaattaggacacagccagatggacatctaagacagccgatcatctttccttgcctatgacatgtgtataaaatgacattgtgggagctgttcgattttttaaaggtagtgtctcctgatgacaaacagagtatattaatttcctttccctccacttaaaactaaagcctgttcttgctgctggtaatctccctgtagcgtaaacatagtatctgataaaatttacaatagccacgcaatagccatcaaggagaatttctattatgattataaattcatcatgttttctaaaattctgttggttttagaggtcagattcctcccaaccaggctaataacctaacacatgtttaaaaaaaatctgcctaagccgggtgtggtggcatgcatctgtagtcccacctattcaggagattaaggcaggaggatcacttgagcccaggaggtcaaggctgcagtgagctgcactgcattccagcctgggtgacagagtgagatcctgtctctgaagaaaaaaaaaacctgcctggcaaggtccttccctgggaatcaccactcggtccaacctagacaaccaagaccgctatacctaaagacctctatatcctggtgcctaagaaacttctgcctcccacagacaactaagtgcttattcaaagactaggttattttcaactgggaaaaaagcagtgctaacaggatattgttctgggatagagatgaagaccgtccttgtgactttttaaagaggtggggctcactgcaactggggagaacacttagcatatggatatgattggtgtttgattccttgctctctggtgtaatcgtctaaaggcaaacattcctgcaaacaggtttttctcagcttcaggcagaggagacaacatggaagaagattcccaccagctaattcttcttgggctatttgtttgacagtagcatgatgttttttgagaccatcaggggtggttacatagaccagcagctacagctctggaaattgaaatcataatctgtcaatgaatacatgacaagacagaacgttccttgccaggccaggcaaaagccaaggcccattagccagtttagcatttactttaaaaatgacatgaggcagattcttatccaggatgtggatcagccaggtcactttgtcttatctttggtcacctgatcactcaactgcttcttaacacctccaccagggggaaggctggcacaaggagaaaaaaaaagcaagcatcagcgaatagtatagtgtctcagggtccgaagcaagtttaaatgccacctaggaggatccaaagtctgaatctcctctacaatgtttcctttctcccaaaacagggaactgactgtctggtagtgaagacaagcaagtggagaagttatacgatatagtttaatgagagttaaaaaactagtatgtggaaagctatgggaatatgaggaaaaatatcttgagctaagaaagtagcagaggaaatttcacatgcaaagccacagtcatgaagagaccatggtgtgtctgggtaactgtgagcagtttatgtaactggaatgaaaagggctcagaggaatggcagggatggcaagagatccagctagagaggtattcagggatggaaagaggactttgagttttatccaataggtgaaaatgagtaattaaagcattttaatcagggaggctctgtgatcacatttgtgttttattttattttactttattatttatttgtttatttttgagatggagtttcgctgttgtcacccaggctggagtgcagtggtgtgatctcggctcactgcaacctccacctcccggattcaagtgattctccagcctcagcctcctgagtagctgggattacaggcacacaccaccatgcccagctaacttttgtatttttggcggagacagggtttcaccatgttggccaggctggtctcgaactcctgacctcaagtgatccgcctgcctcagcctcccacagtgctgggattacaggcgtgagccaccgcacccggcttgcaatttagaaagggcacttggcaaccactatgtgaagggtgattggagaaggacaagactgtggaatggggaataaggaaggaggagtttggagaatgactccaaaggtttgagcttggctagaaccggtaagatggtgacattgttgatcaagactgggaatataagagagaagcaggtttggagagatcaattttgaacattttagacatgattttctattggtcagacattgatgtggagatgtaaacacatgtagggttggtgagaaggaaagatgagaacaaaagcaacattgggttaagggaactcgcttaagaaattttaagctatttaatcttgggaactgaagccagtcatgtaaacatactataccaatctagtccctaacagtgttttttctcttgtggcagaaagaattgctgttcctctttggaatctccttcccagacaccttcaaagtcttattgacacagtaaagggaggccaaccactactaacaagttctagaagatataggatcttctatagtaggttaatggaaaatacaaaaacaaacaaacatacaatgaaactgcctcctctcaacccattttcttaacaaattcaattttcaaaactaacctttaaaaagaaaaggaacaaaatgaaaaagacaataacttttaaaccacttgaaaattacctcaatcaaactctcaagattcagtagtaaaagataatagaatgttagatctggaaaggatattagagagtgtttagaaaaaacaacttgcattgcatctgactccaggtccagtgctctttctactctgagctgctgcttaccagaaagtaccatcttcttaaaaatcaatgaatgatatcccaaacattttgaaacgtatgtaaattttgagttaaaatagttaacatttcacaggaattcaactactggtgctatactttatacataatacattatcctgttaaatgcattgactattagacaaggaattatgaatcatttgtcaaataatatttatctttcaatggaatccattgtgtccacaattgcaaagcaatattgaagggtactaagatagtttgggttgtcagctaggacatgaaaaatgtaggtttactatacagaactggatatgataatatattcattaaagttatgttctaactgttcaatagacttctagtagattaatttaaatagttccccataccgtgctgcatcaggatttgatttgtatgccatctgttgcaatgcacttggttttacttgcttgtcaatgagaaatactacttccaaatgtcttcatggttttgtccatactggactttgggttatgatttttcaccttctactcccctgaaatcattatcctaaagtaactttttttaggcacctattttctggggatcaacatgtaaaaaaacatttatattgtcttgaggagttgtcaacaacaataaattgaaataaaaaagaaatgtatgattttc

SEQ ID NO: 110017 - DNA, 923 bp, Homo sapiens
  Payload ID: 1598
  Gene Symbol: ABCA1
  Gene Name: ATP-binding cassette, sub-family A (ABC1), member 1
  ENST ID: ENST00000374733
  CDS Start-End: 320-691
gtgagtggggccgggacccgcagagccgagccgacccttctctcccgggctgcggcagggcagggcggggagctccgcgcaccaacagagccggttctcagggcgctttgctccttgttttttccccggttctgttttctccccttctccggaaggcttgtcaaggggtaggagaaagagacgcaaacacaaaagtggaaaacagtgtcagctgctgctggaagtggcctggcctctatttatcttcctgatcctgatctctgttcggctgagctacccaccctatgaacaacatgaatgccattttccaaataaagccatgccctctgcaggaacacttccttgggttcaggggattatctgtaatgccaacaacccctgtttccgttacccgactcctggggaggctcccggagttgttggaaactttaacaaatccattgtggctcgcctgttctcagatgctcggaggcttcttttatacagccagaaagacaccagcatgaaggacatgcgcaaagttctgagaacattacagcagatcaagaaatccagctcaaacttgaagcttcaagatttcctggtggacaatgaaaccttctctgggttcctgtatcacaacctctctctcccaaagtctactgtggacaagatgctgagggctgatgtcattctccacaaggtaagctgatgcctccagcttcctcagtagggctgatggcaattacgttgtgcagctactggaaagaaatgaataaacccttgtccttgtaatggtggtgaaggggagggaggtagtttgaatacaacttcacttaattttacttccctattcaggcaggaattgccaaaccatccaggagtggaatatgcaacctggcgtcatgggccagctggttaaaataaaattgatttctggctta

SEQ ID NO: 110018 - DNA, 10494 bp, Homo sapiens
  Payload ID: 1598
  Gene Symbol: ABCA1
  Gene Name: ATP-binding cassette, sub-family A (ABC1), member 1
  Uniprot ID: O95477
  ENST ID: ENST00000374736
  CDS Start-End: 396-7181
agagcacaggctttgaccgatagtaacctctgcgctcggtgcagccgaatctataaaaggaactagtcccggcaaaaaccccgtaattgcgagcgagagtgagtggggccgggacccgcagagccgagccgacccttctctcccgggctgcggcagggcagggcggggagctccgcgcaccaacagagccggttctcagggcgctttgctccttgttttttccccggttctgttttctccccttctccggaaggcttgtcaaggggtaggagaaagagacgcaaacacaaaagtggaaaacagttaatgaccagccacggcgtccctgctgtgagctctggccgctgccttccagggctcccgagccacacgctgggggtgctggctgagggaacatggcttgttggcctcagctgaggttgctgctgtggaagaacctcactttcagaagaagacaaacatgtcagctgctgctggaagtggcctggcctctatttatcttcctgatcctgatctctgttcggctgagctacccaccctatgaacaacatgaatgccattttccaaataaagccatgccctctgcaggaacacttccttgggttcaggggattatctgtaatgccaacaacccctgtttccgttacccgactcctggggaggctcccggagttgttggaaactttaacaaatccattgtggctcgcctgttctcagatgctcggaggcttcttttatacagccagaaagacaccagcatgaaggacatgcgcaaagttctgagaacattacagcagatcaagaaatccagctcaaacttgaagcttcaagatttcctggtggacaatgaaaccttctctgggttcctgtatcacaacctctctctcccaaagtctactgtggacaagatgctgagggctgatgtcattctccacaaggtatttttgcaaggctaccagttacatttgacaagtctgtgcaatggatcaaaatcagaagagatgattcaacttggtgaccaagaagtttctgagctttgtggcctaccaagggagaaactggctgcagcagagcgagtacttcgttccaacatggacatcctgaagccaatcctgagaacactaaactctacatctcccttcccgagcaaggagctggctgaagccacaaaaacattgctgcatagtcttgggactctggcccaggagctgttcagcatgagaagctggagtgacatgcgacaggaggtgatgtttctgaccaatgtgaacagctccagctcctccacccaaatctaccaggctgtgtctcgtattgtctgcgggcatcccgagggaggggggctgaagatcaagtctctcaactggtatgaggacaacaactacaaagccctctttggaggcaatggcactgaggaagatgctgaaaccttctatgacaactctacaactccttactgcaatgatttgatgaagaatttggagtctagtcctctttcccgcattatctggaaagctctgaagccgctgctcgttgggaagatcctgtatacacctgacactccagccacaaggcaggtcatggctgaggtgaacaagaccttccaggaactggctgtgttccatgatctggaaggcatgtgggaggaactcagccccaagatctggaccttcatggagaacagccaagaaatggaccttgtccggatgctgttggacagcagggacaatgaccacttttgggaacagcagttggatggcttagattggacagcccaagacatcgtggcgtttttggccaagcacccagaggatgtccagtccagtaatggttctgtgtacacctggagagaagctttcaacgagactaaccaggcaatccggaccatatctcgcttcatggagtgtgtcaacctgaacaagctagaacccatagcaacagaagtctggctcatcaacaagtccatggagctgctggatgagaggaagttctgggctggtattgtgttcactggaattactccaggcagcattgagctgccccatcatgtcaagtacaagatccgaatggacattgacaatgtggagaggacaaataaaatcaaggatgggtactgggaccctggtcctcgagctgacccctttgaggacatgcggtacgtctgggggggcttcgcctacttgcaggatgtggtggagcaggcaatcatcagggtgctgacgggcaccgagaagaaaactggtgtctatatgcaacagatgccctatccctgttacgttgatgacatctttctgcgggtgatgagccggtcaatgcccctcttcatgacgctggcctggatttactcagtggctgtgatcatcaagggcatcgtgtatgagaaggaggcacggctgaaagagaccatgcggatcatgggcctggacaacagcatcctctggtttagctggttcattagtagcctcattcctcttcttgtgagcgctggcctgctagtggtcatcctgaagttaggaaacctgctgccctacagtgatcccagcgtggtgtttgtcttcctgtccgtgtttgctgtggtgacaatcctgcagtgcttcctgattagcacactcttctccagagccaacctggcagcagcctgtgggggcatcatctacttcacgctgtacctgccctacgtcctgtgtgtggcatggcaggactacgtgggcttcacactcaagatcttcgctagcctgctgtctcctgtggcttttgggtttggctgtgagtactttgccctttttgaggagcagggcattggagtgcagtgggacaacctgtttgagagtcctgtggaggaagatggcttcaatctcaccacttcggtctccatgatgctgtttgacaccttcctctatggggtgatgacctggtacattgaggctgtctttccaggccagtacggaattcccaggccctggtattttccttgcaccaagtcctactggtttggcgaggaaagtgatgagaagagccaccctggttccaaccagaagagaatatcagaaatctgcatggaggaggaacccacccacttgaagctgggcgtgtccattcagaacctggtaaaagtctaccgagatgggatgaaggtggctgtcgatggcctggcactgaatttttatgagggccagatcacctccttcctgggccacaatggagcggggaagacgaccaccatgtcaatcctgaccgggttgttccccccgacctcgggcaccgcctacatcctgggaaaagacattcgctctgagatgagcaccatccggcagaacctgggggtctgtccccagcataacgtgctgtttgacatgctgactgtcgaagaacacatctggttctatgcccgcttgaaagggctctctgagaagcacgtgaaggcggagatggagcagatggccctggatgttggtttgccatcaagcaagctgaaaagcaaaacaagccagctgtcaggtggaatgcagagaaagctatctgtggccttggcctttgtcgggggatctaaggttgtcattctggatgaacccacagctggtgtggacccttactcccgcaggggaatatgggagctgctgctgaaataccgacaaggccgcaccattattctctctacacaccacatggatgaagcggacgtcctgggggacaggattgccatcatctcccatgggaagctgtgctgtgtgggctcctccctgtttctgaagaaccagctgggaacaggctactacctgaccttggtcaagaaagatgtggaatcctccctcagttcctgcagaaacagtagtagcactgtgtcatacctgaaaaaggaggacagtgtttctcagagcagttctgatgctggcctgggcagcgaccatgagagtgacacgctgaccatcgatgtctctgctatctccaacctcatcaggaagcatgtgtctgaagcccggctggtggaagacatagggcatgagctgacctatgtgctgccatatgaagctgctaaggagggagcctttgtggaactctttcatgagattgatgaccggctctcagacctgggcatttctagttatggcatctcagagacgaccctggaagaaatattcctcaaggtggccgaagagagtggggtggatgctgagacctcagatggtaccttgccagcaagacgaaacaggcgggccttcggggacaagcagagctgtcttcgcccgttcactgaagatgatgctgctgatccaaatgattctgacatagacccagaatccagagagacagacttgctcagtgggatggatggcaaagggtcctaccaggtgaaaggctggaaacttacacagcaacagtttgtggcccttttgtggaagagactgctaattgccagacggagtcggaaaggattttttgctcagattgtcttgccagctgtgtttgtctgcattgcccttgtgttcagcctgatcgtgccaccctttggcaagtaccccagcctggaacttcagccctggatgtacaacgaacagtacacatttgtcagcaatgatgctcctgaggacacgggaaccctggaactcttaaacgccctcaccaaagaccctggcttcgggacccgctgtatggaaggaaacccaatcccagacacgccctgccaggcaggggaggaagagtggaccactgccccagttccccagaccatcatggacctcttccagaatgggaactggacaatgcagaacccttcacctgcatgccagtgtagcagcgacaaaatcaagaagatgctgcctgtgtgtcccccaggggcaggggggctgcctcctccacaaagaaaacaaaacactgcagatatccttcaggacctgacaggaagaaacatttcggattatctggtgaagacgtatgtgcagatcatagccaaaagcttaaagaacaagatctgggtgaatgagtttaggtatggcggcttttccctgggtgtcagtaatactcaagcacttcctccgagtcaagaagttaatgatgccatcaaacaaatgaagaaacacctaaagctggccaaggacagttctgcagatcgatttctcaacagcttgggaagatttatgacaggactggacaccaaaaataatgtcaaggtgtggttcaataacaagggctggcatgcaatcagctctttcctgaatgtcatcaacaatgccattctccgggccaacctgcaaaagggagagaaccctagccattatggaattactgctttcaatcatcccctgaatctcaccaagcagcagctctcagaggtggctctgatgaccacatcagtggatgtccttgtgtccatctgtgtcatctttgcaatgtccttcgtcccagccagctttgtcgtattcctgatccaggagcgggtcagcaaagcaaaacacctgcagttcatcagtggagtgaagcctgtcatctactggctctctaattttgtctgggatatgtgcaattacgttgtccctgccacactggtcattatcatcttcatctgcttccagcagaagtcctatgtgtcctccaccaatctgcctgtgctagcccttctacttttgctgtatgggtggtcaatcacacctctcatgtacccagcctcctttgtgttcaagatccccagcacagcctatgtggtgctcaccagcgtgaacctcttcattggcattaatggcagcgtggccacctttgtgctggagctgttcaccgacaataagctgaataatatcaatgatatcctgaagtccgtgttcttgatcttcccacatttttgcctgggacgagggctcatcgacatggtgaaaaaccaggcaatggctgatgccctggaaaggtttggggagaatcgctttgtgtcaccattatcttgggacttggtgggacgaaacctcttcgccatggccgtggaaggggtggtgttcttcctcattactgttctgatccagtacagattcttcatcaggcccagacctgtaaatgcaaagctatctcctctgaatgatgaagatgaagatgtgaggcgggaaagacagagaattcttgatggtggaggccagaatgacatcttagaaatcaaggagttgacgaagatatatagaaggaagcggaagcctgctgttgacaggatttgcgtgggcattcctcctggtgagtgctttgggctcctgggagttaatggggctggaaaatcatcaactttcaagatgttaacaggagataccactgttaccagaggagatgctttccttaacaaaaatagtatcttatcaaacatccatgaagtacatcagaacatgggctactgccctcagtttgatgccatcacagagctgttgactgggagagaacacgtggagttctttgcccttttgagaggagtcccagagaaagaagttggcaaggttggtgagtgggcgattcggaaactgggcctcgtgaagtatggagaaaaatatgctggtaactatagtggaggcaacaaacgcaagctctctacagccatggctttgatcggcgggcctcctgtggtgtttctggatgaacccaccacaggcatggatcccaaagcccggcggttcttgtggaattgtgccctaagtgttgtcaaggaggggagatcagtagtgcttacatctcatagtatggaagaatgtgaagctctttgcactaggatggcaatcatggtcaatggaaggttcaggtgccttggcagtgtccagcatctaaaaaataggtttggagatggttatacaatagttgtacgaatagcagggtccaacccggacctgaagcctgtccaggatttctttggacttgcatttcctggaagtgttctaaaagagaaacaccggaacatgctacaataccagcttccatcttcattatcttctctggccaggatattcagcatcctctcccagagcaaaaagcgactccacatagaagactactctgtttctcagacaacacttgaccaagtatttgtgaactttgccaaggaccaaagtgatgatgaccacttaaaagacctctcattacacaaaaaccagacagtagtggacgttgcagttctcacatcttttctacaggatgagaaagtgaaagaaagctatgtatgaagaatcctgttcatacggggtggctgaaagtaaagaggaactagactttcctttgcaccatgtgaagtgttgtggagaaaagagccagaagttgatgtgggaagaagtaaactggatactgtactgatactattcaatgcaatgcaattcaatgcaatgaaaacaaaattccattacaggggcagtgcctttgtagcctatgtcttgtatggctctcaagtgaaagacttgaatttagttttttacctatacctatgtgaaactctattatggaacccaatggacatatgggtttgaactcacacttttttttttttttttgttcctgtgtattctcattggggttgcaacaataattcatcaagtaatcatggccagcgattattgatcaaaatcaaaaggtaatgcacatcctcattcactaagccatgccatgcccaggagactggtttcccggtgacacatccattgctggcaatgagtgtgccagagttattagtgccaagtttttcagaaagtttgaagcaccatggtgtgtcatgctcacttttgtgaaagctgctctgctcagagtctatcaacattgaatatcagttgacagaatggtgccatgcgtggctaacatcctgctttgattccctctgataagctgttctggtggcagtaacatgcaacaaaaatgtgggtgtctccaggcacgggaaacttggttccattgttatattgtcctatgcttcgagccatgggtctacagggtcatccttatgagactcttaaatatacttagatcctggtaagaggcaaagaatcaacagccaaactgctggggctgcaagctgctgaagccagggcatgggattaaagagattgtgcgttcaaacctagggaagcctgtgcccatttgtcctgactgtctgctaacatggtacactgcatctcaagatgtttatctgacacaagtgtattatttctggctttttgaattaatctagaaaatgaaaagatggagttgtattttgacaaaaatgtttgtactttttaatgttatttggaattttaagttctatcagtgacttctgaatccttagaatggcctctttgtagaaccctgtggtatagaggagtatggccactgccccactatttttattttcttatgtaagtttgcatatcagtcatgactagtgcctagaaagcaatgtgatggtcaggatctcatgacattatatttgagtttctttcagatcatttaggatactcttaatctcacttcatcaatcaaatattttttgagtgtatgctgtagctgaaagagtatgtacgtacgtataagactagagagatattaagtctcagtacacttcctgtgccatgttattcagctcactggtttacaaatataggttgtcttgtggttgtaggagcccactgtaacaatactgggcagcctttttttttttttttttaattgcaacaatgcaaaagccaagaaagtataagggtcacaagtctaaacaatgaattcttcaacagggaaaacagctagcttgaaaacttgctgaaaaacacaacttgtgtttatggcatttagtaccttcaaataattggctttgcagatattggataccccattaaatctgacagtctcaaatttttcatctcttcaatcactagtcaagaaaaatataaaaacaacaaatacttccatatggagcatttttcagagttttctaacccagtcttatttttctagtcagtaaacatttgtaaaaatactgtttcactaatacttactgttaactgtcttgagagaaaagaaaaatatgagagaactattgtttggggaagttcaagtgatctttcaatatcattactaacttcttccactttttccagaatttgaatattaacgctaaaggtgtaagacttcagatttcaaattaatctttctatattttttaaatttacagaatattatataacccactgctgaaaaagaaaaaaatgattgttttagaagttaaagtcaatattgattttaaatataagtaatgaaggcatatttccaataactagtgatatggcatcgttgcattttacagtatcttcaaaaatacagaatttatagaataatttctcctcatttaatatttttcaaaatcaaagttatggtttcctcattttactaaaatcgtattctaattcttcattatagtaaatctatgagcaactccttacttcggttcctctgatttcaaggccatattttaaaaaatcaaaaggcactgtgaactattttgaagaaaacacaacattttaatacagattgaaaggacctcttctgaagctagaaacaatctatagttatacatcttcattaatactgtgttaccttttaaaatagtaattttttacattttcctgtgtaaacctaattgtggtagaaatttttaccaactctatactcaatcaagcaaaatttctgtatattccctgtggaatgtacctatgtgagtttcagaaattctcaaaatacgtgttcaaaaatttctgcttttgcatctttgggacacctcagaaaacttattaacaactgtgaatatgagaaatacagaagaaaataataagccctctatacataaatgcccagcacaattcattgttaaaaaacaaccaaacctcacactactgtatttcattatctgtactgaaagcaaatgctttgtgactattaaatgttgcacatcattcattcactgtatagtaatcattgactaaagccatttgtctgtgttttcttcttgtggttgtatatatcaggtaaaatattttccaaagagccatgtgtcatgtaatactgaaccactttgatattgagacattaatttgtacccttgttattatctactagtaataatgtaatactgtagaaatattgctctaattcttttcaaaattgttgcatcccccttagaatgtttctatttccataaggatttaggtatgctattatcccttcttataccctaagatgaagctgtttttgtgctctttgttcatcattggccctcattccaagcactttacgctgtctgtaatgggatctatttttgcactggaatatctgagaattgcaaaactagacaaaagtttcacaacagatttctaagttaaatcattttcattaaaaggaaaaaagaaaaaaaattttgtatgtcaataactttatatgaagtattaaaatgcatatttctatgttgtaatataatgagtcacaaaataaagctgtgacagttctgttggtctacagaaa

SEQ ID NO: 110019 - DNA, 1540 bp, Homo sapiens
  Payload ID: 1598
  Gene Symbol: ABCA1
  Gene Name: ATP-binding cassette, sub-family A (ABC1), member 1
  ENST ID: ENST00000423487
  CDS Start-End: 298-1389
gtgagtggggccgggacccgcagagccgagccgacccttctctcccgggctgcggcagggcagggcggggagctccgcgcaccaacagagccggttctcagggcgctttgctccttgttttttccccggttctgttttctccccttctccggaaggcttgtcaaggggtaggagaaagagacgcaaacacaaaagtggaaaacagttaatgaccagccacggcgtccctgctgtgagctctggccgctgccttccagggctcccgagccacacgctgggggtgctggctgagggaacatggcttgttggcctcagctgaggttgctgctgtggaagaacctcactttcagaagaagacaaacatgtcagctgctgctggaagtggcctggcctctatttatcttcctgatcctgatctctgttcggctgagctacccaccctatgaacaacatgaatgccattttccaaataaagccatgccctctgcaggaacacttccttgggttcaggggattatctgtaatgccaacaacccctgtttccgttacccgactcctggggaggctcccggagttgttggaaactttaacaaatccattgtggctcgcctgttctcagatgctcggaggcttcttttatacagccagaaagacaccagcatgaaggacatgcgcaaagttctgagaacattacagcagatcaagaaatccagctcaaacttgaagcttcaagatttcctggtggacaatgaaaccttctctgggttcctgtatcacaacctctctctcccaaagtctactgtggacaagatgctgagggctgatgtcattctccacaaggtatttttgcaaggctaccagttacatttgacaagtctgtgcaatggatcaaaatcagaagagatgattcaacttggtgaccaagaagtttctgagctttgtggcctaccaagggagaaactggctgcagcagagcgagtacttcgttccaacatggacatcctgaagccaatcctgatggatgtgacatgtgatgacattgcacatgggcagttaactgtgccaagaagtgcagcagtagcagcaaccggagatgcaaagcccaacatgatggggagagaaactcttctttcaatatgtgcttctgtaccaaaagtggaatttcacgagagacatattttgaaacatttctccttttgtgtgtgcgtgagtgtttccctgtttccagccaagggtattgtgagtttctcctgggcctccttcagaatctgggtgctctggaaagcagtgttttggcaacatggggaaagtatggcagtgtgggagggtcagctgggtctgggtttgaatattgcatttgaatattttaccagcattgatgtcggataaattatttagtccctgtaagcctcagttttctcttcttctacatacacataatatatttgactctttgttgtgattattggttacacatatgaagagcctggtgtggggcctggcacacaataggtgctcaataaatagaagttgataattt

SEQ ID NO: 110020 - DNA, 6362 bp, Homo sapiens
  Payload ID: 1599
  Gene Symbol: ABCA10
  Gene Name: ATP-binding cassette, sub-family A (ABC1), member 10
  Uniprot ID: Q8WWZ4
  ENST ID: ENST00000269081
  CDS Start-End: 911-5542
tagtagtactaacaacgttttataggagcacaattaattttacttaggataagtgttgttattattgtttttattgttgttctgttagttactcaaaacttcattctaattgtgccctgagtttgttaaaataccatactgtatttttgtgtaacatgtaaataggcattaatttttgagaaatagaaatgtttatccttaatgtatttttaatttgctaacattgattttttattttctttcctgaaatagcttatttcctaaaatgaaagaatttattctcagatgaataatttttatatcagctattcttatcagagcaataaacaaataccaatgatgcgctcagccaacaattcattacactctctgaagagtaactggacaaggagaaaaacatagggaaaaaaccaacagaatttgttggcatgttctacacacagaccatggcttttcagaagccaagctgaatcaaaacagttttaaaagaggcaaccatttgtagaggagtccttgaaggattcttcattgttttcttggacaaaaagagaccagtggatccaagtgcttcaaatacttctctcttattttcttaactctattgctctgcaatatttactttaccctgttaatgaacaggacaaaatggttaaaaaagagataagcgtgcgtcaacaaattcaggctcttctgtacaagaattttcttaaaaaatggagaataaaaagagagtttattggaatggacaataacattgtttctagggctatatttgtgcatcttttcggaacacttcagagctacccgttttcctgaacaacctcctaaagtcctgggaagcgtggatcagtttaatgactctggcctggtagtggcatatacaccagtcagtaacataacacaaaggataatgaataagatggccttggcttcctttatgaaaggaagaacagtcattgggacaccagatgaagagaccatggatatagaacttccaaaaaaataccatgaaatggtgggagttatatttagtgatactttctcatatcgcctgaagtttaattggggatatagaatcccagttataaaggagcactctgaatacacagaacactgttgggccatgcatggtgaaattttttgttacttggcaaagtactggctaaaagggtttgtagcttttcaagctgcaattaatgctgcaattatagaagtcacaacaaatcattctgtaatggaggagttgacatcagttattggaataaatatgaagataccacctttcatttctaagggagaaattatgaatgaatggtttcattttacttgcttagtttctttctcttcttttatatactttgcatcattaaatgttgcaagggaaagaggaaaatttaagaaactgatgacagtgatgggtctccgagagtcagcattctggctctcctggggattgacatacatttgcttcatcttcattatgtccatttttatggctctggtcataacatcaatcccaattgtatttcatactggcttcatggtgatattcacactctatagcttatatggcctttctttgatagcattggctttcctcatgagtgttttaataaggaaacctatgctcgctggtttggctggatttctcttcactgtattttggggatgtctgggattcactgtgttatatagacaacttcctttatctttgggatgggtattaagtcttcttagcccttttgccttcactgctggaatggcccagattacacacctggataattacttaagtggtgttatttttcctgatccctctggggattcatacaaaatgatagccacttttttcattttggcatttgatactcttttctatttgatattcacattatattttgagcgagttttacctgataaagatggccatggggattctccattatttttccttaagtcctcattttggtccaaacatcaaaatactcatcatgaaatctttgagaatgaaataaatcctgagcattcctctgatgattcttttgaaccggtgtctccagaattccatggaaaagaagccataagaatcagaaatgttataaaagaatataatggaaagactggaaaagtagaagcattgcaaggcatattttttgacatatatgaaggacagatcactgcaatacttgggcataatggagctggtaaatcaacactgctaaacattcttagtggattgtctgtttctacagaaggatcagccactatttataatactcaactctctgaaataactgacatggaagaaattagaaagaatattggattttgtccacagttcaattttcaatttgacttcctcactgtgagagaaaacctcagggtatttgctaaaataaaagggattcagccaaaggaagtggaacaagaggtaaaaagaattataatggaattagacatgcaaagcattcaagacattattgctaaaaaattaagtggtgggcagaagagaaaactaacactagggattgccatcttaggagatcctcaggttttgctgctagatgaaccaactgctggattggatcccttttcaagacaccgagtgtggagcctcctgaaggagcataaagtagaccgacttatcctcttcagtacccaattcatggatgaggctgacatcttggctgataggaaagtatttctgtctaatgggaagttgaaatgtgcaggatcatctttgtttctgaagcgaaagtggggtattggatatcatttaagtttacacaggaatgaaatgtgtgacacagaaaaaatcacatcccttattaagcagcacattcctgatgccaagttaacaacagaaagtgaagaaaaacttgtatatagtttgcctttggaaaaaacgaacaaatttccagatctttacagtgaccttgataagtgttctgaccagggcataaggaattatgctgtttcagtgacatctctgaatgaagtattcttgaacctagaaggaaaatcagcaattgatgaaccagattttgacattgggaaacaagagaaaatacatgtgacaagaaatactggagatgagtctgaaatggaacaggttctttgttctcttcctgaaacaagaaaggctgtcagtagtgcagctctctggagacgacaaatctatgcagtggcaacacttcgcttcttaaagttaaggcgtgaaaggagagctcttttgtgtttgttactagtacttggaattgcttttatccccatcattctagagaagataatgtataaagtaactcgtgaaactcattgttgggagttttcacccagtatgtatttcctttctctggaacaaatcccgaagacgcctcttaccagcctgttaatcgttaataatacaggatcaaatattgaagacctcgtgcattcactgaagtgtcaggatatagttttggaaatagatgactttagaaacagaaatggctcagatgatccctcctacaatggagccatcatagtgtctggtgaccagaaggattacagattttctgttgcgtgtaataccaagaaattgaattgttttcctgttcttatgggaattgttagcaatgcccttatgggaatttttaacttcacggagcttattcaaatggagagcacttcattttctcgtgatgacatagtgctggatcttggttttatagatgggtccatatttttgttgttgatcacaaactgcgtttctccttttatcggcatgagcagcatcagcgattataaaaaaaatgttcaatcccagttatggatttcaggcctctggccttcagcatactggtgtggacaggctctggtggacattccattatacttcttgattctcttttcaatacatttaatttactacttcatatttctgggattccagctttcatgggaactcatgtttgttttggtggtatgcataattggttgtgcagtttctcttatattcctcacatatgtgctttcattcatctttcgcaagtggagaaaaaataatggcttttggtcttttggcttttttattatcttaatatgtgtatccacaattatggtatcaactcaatatgaaaaactcaacttaattttgtgcatgattttcataccttccttcactttgctggggtatgtcatgttattgatccagctcgactttatgagaaacttggacagtctggacaatagaataaatgaagtcaataaaaccattcttttaacaaccttaataccataccttcagagtgttattttcctttttgtcataaggtgtctggaaatgaagtatggaaatgaaataatgaataaagacccagttttcagaatctctccacggagtagagaaactcatcccaatccggaagagcccgaagaagaagatgaagatgttcaagctgaaagagtccaagcagcaaatgcactcactgctccaaacttggaggaggaaccagtcataactgcaagctgtttacacaaggaatattatgagacaaagaaaagttgcttttcaacaagaaagaagaaaatagccatcagaaatgtttccttttgtgttaaaaaaggtgaagttttgggattactaggacacaatggagctggtaaaagtacttccattaaaatgataactgggtgcacaaagccaactgcaggagtggtggtgttacaaggcagcagagcatcagtaaggcaacagcatgacaacagcctcaagttcttggggtactgccctcaggagaactcactgtggcccaagcttacaatgaaagagcacttggagttgtatgcagctgtgaaaggactgggcaaagaagatgctgctctcagtatttcacgattggtggaagctcttaagctccaggaacaacttaaggctcctgtgaaaactctatcagagggaataaagagaaagctgtgctttgtgctgagcatcctggggaacccatcagtggtgcttctagatgagccgttcaccgggatggaccccgaggggcagcagcaaatgtggcagatacttcaggctaccgttaaaaacaaggagaggggcaccctcttgaccacccattacatgtcagaggctgaggctgtgtgtgaccgtatggccatgatggtgtcaggaacgctaaggtgtattggttccattcaacatctgaaaaacaagtttggtagagattatttactagaaataaaaatgaaagaacctacccaggtggaagctctccacacagagattttgaagcttttcccacaggctgcttggcaggaaagatattcctctttaatggcgtataagttacctgtggaggatgtccaccctctatctcgggcctttttcaagttagaggcgatgaaacagaccttcaacctggaggaatacagcctctctcaggctaccttggagcaggtattcttagaactctgtaaagagcaggagctgggaaatgttgatgataaaattgatacaacagttgaatggaaacttctcccacaggaagacccttaaaatgaagaacctcctaacattcaattttaggtcctactacattgttagtttccataattctacaagaatgtttccttttacttcagttaacaaaagaaaacatttaataaacattcaataatgattacagttttcatttttaaaaatttaggatgaaggaaacaaggaaatatagggaaaagtagtagacaaaattaacaaaatcagacatgttattcatccccaacatgggtctattttgtgcttaaaaataatttaaaaatcatacaatattaggttggttatcggttattatcaataaagctaacactgagaacattttacaaataaaaatatgaggtttttagcctgaacttcaaatgtatcagctatttttaaacattatttactcggattctaatttaatgtgacattgactataagaaggtctgataaactgatgaaatggcacagcataacatttaattataatgacattctgattataaaataaatgcatgtgaattttagtacatattgaagttatatggaagaagatagccataatctgtaagaaagtaccgcagttaatattttctttagccaacttatattcaatgtattttttatggatcctttttcaaaggtagtatcagtaggcatagtcattttctgtatcttttcacctcacagttcatgaacatttcccatgtcattatagcacttttgtgttatataattgctgcattaatgttatagctgtattgatgtaataccagagttgttacgttcgggttatatgcaagtttatttcttagaaataaaactttgatggactttt

SEQ ID NO: 110021 - DNA, 4875 bp, Homo sapiens
  Payload ID: 1599
  Gene Symbol: ABCA10
  Gene Name: ATP-binding cassette, sub-family A (ABC1), member 10
  ENST ID: ENST00000523419
  CDS Start-End: 85-4065
aaagtcctgggaagcgtggatcagtttaatgactctggcctggtagtggcatatacaccagtcagtaacataacacaaaggataatgaataagatggccttggcttcctttatgaaaggaagaacagtcattgggacaccagatgaagagaccatggatatagaacttccaaaaaaataccatgaaatggtgggagttatatttagtgatactttctcatatcgcctgaagtttaattggggatatagaatcccagttataaaggagcactctgaatacacagaacactgttgggccatgcatggtgaaattttttgttacttggcaaagtactggctaaaagggtttgtagcttttcaagctgcaattaatgctgcaattatagaagtcacaacaaatcattctgtaatggaggagttgacatcagttattggaataaatatgaagataccacctttcatttctaagggagaaattatgaatgaatggtttcattttacttgcttagtttctttctcttcttttatatactttgcatcattaaatgttgcaagggaaagaggaaaatttaagaaactgatgacagtgatgggtctccgagagtcagcattctggctctcctggggattgacatacatttgcttcatcttcattatgtccatttttatggctctggtcataacatcaatcccaattgtatttcatactggcttcatggtgatattcacactctatagcttatatggcctttctttgatagcattggctttcctcatgagtgttttaataaggaaacctatgctcgctggtttggctggatttctcttcactgtattttggggatgtctgggattcactgtgttatatagacaacttcctttatctttgggatgggtattaagtcttcttagcccttttgccttcactgctggaatggcccagattacacacctggataattacttaagtggtgttatttttcctgatccctctggggattcatacaaaatgatagccacttttttcattttggcatttgatactcttttctatttgatattcacattatattttgagcgagttttacctgataaagatggccatggggattctccattatttttccttaagtcctcattttggtccaaacatcaaaatactcatcatgaaatctttgagaatgaaataaatcctgagcattcctctgatgattcttttgaaccggtgtctccagaattccatggaaaagaagccataagaatcagaaatgttataaaagaatataatggaaagactggaaaagtagaagcattgcaaggcatattttttgacatatatgaaggacagatcactgcaatacttgggcataatggagctggtaaatcaacactgctaaacattcttagtggattgtctgtttctacagaaggatcagccactatttataatactcaactctctgaaataactgacatggaagaaattagaaagaatattggattttgtccacagttcaattttcaatttgacttcctcactgtgagagaaaacctcagggtatttgctaaaataaaagggattcagccaaaggaagtggaacaagaggtaaaaagaattataatggaattagacatgcaaagcattcaagacattattgctaaaaaattaagtggtgggcagaagagaaaactaacactagggattgccatcttaggagatcctcaggttttgctgctagatgaaccaactgctggattggatcccttttcaagacaccgagtgtggagcctcctgaaggagcataaagtagaccgacttatcctcttcagtacccaattcatggatgaggctgacatcttggctgataggaaagtatttctgtctaatgggaagttgaaatgtgcaggatcatctttgtttctgaagcgaaagtggggtattggatatcatttaagtttacacaggaatgaaatgtgtgacacagaaaaaatcacatcccttattaagcagcacattcctgatgccaagttaacaacagaaagtgaagaaaaacttgtatatagtttgcctttggaaaaaacgaacaaatttccagatctttacagtgaccttgataagtgttctgaccagggcataaggaattatgctgtttcagtgacatctctgaatgaagtattcttgaacctagaaggaaaatcagcaattgatgaaccagattttgacattgggaaacaagagaaaatacatgtgacaagaaatactggagatgagtctgaaatggaacaggttctttgttctcttcctgaaacaagaaaggctgtcagtagtgcagctctctggagacgacaaatctatgcagtggcaacacttcgcttcttaaagttaaggcgtgaaaggagagctcttttgtgtttgttactagtacttggaattgcttttatccccatcattctagagaagataatgtataaagtaactcgtgaaactcattgttgggagttttcacccagtatgtatttcctttctctggaacaaatcccgaagacgcctcttaccagcctgttaatcgttaataatacaggatcaaatattgaagacctcgtgcattcactgaagtgtcaggatatagttttggaaatagatgactttagaaacagaaatggctcagatgatccctcctacaatggagccatcatagtgtctggtgaccagaaggattacagattttctgttgcgtgtaataccaagaaattgaattgttttcctgttcttatgggaattgttagcaatgcccttatgggaatttttaacttcacggagcttattcaaatggagagcacttcattttctcgtgatgacatagtgctggatcttggttttatagatgggtccatatttttgttgttgatcacaaactgcgtttctccttttatcggcatgagcagcatcagcgattataaaaaaaatgttcaatcccagttatggatttcaggcctctggccttcagcatactggtgtggacaggctctggtggacattccattatacttcttgattctcttttcaatacatttaatttactacttcatatttctgggattccagctttcatgggaactcatgtttgttttggtggtatgcataattggttgtgcagtttctcttatattcctcacatatgtgctttcattcatctttcgcaagtggagaaaaaataatggcttttggtcttttggcttttttattatcttaatatgtgtatccacaattatggtatcaactcaatatgaaaaactcaacttaattttgtgcatgattttcataccttccttcactttgctggggtatgtcatgttattgatccagctcgactttatgagaaacttggacagtctggacaatagaataaatgaagtcaataaaaccattcttttaacaaccttaataccataccttcagagtgttattttcctttttgtcataaggtgtctggaaatgaagtatggaaatgaaataatgaataaagacccagttttcagaatctctccacggagtagagaaactcatcccaatccggaagagcccgaagaagaagatgaagatgttcaagctgaaagagtccaagcagcaaatgcactcactgctccaaacttggaggaggaaccagtcataactgcaagctgtttacacaaggaatattatgagacaaagaaaagttgcttttcaacaagaaagaagaaaatagccatcagaaatgtttccttttgtgttaaaaaaggtgaagttttgggattactaggacacaatggagctggtaaaagtacttccattaaaatgataactgggtgcacaaagccaactgcaggagtggtggtgttacaaggcagcagagcatcagtaaggcaacagcatgacaacagcctcaagttcttggggtactgccctcaggagaactcactgtggcccaagcttacaatgaaagagcacttggagttgtatgcagctgtgaaaggactgggcaaagaagatgctgctctcagtatttcacgctgtgctttgtgctgagcatcctggggaacccatcagtggtgcttctagatgagccgttcaccgggatggaccccgaggggcagcagcaaatgtggcagatacttcaggctaccgttaaaaacaaggagaggggcaccctcttgaccacccattacatgtcagaggctgaggctgtgtgtgaccgtatggccatgatggtgtcaggaacgctaaggtgtattggttccattcaacatctgaaaaacaagtttggtagagattatttactagaaataaaaatgaaagaacctacccaggtggaagctctccacacagagattttgaagcttttcccacaggctgcttggcaggaaagatattcctctttaatggcgtataagttacctgtggaggatgtccaccctctatctcgggcctttttcaagttagaggcgatgaaacagaccttcaacctggaggaatacagcctctctcaggctaccttggagcaggtattcttagaactctgtaaagagcaggagctgggaaatgttgatgataaaattgatacaacagttgaatggaaacttctcccacaggaagacccttaaaatgaagaacctcctaacattcaattttaggtcctactacattgttagtttccataattctacaagaatgtttccttttacttcagttaacaaaagaaaacatttaataaacattcaataatgattacagttttcatttttaaaaatttaggatgaaggaaacaaggaaatatagggaaaagtagtagacaaaattaacaaaatcagacatgttattcatccccaacatgggtct

SEQ ID NO: 110022 - DNA, 584 bp, Homo sapiens
  Payload ID: 1599
  Gene Symbol: ABCA10
  Gene Name: ATP-binding cassette, sub-family A (ABC1), member 10
  ENST ID: ENST00000524273
  CDS Start-End: 1-413
ttagtgatactttctcatatcgcctgaagtttaattggggatatagaatcccagttataaaggagcactctgaatacacagaacactgttgggccatgcatggtgaaattttttgttacttggcaaagtactggctaaaagggtttgtagcttttcaagctgcaattaatgctgcaattatagaagtcacaacaaatcattctgtaatggaggagttgacatcagttattggaataaatatgaagataccacctttcatttctaagggagaaattatgaatgaatggtttcattttacttgcttagtttctttctcttcttttatatactttgcatcattaaatgttgcaagggaaagaggaaaatttaagaaactgatgacagtgatgggtctccgagagtcagcattctgaggcagtaaaatgtgaggttatgaataacgagtgaagccagatggcatggataagggtctcatctctgttgcctaccagctggtgacactggattacacacctggataattacttaagtggtgttatttttcctgatccctctggggattcatacaaaatgatagccacttt

SEQ ID NO: 110023 - DNA, 6125 bp, Homo sapiens
  Payload ID: 1599
  Gene Symbol: ABCA10
  Gene Name: ATP-binding cassette, sub-family A (ABC1), member 10
  Uniprot ID: Q8WWZ4
  ENST ID: ENST00000522406
  CDS Start-End: 388-1746
cttcattgttttcttggacaaaaagagaccagtggatccaagtgcttcaaatacttctctcttattttcttaactctattgctctgcaatatttactttaccctgttaatgaacaggacaaaatggttaaaaaagagataagcgtgcgtcaacaaattcaggctcttctgtacaagaattttcttaaaaaatggagaataaaaagagagtttattggaatggacaataacattgtttctagggctatatttgtgcatcttttcggaacacttcagagctacccgttttcctgaacaacctcctaaagtcctgggaagcgtggatcagtttaatgactctggcctggtagtggcatatacaccagtcagtaacataacacaaaggataatgaataagatggccttggcttcctttatgaaaggaagaacagtcattgggacaccagatgaagagaccatggatatagaacttccaaaaaaataccatgaaatggtgggagttatatttagtgatactttctcatatcgcctgaagtttaattggggatatagaatcccagttataaaggagcactctgaatacacagaacactgttgggccatgcatggtgaaattttttgttacttggcaaagtactggctaaaagggtttgtagcttttcaagctgcaattaatgctgcaattatagaagtcacaacaaatcattctgtaatggaggagttgacatcagttattggaataaatatgaagataccacctttcatttctaagggagaaattatgaatgaatggtttcattttacttgcttagtttctttctcttcttttatatactttgcatcattaaatgttgcaagggaaagaggaaaatttaagaaactgatgacagtgatgggtctccgagagtcagcattctggctctcctggggattgacatacatttgcttcatcttcattatgtccatttttatggctctggtcataacatcaatcccaattgtatttcatactggcttcatggtgatattcacactctatagcttatatggcctttctttgatagcattggctttcctcatgagtgttttaataaggaaacctatgctcgctggtttggctggatttctcttcactgtattttggggatgtctgggattcactgtgttatatagacaacttcctttatctttgggatgggtattaagtcttcttagcccttttgccttcactgctggaatggcccagattacacacctggataattacttaagtggtgttatttttcctgatccctctggggattcatacaaaatgatagccacttttttcattttggcatttgatactcttttctatttgatattcacattatattttgagcgagttttacctgataaagatggccatggggattctccattatttttccttaagtcctcattttggtccaaacatcaaaatactcatcatgaaatctttgagaatgaaataaatcctgagcattcctctgatgattcttttgaaccggtgtctccagaattccatggaaaagaagccataagaatcagaaatgttataaaagaatataatggaaagactggaaaagtagaagcattgcaaggaagtgaggagcgtctctgccccgccgcccatcgtctgagatgtggggagcgcctctgccccgccgcccatcatctgggatgtgaggagcgcccctgcccggccgcgaccccgtctgggaactgaggagtgtctctgcccgaccgccaccctgtctgggagatgaggagcgtctctgcccggccgccccgtctgagaagcatattttttgacatatatgaaggacagatcactgcaatacttgggcataatggagctggtaaatcaacactgctaaacattcttagtggattgtctgtttctacagaaggatcagccactatttataatactcaactctctgaaataactgacatggaagaaattagaaagaatattggattttgtccacagttcaattttcaatttgacttcctcactgtgagagaaaacctcagggtatttgctaaaataaaagggattcagccaaaggaagtggaacaagaggtaaaaagaattataatggaattagacatgcaaagcattcaagacattattgctaaaaaattaagtggtgggcagaagagaaaactaacactagggattgccatcttaggagatcctcaggttttgctgctagatgaaccaactgctggattggatcccttttcaagacaccgagtgtggagcctcctgaaggagcataaagtagaccgacttatcctcttcagtacccaattcatggatgaggctgacatcttggctgataggaaagtatttctgtctaatgggaagttgaaatgtgcaggatcatctttgtttctgaagcgaaagtggggtattggatatcatttaagtttacacaggaatgaaatgtgtgacacagaaaaaatcacatcccttattaagcagcacattcctgatgccaagttaacaacagaaagtgaagaaaaacttgtatatagtttgcctttggaaaaaacgaacaaatttccagatctttacagtgaccttgataagtgttctgaccagggcataaggaattatgctgtttcagtgacatctctgaatgaagtattcttgaacctagaaggaaaatcagcaattgatgaaccagattttgacattgggaaacaagagaaaatacatgtgacaagaaatactggagatgagtctgaaatggaacaggttctttgttctcttcctgaaacaagaaaggctgtcagtagtgcagctctctggagacgacaaatctatgcagtggcaacacttcgcttcttaaagttaaggcgtgaaaggagagctcttttgtgtttgttactagtacttggaattgcttttatccccatcattctagagaagataatgtataaagtaactcgtgaaactcattgttgggagttttcacccagtatgtatttcctttctctggaacaaatcccgaagacgcctcttaccagcctgttaatcgttaataatacaggatcaaatattgaagacctcgtgcattcactgaagtgtcaggatatagttttggaaatagatgactttagaaacagaaatggctcagatgatccctcctacaatggagccatcatagtgtctggtgaccagaaggattacagattttctgttgcgtgtaataccaagaaattgaattgttttcctgttcttatgggaattgttagcaatgcccttatgggaatttttaacttcacggagcttattcaaatggagagcacttcattttctcgttgtatataaatctagacaaaattaatgttcggaaggcttgtcaaggaagcaatttggatattaaattgtctcctgtggatccagggaaggatgacatagtgctggatcttggttttatagatgggtccatatttttgttgttgatcacaaactgcgtttctccttttatcggcatgagcagcatcagcgattataaaaaaaatgttcaatcccagttatggatttcaggcctctggccttcagcatactggtgtggacaggctctggtggacattccattatacttcttgattctcttttcaatacatttaatttactacttcatatttctgggattccagctttcatgggaactcatgtttgttttggtggtatgcataattggttgtgcagtttctcttatattcctcacatatgtgctttcattcatctttcgcaagtggagaaaaaataatggcttttggtcttttggcttttttattatcttaatatgtgtatccacaattatggtatcaactcaatatgaaaaactcaacttaattttgtgcatgattttcataccttccttcactttgctggggtatgtcatgttattgatccagctcgactttatgagaaacttggacagtctggacaatagaataaatgaagtcaataaaaccattcttttaacaaccttaataccataccttcagagtgttattttcctttttgtcataaggtgtctggaaatgaagtatggaaatgaaataatgaataaagacccagttttcagaatctctccacggagtagagaaactcatcccaatccggaagagcccgaagaagaagatgaagatgttcaagctgaaagagtccaagcagcaaatgcactcactgctccaaacttggaggaggaaccagtcataactgcaagctgtttacacaaggaatattatgagacaaagaaaagttgcttttcaacaagaaagaagaaaatagccatcagaaatgtttccttttgtgttaaaaaaggtgaagttttgggattactaggacacaatggagctggtaaaagtacttccattaaaatgataactgggtgcacaaagccaactgcaggagtggtggtgttacaaggcagcagagcatcagtaaggcaacagcatgacaacagcctcaagttcttggggtactgccctcaggagaactcactgtggcccaagcttacaatgaaagagcacttggagttgtatgcagctgtgaaaggactgggcaaagaagatgctgctctcagtatttcacgattggtggaagctcttaagctccaggaacaacttaaggctcctgtgaaaactctatcagagggaataaagagaaagctgtgctttgtgctgagcatcctggggaacccatcagtggtgcttctagatgagccgttcaccgggatggaccccgaggggcagcagcaaatgtggcagatacttcaggctaccgttaaaaacaaggagaggggcaccctcttgaccacccattacatgtcagaggctgaggctgtgtgtgaccgtatggccatgatggtgtcaggaacgctaaggtgtattggttccattcaacatctgaaaaacaagtttggtagagattatttactagaaataaaaatgaaagaacctacccaggtggaagctctccacacagagattttgaagcttttcccacaggctgcttggcaggaaagatattcctctttaatggcgtataagttacctgtggaggatgtccaccctctatctcgggcctttttcaagttagaggcgatgaaacagaccttcaacctggaggaatacagcctctctcaggctaccttggagcaggtattcttagaactctgtaaagagcaggagctgggaaatgttgatgataaaattgatacaacagttgaatggaaacttctcccacaggaagacccttaaaatgaagaacctcctaacattcaattttaggtcctactacattgttagtttccataattctacaagaatgtttccttttacttcagttaacaaaagaaaacatttaataaacattcaataatgattacagttttcatttttaaaaatttaggatgaaggaaacaaggaaatatagggaaaagtagtagacaaaattaacaaaatcagacatgttattcatccccaacatgggtctattttgtgcttaaaaataatttaaaaatcatacaatattaggttggttatcggttattatcaataaagctaacactgagaacattttacaaataaaaatatgaggtttttagcctgaacttcaaatgtatcagctatttttaaacattatttactcggattctaatttaatgtgacattgactataagaaggtctgataaactgatgaaatggcacagcataacatttaattataatgacattctgattataaaataaatgcatgtgaattttagtacatattgaagttatatggaagaagatagccataatctgtaagaaagtaccgcagttaatattttctttagccaacttatattcaatgtattttttatggatcctttttcaaaggtagtatcagtaggcatagtcattttctgtatcttttcacctcacagttcatgaacatttcccatgtcattatagcacttttgtgttatataattgctgcattaatgttatagctgtattgatgtaataccagagttgttacgttcgggttatatgcaagtttatttcttagaaataaaactttgatggacttt

SEQ ID NO: 110024 - DNA, 1311 bp, Homo sapiens
  Payload ID: 1599
  Gene Symbol: ABCA10
  Gene Name: ATP-binding cassette, sub-family A (ABC1), member 10
  Uniprot ID: Q8WWZ4
  ENST ID: ENST00000523512
  CDS Start-End: 410-688
gtagaggagtccttgaaggattcttcattgttttcttggacaaaaagagaccagtggatccaagtgcttcaaatacttctctcttattttcttaactctattgctctgcaatatttactttaccctgttaatgaacaggacaaaatggttaaaaaagagataagcgtgcgtcaacaaattcaggctcttctgtacaagaattttcttaaaaaatggagaataaaaagagagtttattggaatggacaataacattgtttctagggctatatttgtgcatcttttcggaacacttcagagctacccgttttcctgaacaacctcctaaagtcctgggaagcgtggatcagtttaatgactctggcctggtagtggcatatacaccagtcagtaacataacacaaaggataatgaataagatggccttggcttcctttatgaaaggaagaacagtcattgggacaccagatgaagagaccatggatatagaacttccaaaaaaataccatgaaatggtgggagttatatttagtgatactttctcatatcgcctgaagtttaattggggatatagaatcccagttataaaggagcactctgaatacacaggtcacaacaaatcattctgtaatggaggagttgacatcagttattggaataaatatgaagataccacctttcatttctaagggagaaattatgaatgaatggtttcattttacttgcttagtttctttctcttcttttatatactttgcatcattaaatgttgcaagggaaagaggaaaatttaagaaactgatgacagtgatgggtctccgagagtcagcattctggctctcctggggattgacatacatttgcttcatcttcattatgtccatttttatggctctggtcataacatcaatcccaattgtatttcatactggcttcatggtgatattcacactctatagcttatatggcctttctttgatagcattggctttcctcatgagtgttttaataaggaaacctatgctcgctggtttggctggatttctcttcactgtattttggggatgtctgggattcactgtgttatatagacaacttcctttatctttgggatgggtattaagtcttcttagcccttttgccttcactgctggaatggcccagattacacacctggataattacttaagtggtgttatttttcctgatccctctggggattcatacaaaatgatagccacttttttcattttggcatttgatactcttttctatttgatattcacattatattttgagcgagttttacctg

SEQ ID NO: 110025 - DNA, 5375 bp, Homo sapiens
  Payload ID: 1599
  Gene Symbol: ABCA10
  Gene Name: ATP-binding cassette, sub-family A (ABC1), member 10
  ENST ID: ENST00000518929
  CDS Start-End: 85-1107
aaagtcctgggaagcgtggatcagtttaatgactctggcctggtagtggcatatacaccagtcagtaacataacacaaaggataatgaataagatggccttggcttcctttatgaaaggaagaacagtcattgggacaccagatgaagagaccatggatatagaacttccaaaaaaataccatgaaatggtgggagttatatttagtgatactttctcatatcgcctgaagtttaattggggatatagaatcccagttataaaggagcactctgaatacacagaacactgttgggccatgcatggtgaaattttttgttacttggcaaagtactggctaaaagggtttgtagcttttcaagctgcaattaatgctgcaattatagaagtcacaacaaatcattctgtaatggaggagttgacatcagttattggaataaatatgaagataccacctttcatttctaagggagaaattatgaatgaatggtttcattttacttgcttagtttctttctcttcttttatatactttgcatcattaaatgttgcaagggaaagaggaaaatttaagaaactgatgacagtgatgggtctccgagagtcagcattctggctctcctggggattgacatacatttgcttcatcttcattatgtccatttttatggctctggtcataacatcaatcccaattgtatttcatactggcttcatggtgatattcacactctatagcttatatggcctttctttgatagcattggctttcctcatgagtgttttaataaggaaacctatgctcgctggtttggctggatttctcttcactgtattttggggatgtctgggattcactgtgttatatagacaacttcctttatctttgggatgggtattaagtcttcttagcccttttgccttcactgctggaatggcccagattacacacctggataattacttaagtggtgttatttttcctgatccctctggggattcatacaaaatgatagccacttttttcattttggcatttgatactcttttctatttgatattcacattatattttgagcgagttttacctgaatcagaaatgttataaaagaatataatggaaagactggaaaagtagaagcattgcaaggaagtgaggagcgtctctgccccgccgcccatcgtctgagatgtggggagcgcctctgccccgccgcccatcatctgggatgtgaggagcgcccctgcccggccgcgaccccgtctgggaactgaggagtgtctctgcccgaccgccaccctgtctgggagatgaggagcgtctctgcccggccgccccgtctgagaagtgaggagcccctctgcccggcagccaccccgtctgggaagcatattttttgacatatatgaaggacagatcactgcaatacttgggcataatggagctggtaaatcaacactgctaaacattcttagtggattgtctgtttctacagaaggatcagccactatttataatactcaactctctgaaataactgacatggaagaaattagaaagaatattggattttgtccacagttcaattttcaatttgacttcctcactgtgagagaaaacctcagggtatttgctaaaataaaagggattcagccaaaggaagtggaacaagaggtaaaaagaattataatggaattagacatgcaaagcattcaagacattattgctaaaaaattaagtggtgggcagaagagaaaactaacactagggattgccatcttaggagatcctcaggttttgctgctagatgaaccaactgctggattggatcccttttcaagacaccgagtgtggagcctcctgaaggagcataaagtagaccgacttatcctcttcagtacccaattcatggatgaggctgacatcttggctgataggaaagtatttctgtctaatgggaagttgaaatgtgcaggatcatctttgtttctgaagcgaaagtggggtattggatatcatttaagtttacacaggaatgaaatgtgtgacacagaaaaaatcacatcccttattaagcagcacattcctgatgccaagttaacaacagaaagtgaagaaaaacttgtatatagtttgcctttggaaaaaacgaacaaatttccagatctttacagtgaccttgataagtgttctgaccagggcataaggaattatgctgtttcagtgacatctctgaatgaagtattcttgaacctagaaggaaaatcagcaattgatgaaccagattttgacattgggaaacaagagaaaatacatgtgacaagaaatactggagatgagtctgaaatggaacaggttctttgttctcttcctgaaacaagaaaggctgtcagtagtgcagctctctggagacgacaaatctatgcagtggcaacacttcgcttcttaaagttaaggcgtgaaaggagagctcttttgtgtttgttactagtacttggaattgcttttatccccatcattctagagaagataatgtataaagtaactcgtgaaactcattgttgggagttttcacccagtatgtatttcctttctctggaacaaatcccgaagacgcctcttaccagcctgttaatcgttaataatacaggatcaaatattgaagacctcgtgcattcactgaagtgtcaggatatagttttggaaatagatgactttagaaacagaaatggctcagatgatccctcctacaatggagccatcatagtgtctggtgaccagaaggattacagattttctgttgcgtgtaataccaagaaattgaattgttttcctgttcttatgggaattgttagcaatgcccttatgggaatttttaacttcacggagcttattcaaatggagagcacttcattttctcgtgatgacatagtgctggatcttggttttatagatgggtccatatttttgttgttgatcacaaactgcgtttctccttttatcggcatgagcagcatcagcgattataaaaaaaatgttcaatcccagttatggatttcaggcctctggccttcagcatactggtgtggacaggctctggtggacattccattatacttcttgattctcttttcaatacatttaatttactacttcatatttctgggattccagctttcatgggaactcatgtttgttttggtggtatgcataattggttgtgcagtttctcttatattcctcacatatgtgctttcattcatctttcgcaagtggagaaaaaataatggcttttggtcttttggcttttttattatcttaatatgtgtatccacaattatggtatcaactcaatatgaaaaactcaacttaattttgtgcatgattttcataccttccttcactttgctggggtatgtcatgttattgatccagctcgactttatgagaaacttggacagtctggacaatagaataaatgaagtcaataaaaccattcttttaacaaccttaataccataccttcagagtgttattttcctttttgtcataaggtgtctggaaatgaagtatggaaatgaaataatgaataaagacccagttttcagaatctctccacggagtagagaaactcatcccaatccggaagagcccgaagaagaagatgaagatgttcaagctgaaagagtccaagcagcaaatgcactcactgctccaaacttggaggaggaaccagtcataactgcaagctgtttacacaaggaatattatgagacaaagaaaagttgcttttcaacaagaaagaagaaaatagccatcagaaatgtttccttttgtgttaaaaaaggtgaagttttgggattactaggacacaatggagctggtaaaagtacttccattaaaatgataactgggtgcacaaagccaactgcaggagtggtggtgttacaaggcagcagagcatcagtaaggcaacagcatgacaacagcctcaagttcttggggtactgccctcaggagaactcactgtggcccaagcttacaatgaaagagcacttggagttgtatgcagctgtgaaaggactgggcaaagaagatgctgctctcagtatttcacggtacagagagaagtctcacaatttgtagcaggaggaaggggaaaatatgtcatttcttcattatatattaaaaggaaattataaacaatgtctttaaattttcatgcaaataaaatgattcaaatacctgaataagaaccaaatcataagatttagcatttatgaaaacgttaaggaagcttaaatttactatctagaataatagtgcttagagtttcctacagttgttttagataggtccatttgccatatacttcatgtataatcacactgttttttgtcagattggtggaagctcttaagctccaggaacaacttaaggctcctgtgaaaactctatcagagggaataaagagaaaggtatgggccaggctcggggtttccctgtgcacccatggctgggtgccgacgggctgttccttgcattgcagctgtgctttgtgctgagcatcctggggaacccatcagtggtgcttctagatgagccgttcaccgggatggaccccgaggggcagcagcaaatgtggcagatacttcaggctaccgttaaaaacaaggagaggggcaccctcttgaccacccattacatgtcagaggctgaggctgtgtgtgaccgtatggccatgatggtgtcaggaacgctaaggtgtattggttccattcaacatctgaaaaacaagtttggtagagattatttactagaaataaaaatgaaagaacctacccaggtggaagctctccacacagagattttgaagcttttcccacaggctgcttggcaggaaagatattcctctttaatggcgtataagttacctgtggaggatgtccaccctctatctcgggcctttttcaagttagaggcgatgaaacagaccttcaacctggaggaatacagcctctctcaggctaccttggagcaggtattcttagaactctgtaaagagcaggagctgggaaatgttgatgataaaattgatacaacagttgaatggaaacttctcccacaggaagacccttaaaatgaagaacctcctaacattcaattttaggtcctactacattgttagtttccataattctacaagaatgtttccttttacttcagttaacaaaagaaaacatttaataaacattcaataatgattacagttttcatttttaaaaatttaggatgaaggaaacaaggaaatatagggaaaagtagtagacaaaattaacaaaatcagacatgttattcatccccaacatgggtct

SEQ ID NO: 110026 - DNA, 531 bp, Homo sapiens
  Payload ID: 1599
  Gene Symbol: ABCA10
  Gene Name: ATP-binding cassette, sub-family A (ABC1), member 10
  ENST ID: ENST00000521538
  CDS Start-End: 1-229
atattcctctttaatggcgtataagttacctgtggaggatgtccaccctctatctcgggcctttttcaagttagaggcgatgaaacagaccttcaacctggaggaatacagcctctctcaggctaccttggagcagaagcagtgtgaggcctcactggatgcagatattggcaccacgcttcttgtacaacctgtggtttcagaatcccaactgaaaaagtcagcctaaaagtgtcctgtgaaacacctgggaagataggacgtcaggcaagcaacaacttcaatgcaaaatgtgtcttgttccaaaagtgacaggaggaccactgccacagaaaccaccctaaagtcagaagcagcggtaagaagataggcctgatggaagcagagctgacatgcagttgctgactttcacatgcttccaacaagcagattttgcagcagagcaatatgaaacattgattggatgaatacagaagcaaatgaatcagaaaatttagcaggattgtgttagattgggcaaaaaaaaaaaaa

SEQ ID NO: 110027 - DNA, 362 bp, Homo sapiens
  Payload ID: 1599
  Gene Symbol: ABCA10
  Gene Name: ATP-binding cassette, sub-family A (ABC1), member 10
  ENST ID: ENST00000522787
  CDS Start-End: 1-138
tattcctctttaatggcgtataagttacctgtggaggatgtccaccctctatctcgggcctttttcaagttagaggcgatgaaacagaccttcaacctggaggaatacagcctctctcaggctaccttggagcagtgacaggaggaccactgccacagaaaccaccctaaagtcagaagcagcggtaagaagataggcctgatggaagcagagctgacatgcagttgctgactttcacatgcttccaacaagcagattttgcagcagagcaatatgaaacattgattggatgaatacagaagcaaatgaatcagaaaatttagcaggattgtgttagattgggcaaaaaaaaaaaaaaacaa

SEQ ID NO: 110028 - DNA, 9100 bp, Homo sapiens
  Payload ID: 1600
  Gene Symbol: ABCA12
  Gene Name: ATP-binding cassette, sub-family A (ABC1), member 12
  Uniprot ID: Q86UK0
  ENST ID: ENST00000272895
  CDS Start-End: 221-8008
gaagagttgattgagaagtgcctcttggttaaggattaaccacagggaaaaatccagcagaaacagaagaactgtgggtttcttaccccagccctcaaggaagctatgccgtgaaaggggtactgatacactgacatacagcaagttggacggggcatcagttcttcatttgtggagtggagaaaagaagaggaaatctctcatttggggcatttgaaggatggcttccctgtttcatcagcttcagatcctggtctggaaaaattggctaggtgtaaaaaggcagccgctttggacacttgtcttgatcttatggccagtcattattttcataattttggctattactcggaccaaatttcctccaactgcaaaaccaacttgttacctcgcacctcgaaaccttcctagtactggattctttccattcctgcagaccctactctgtgacacagactctaaatgcaaagacacaccctatggcccacaagatctgcttcgtaggaaaggaattgatgatgcactatttaaagacagtgagattctgagaaagtcatccaacctggataaggacagcagtttatcattccagagcacccaagttccagaaagaaggcatgcatcactagccacagtatttcccagtccaagttctgatttggaaatccccggaacatatactttcaatggcagtcaagtgctcgcacgaattcttggcttggaaaagctgttaaagcaaaattcaacttcagaagatatacgaagagaactatgtgacagctattcaggatacattgtggatgatgccttctcttggacctttctaggaagaaatgtttttaacaaattttgcctttctaacatgacccttttagagtcttctctccaagaactaaacaaacagttctcccagctatccagtgaccccaacaatcagaagatagtgtttcaggaaatagtcagaatgctgtctttcttctcacaagtgcaagagcagaaagctgtgtggcagcttctgtctagttttccaaatgtgtttcagaatgacacatcactaagcaatctatttgatgttcttcgaaaggcaaacagtgtgctgctggttgtgcagaaggtttatccacgttttgcaactaacgaaggtttcagaaccctccagaagtctgttaaacatctgctgtacactctggactccccagctcaaggtgactccgataatataacgcatgtgtggaatgaggatgatggacagaccttatctccaagcagtctggctgcacagctcctaattctggaaaactttgaagatgccctcttaaatatatcagcaaatagtccttatattccttacttggcatgtgtgagaaatgtgactgacagtttggccagaggttcaccagaaaatctaagactcctgcagtccacaatacgatttaaaaaatcttttcttcgcaatggttcctatgaagattactttcctccagttcctgaagtcctaaaatcaaaactgtctcaacttcgaaacttgaccgaacttctttgtgaatctgaaactttcagtttgatagagaagtcatgccagctctctgatatgagctttgggagcctgtgtgaagaaagtgagtttgatctgcaactcctcgaagcggcagagctgggcaccgaaatagcagccagcttactgtaccatgacaatgtcatatctaaaaaagtgagagatttgctgactggagatccaagcaaaattaatttaaatatggatcagtttctagaacaggcactgcaaatgaattacttggaaaatatcactcagttaataccgatcatagaagccatgctgcatgtcaataacagtgcagatgcttctgaaaagccaggtcagttactagaaatgtttaaaaatgttgaagagctgaaagaagatttaaggagaacaacaggaatgtccaacaggactattgacaagttgctggccattcccatccctgataatagagctgagattatttctcaggtgttctggctgcattcctgtgatactaatatcaccactcccaaactagaagatgcaatgaaagaattctgcaacctgtctctttcagagagatcccggcagtcttacctcatcggactcacccttctgcactacttaaacatttacaacttcacatacaaggtgtttttcccgaggaaagatcaaaagccagtagaaaagatgatggagctcttcataagactaaaagagattctcaatcagatggcttctggcacacatccgctgctagacaaaatgagatccctgaagcaaatgcatctgcccagaagtgttccattaacacaggcaatgtacagaagcaaccgaatgaacacaccacaaggatcatttagcaccatctcccaagcattatgttctcaaggaattaccactgaatatttaactgccatgctgccctcttcccagaggccaaaaggcaaccacaccaaggattttttgacttataaattaactaaagagcaaattgcttcaaaatatggaattcccataaattccacaccattttgcttctccctttataaagacatcattaacatgcccgctggacctgtgatttgggctttcttgaaacctatgttgttgggaagaattttgtatgcaccatataacccagtcacaaaggcaataatggaaaagtccaatgtaactctgagacagctggcggaattaagagaaaaatctcaagagtggatggataagtcgccacttttcatgaattccttccatctgttaaaccaggcaattccaatgctccagaatactctaaggaacccttttgtgcaagtttttgtaaagttctccgtgggactcgatgctgttgaactattgaaacagatagatgaactcgatattctaagactgaaattagagaacaacattgacatcatcgatcagcttaacacactatcttccctgacagtaaatatttcctcttgtgtattatatgaccgtattcaggcagcaaaaaccatagatgaaatggagagagaggctaaaaggctctacaaaagcaacgaactctttggaagtgttatttttaagcttccttctaacagaagctggcacagaggctatgactctggaaatgtctttcttcctcctgtcataaaatataccatccggatgagtctcaagaccgcacagaccacaagaagcctaagaaccaagatttgggctccagggccacacaattctccatcacacaaccagatctatggcagggcttttatttatttacaggatagtattgaaagagcaatcattgaattgcaaactggaaggaactcccaggaaatagcagtccaggttcaagcaattccttatccctgcttcatgaaagacaacttcctaaccagtgtctcttattctcttccaattgtgcttatggttgcctgggttgtatttatagctgcctttgtaaaaaagcttgtctatgagaaagacctccggcttcatgagtacatgaagatgatgggtgtgaactcctgcagccatttctttgcctggcttatagagagtgttggatttttactggttaccatcgtgatcctcatcattatactcaagtttggcaatattcttcctaaaacaaatgggttcattttgttcctgtatttttcggactacagcttctcggttattgccatgagctatcttatcagtgtcttcttcaacaacaccaacattgcagctctgatcggaagcctcatctacatcattgccttctttccatttattgttctggttacagtggagaatgagttgagctatgtattgaaagtgttcatgagcctgctgtccccaacagcattcagctatgcaagccaatacattgcacgatacgaagaacagggcattggtcttcagtgggaaaatatgtacacctccccggttcaggatgacaccacctcatttggctggctgtgctgtctaatcctagctgactctttcatttatttccttattgcttggtatgtcaggaatgtcttcccagggacatacggtatggcagctccctggtattttccaattcttccttcctattggaaggagcgatttgggtgtgcagaggtgaagcctgagaagagcaatggcctcatgtttactaacatcatgatgcagaacaccaacccatctgccagtcctgaatacatgttttcctctaacatcgagcctgaacctaaagatctcacagtcggggttgccctgcatggggtcacaaagatctatggctcaaaagttgctgttgataacctcaatctgaacttttatgaagggcatattacttcattgctggggcccaatggagctgggaaaactactaccatttccatgttaactgggctgtttggggcctcagcaggcaccatttttgtatatggaaaagatatcaaaacagacctacacacggtacggaagaacatgggagtctgtatgcagcacgacgtcttgttcagttacctcactactaaggagcaccttctcctatatggttccatcaaagttcctcactggactaaaaagcagctccacgaggaagtaaaaaggactttaaaagatactggactatatagccatcgtcataagagagttggaacactgtcaggaggcatgaagaggaagttatctatatccatagctctcattggtggatcaagggtagtaattttggatgaaccatctactggagttgacccatgttctcgccgaagtatatgggatgttatatccaagaacaaaactgccagaacaatcattctgtcaacgcaccacttggacgaggctgaagtgctgagtgaccgcatcgccttcctggagcagggtgggcttaggtgctgtgggtccccattttacctcaaggaagcctttggcgatgggtatcacctcacgcttaccaagaagaagagtccaaatttaaatgcaaatgcagtatgtgacaccatggccgtgacagcaatgatccaatcacatctccccgaagcctacctcaaggaggatattgggggagagcttgtttatgtacttcctccattcagcaccaaagtctcaggggcctacctgtcactcctacgggcactcgacaatggcatgggtgacctcaacatcgggtgctacggcatttcagataccaccgtggaggaggtctttctgaacttgaccaaagagtcacaaaaaaatagtgctatgagtcttgagcacttaacacaaaagaaaattgggaattccaatgccaatggcatctcaactcctgacgatttatctgtgagcagcagcaatttcacagacagagatgacaaaatcctgacaagaggagagaggctggatggctttggactgttgctgaagaagatcatggctatactcatcaagaggttccaccacacccgcaggaactggaaaggtctcattgctcaggttatcctccccatcgtctttgttaccactgccatgggccttggcacactgagaaattccagcaacagttatccagagattcagatctccccctctctttatggtacctccgaacagacagccttctatgctaattatcacccgagcacggaagcacttgtctcagcaatgtgggacttccctggaattgacaacatgtgtctgaacaccagtgatctacagtgtttaaacaaagacagtctggaaaaatggaacaccagtggagaacccatcactaattttggtgtttgctcctgctcagaaaatgtccaggaatgtcctaaatttaactattccccaccgcacagaagaacttactcatcccaggtaatttataacctcactgggcaacgagtggaaaattatcttatatcaactgcaaatgagtttgtccaaaaaagatatggaggttggagttttgggctgcctttgacaaaagaccttcgttttgatataacaggagtccctgccaatagaacacttgccaaggtatggtatgatccagaaggctatcactcccttccagcttacctcaacagcctgaataatttccttctgcgagttaacatgtcaaaatacgatgctgcccgacatggcatcatcatgtatagccatccttatccaggagtgcaagaccaagaacaagccacaatcagcagtttaatcgatattttagtggcactgtctatcttgatgggctactctgtcaccaccgccagctttgtcacctatgttgtaagggaacatcaaaccaaagccaaacagttgcagcacatttcaggcattggcgtgacatgctactgggtaacaaacttcatttatgacatggttttctacttggtgcctgtagcgttttcaattggtatcattgcgattttcaaattacctgcattctacagtgaaaacaacctaggcgctgtatctctcctacttctcctgtttgggtatgcaacattttcctggatgtacttgctggctgggctcttccatgaaacaggaatggccttcatcacttacgtctgtgtcaacttgttttttggcattaattccattgtttccctgtcagtggtatactttctttccaaggaaaagcctaatgatccgactttagaacttatttctgaaaccctcaagcgcattttcctgattttcccacaattctgttttggctacggtttgattgaactttctcaacaacagtcggtcctagacttcttaaaagcatatggagtggaatacccaaatgaaacctttgagatgaataaactaggtgcaatgtttgtggctttggtttctcagggcaccatgtttttttccttgcgactcttaatcaacgaatccctgataaagaaactcaggcttttcttcagaaaatttaattcttcacatgtaagggagacaatagatgaggatgaagatgtgcgggctgagagattaagagttgagagtggtgcagctgaatttgacttggtccaactttattgtctcacaaagacctaccaacttatccacaaaaagattatagctgtaaacaacatcagcattgggatacctgctggagagtgttttgggcttcttggagtgaatggagcaggaaagaccactatattcaagatgctgacaggagacatcattccttcaagtggaaacattctgatcagaaataagaccggatctctgggtcacgttgattctcacagctcattagttggctactgtcctcaggaagatgccttagatgacctggtaactgtggaagaacatttgtatttctatgccagggtacatggaattccagaaaaggatattaaagaaactgttcataaactccttaggagacttcacctgatgcccttcaaggacagagctacctctatgtgcagttatggcacaaaaagaaaattatccactgcactggccttgatagggaaaccttccattctactgctggatgagccgagctctggcatggatccgaagtcgaaacggcacctctggaagatcatttcagaagaagtacagaacaaatgttccgtcatcctcacatctcacagcatggaagaatgtgaagctctctgtaccaggttggccattatggtgaatggaaagtttcaatgtattggatctttgcagcacataaagagcaggtttggacgaggatttactgtcaaagttcacttgaagaataacaaagtgaccatggagaccctcacaaagttcatgcagctgcactttccaaaaacatacttaaaagatcagcacctcagcatgctagagtatcatgtaccagtcacagcaggaggagtcgcaaacatttttgatctgctggaaaccaacaagactgctttaaatattacaaatttcttagtgagtcagaccactctggaagaggttttcatcaactttgccaaagaccagaagtcctatgaaactgctgataccagcagccaaggttccactataagtgttgactcacaagatgaccagatggagtcttaacacttccagcaaactcaatctcagcgtgtgaccaatggcttcattttgaagaaaagccacagaagatacacttccgcaagatatcttcattttaaagtaaagtaatatactgtatggaaagttacaactgtgttagactaacaagtaattataaaaggaaatttttccttctaaggtcagtgagtgttgttgctactgaaatgaattcctgtatactcaacactgtgagcatgctaatgtatatgctggtgattcttatgcaaaggtgaagccacctcaagatgaatatcttaatttattactttcaataaaaagacagtttaaaaggcatggattttggtagttgaaatataagagtggagaagaaaagtcagatggtttgtggcaggtgccaccgggcaagcagacaacataatttatttccagaaaacaacagaatgaacatcatcatgaatacatgaatcggctgtgatgtgtgaactgctaagggccaaatgaacgtttgcagagcagtgggcacaatgtttacaatgtatgtgtatgtcactttcggtacctgtgaatgcatggggacgtgctgaacccgaaaaaaagtgcctttccataaggactgcaatagagagggcaatttaccctggtggtacacggaacctagattcactcctgccatgccttgccaatagtaagctgcagggtggaacaagaaatcacttgctctggggggaagggaggggggaatgggtgtgtcagctgggtagatacaaaccctgaaaagagaatccatgtgctactggcaggcaacattttttaaagctctttcagaaaccctcatatttggggtttcttttcaggaaacattcctgtggagggaaaacgaatatgaagataattttcagctaattatctgggtgacccagaatcgtgtatatggctataggatagacttcttaataatggcaagtgacgtggccctggggaaaggtgctttatgtaccgtgtgtgcgtgtatgtgtgtgtatctatacaagtttgtcagctttggcatgactgtttgtctcgaaaaccaataaactcaaagtttagaaaaactca

SEQ ID NO: 110029 - DNA, 7005 bp, Homo sapiens
  Payload ID: 1600
  Gene Symbol: ABCA12
  Gene Name: ATP-binding cassette, sub-family A (ABC1), member 12
  Uniprot ID: Q86UK0
  ENST ID: ENST00000389661
  CDS Start-End: 160-6993
atttcctataaatatcacaaatatttccaacaaaagagcatagatgtcttttatacaattcttttgagaatgattctgcagatttctgcattttctcctcattaatttgacctgggatggttttcactgaggaaaaaaatctttaagcaaacatgttaaatgtttacctatataaaaattattacttcaggtgactccgataatataacgcatgtgtggaatgaggatgatggacagaccttatctccaagcagtctggctgcacagctcctaattctggaaaactttgaagatgccctcttaaatatatcagcaaatagtccttatattccttacttggcatgtgtgagaaatgtgactgacagtttggccagaggttcaccagaaaatctaagactcctgcagtccacaatacgatttaaaaaatcttttcttcgcaatggttcctatgaagattactttcctccagttcctgaagtcctaaaatcaaaactgtctcaacttcgaaacttgaccgaacttctttgtgaatctgaaactttcagtttgatagagaagtcatgccagctctctgatatgagctttgggagcctgtgtgaagaaagtgagtttgatctgcaactcctcgaagcggcagagctgggcaccgaaatagcagccagcttactgtaccatgacaatgtcatatctaaaaaagtgagagatttgctgactggagatccaagcaaaattaatttaaatatggatcagtttctagaacaggcactgcaaatgaattacttggaaaatatcactcagttaataccgatcatagaagccatgctgcatgtcaataacagtgcagatgcttctgaaaagccaggtcagttactagaaatgtttaaaaatgttgaagagctgaaagaagatttaaggagaacaacaggaatgtccaacaggactattgacaagttgctggccattcccatccctgataatagagctgagattatttctcaggtgttctggctgcattcctgtgatactaatatcaccactcccaaactagaagatgcaatgaaagaattctgcaacctgtctctttcagagagatcccggcagtcttacctcatcggactcacccttctgcactacttaaacatttacaacttcacatacaaggtgtttttcccgaggaaagatcaaaagccagtagaaaagatgatggagctcttcataagactaaaagagattctcaatcagatggcttctggcacacatccgctgctagacaaaatgagatccctgaagcaaatgcatctgcccagaagtgttccattaacacaggcaatgtacagaagcaaccgaatgaacacaccacaaggatcatttagcaccatctcccaagcattatgttctcaaggaattaccactgaatatttaactgccatgctgccctcttcccagaggccaaaaggcaaccacaccaaggattttttgacttataaattaactaaagagcaaattgcttcaaaatatggaattcccataaattccacaccattttgcttctccctttataaagacatcattaacatgcccgctggacctgtgatttgggctttcttgaaacctatgttgttgggaagaattttgtatgcaccatataacccagtcacaaaggcaataatggaaaagtccaatgtaactctgagacagctggcggaattaagagaaaaatctcaagagtggatggataagtcgccacttttcatgaattccttccatctgttaaaccaggcaattccaatgctccagaatactctaaggaacccttttgtgcaagtttttgtaaagttctccgtgggactcgatgctgttgaactattgaaacagatagatgaactcgatattctaagactgaaattagagaacaacattgacatcatcgatcagcttaacacactatcttccctgacagtaaatatttcctcttgtgtattatatgaccgtattcaggcagcaaaaaccatagatgaaatggagagagaggctaaaaggctctacaaaagcaacgaactctttggaagtgttatttttaagcttccttctaacagaagctggcacagaggctatgactctggaaatgtctttcttcctcctgtcataaaatataccatccggatgagtctcaagaccgcacagaccacaagaagcctaagaaccaagatttgggctccagggccacacaattctccatcacacaaccagatctatggcagggcttttatttatttacaggatagtattgaaagagcaatcattgaattgcaaactggaaggaactcccaggaaatagcagtccaggttcaagcaattccttatccctgcttcatgaaagacaacttcctaaccagtgtctcttattctcttccaattgtgcttatggttgcctgggttgtatttatagctgcctttgtaaaaaagcttgtctatgagaaagacctccggcttcatgagtacatgaagatgatgggtgtgaactcctgcagccatttctttgcctggcttatagagagtgttggatttttactggttaccatcgtgatcctcatcattatactcaagtttggcaatattcttcctaaaacaaatgggttcattttgttcctgtatttttcggactacagcttctcggttattgccatgagctatcttatcagtgtcttcttcaacaacaccaacattgcagctctgatcggaagcctcatctacatcattgccttctttccatttattgttctggttacagtggagaatgagttgagctatgtattgaaagtgttcatgagcctgctgtccccaacagcattcagctatgcaagccaatacattgcacgatacgaagaacagggcattggtcttcagtgggaaaatatgtacacctccccggttcaggatgacaccacctcatttggctggctgtgctgtctaatcctagctgactctttcatttatttccttattgcttggtatgtcaggaatgtcttcccagggacatacggtatggcagctccctggtattttccaattcttccttcctattggaaggagcgatttgggtgtgcagaggtgaagcctgagaagagcaatggcctcatgtttactaacatcatgatgcagaacaccaacccatctgccagtcctgaatacatgttttcctctaacatcgagcctgaacctaaagatctcacagtcggggttgccctgcatggggtcacaaagatctatggctcaaaagttgctgttgataacctcaatctgaacttttatgaagggcatattacttcattgctggggcccaatggagctgggaaaactactaccatttccatgttaactgggctgtttggggcctcagcaggcaccatttttgtatatggaaaagatatcaaaacagacctacacacggtacggaagaacatgggagtctgtatgcagcacgacgtcttgttcagttacctcactactaaggagcaccttctcctatatggttccatcaaagttcctcactggactaaaaagcagctccacgaggaagtaaaaaggactttaaaagatactggactatatagccatcgtcataagagagttggaacactgtcaggaggcatgaagaggaagttatctatatccatagctctcattggtggatcaagggtagtaattttggatgaaccatctactggagttgacccatgttctcgccgaagtatatgggatgttatatccaagaacaaaactgccagaacaatcattctgtcaacgcaccacttggacgaggctgaagtgctgagtgaccgcatcgccttcctggagcagggtgggcttaggtgctgtgggtccccattttacctcaaggaagcctttggcgatgggtatcacctcacgcttaccaagaagaagagtccaaatttaaatgcaaatgcagtatgtgacaccatggccgtgacagcaatgatccaatcacatctccccgaagcctacctcaaggaggatattgggggagagcttgtttatgtacttcctccattcagcaccaaagtctcaggggcctacctgtcactcctacgggcactcgacaatggcatgggtgacctcaacatcgggtgctacggcatttcagataccaccgtggaggaggtctttctgaacttgaccaaagagtcacaaaaaaatagtgctatgagtcttgagcacttaacacaaaagaaaattgggaattccaatgccaatggcatctcaactcctgacgatttatctgtgagcagcagcaatttcacagacagagatgacaaaatcctgacaagaggagagaggctggatggctttggactgttgctgaagaagatcatggctatactcatcaagaggttccaccacacccgcaggaactggaaaggtctcattgctcaggttatcctccccatcgtctttgttaccactgccatgggccttggcacactgagaaattccagcaacagttatccagagattcagatctccccctctctttatggtacctccgaacagacagccttctatgctaattatcacccgagcacggaagcacttgtctcagcaatgtgggacttccctggaattgacaacatgtgtctgaacaccagtgatctacagtgtttaaacaaagacagtctggaaaaatggaacaccagtggagaacccatcactaattttggtgtttgctcctgctcagaaaatgtccaggaatgtcctaaatttaactattccccaccgcacagaagaacttactcatcccaggtaatttataacctcactgggcaacgagtggaaaattatcttatatcaactgcaaatgagtttgtccaaaaaagatatggaggttggagttttgggctgcctttgacaaaagaccttcgttttgatataacaggagtccctgccaatagaacacttgccaaggtatggtatgatccagaaggctatcactcccttccagcttacctcaacagcctgaataatttccttctgcgagttaacatgtcaaaatacgatgctgcccgacatggcatcatcatgtatagccatccttatccaggagtgcaagaccaagaacaagccacaatcagcagtttaatcgatattttagtggcactgtctatcttgatgggctactctgtcaccaccgccagctttgtcacctatgttgtaagggaacatcaaaccaaagccaaacagttgcagcacatttcaggcattggcgtgacatgctactgggtaacaaacttcatttatgacatggttttctacttggtgcctgtagcgttttcaattggtatcattgcgattttcaaattacctgcattctacagtgaaaacaacctaggcgctgtatctctcctacttctcctgtttgggtatgcaacattttcctggatgtacttgctggctgggctcttccatgaaacaggaatggccttcatcacttacgtctgtgtcaacttgttttttggcattaattccattgtttccctgtcagtggtatactttctttccaaggaaaagcctaatgatccgactttagaacttatttctgaaaccctcaagcgcattttcctgattttcccacaattctgttttggctacggtttgattgaactttctcaacaacagtcggtcctagacttcttaaaagcatatggagtggaatacccaaatgaaacctttgagatgaataaactaggtgcaatgtttgtggctttggtttctcagggcaccatgtttttttccttgcgactcttaatcaacgaatccctgataaagaaactcaggcttttcttcagaaaatttaattcttcacatgtaagggagacaatagatgaggatgaagatgtgcgggctgagagattaagagttgagagtggtgcagctgaatttgacttggtccaactttattgtctcacaaagacctaccaacttatccacaaaaagattatagctgtaaacaacatcagcattgggatacctgctggagagtgttttgggcttcttggagtgaatggagcaggaaagaccactatattcaagatgctgacaggagacatcattccttcaagtggaaacattctgatcagaaataagaccggatctctgggtcacgttgattctcacagctcattagttggctactgtcctcaggaagatgccttagatgacctggtaactgtggaagaacatttgtatttctatgccagggtacatggaattccagaaaaggatattaaagaaactgttcataaactccttaggagacttcacctgatgcccttcaaggacagagctacctctatgtgcagttatggcacaaaaagaaaattatccactgcactggccttgatagggaaaccttccattctactgctggatgagccgagctctggcatggatccgaagtcgaaacggcacctctggaagatcatttcagaagaagtacagaacaaatgttccgtcatcctcacatctcacagcatggaagaatgtgaagctctctgtaccaggttggccattatggtgaatggaaagtttcaatgtattggatctttgcagcacataaagagcaggtttggacgaggatttactgtcaaagttcacttgaagaataacaaagtgaccatggagaccctcacaaagttcatgcagctgcactttccaaaaacatacttaaaagatcagcacctcagcatgctagagtatcatgtaccagtcacagcaggaggagtcgcaaacatttttgatctgctggaaaccaacaagactgctttaaatattacaaatttcttagtgagtcagaccactctggaagaggttttcatcaactttgccaaagaccagaagtcctatgaaactgctgataccagcagccaaggttccactataagtgttgactcacaagatgaccagatggagtcttaacacttccagcaa

SEQ ID NO: 110030 - DNA, 485 bp, Homo sapiens
  Payload ID: 1600
  Gene Symbol: ABCA12
  Gene Name: ATP-binding cassette, sub-family A (ABC1), member 12
  ENST ID: ENST00000412081
  CDS Start-End: 197-469
ttggttaaggattaaccacagggaaaaatccagcagaaacagaagaactgtgggtttcttaccccagccctcaaggaagctatgccgtgaaaggggtactgatacactgacatacagcaagttggacggggcatcagttcttcatttgtggagtggagaaaagaagaggaaatctctcatttggggcatttgaaggatggcttccctgtttcatcagcttcagatcctggtctggaaaaattggctaggtgtaaaaaggcagccgctttggacacttgtcttgatcttatggccagtcattattttcataattttggctattactcggaccaaatttcctccaactgcaaaaccaacttgggattcttctacttggaacacttgtgatggatggatggcccagattttttttttttcctgcataaatgaggaaactgactcaagatacagggttatgattgcacaataaatcatttgcaaagcta

SEQ ID NO: 110031 - DNA, 463 bp, Homo sapiens
  Payload ID: 1601
  Gene Symbol: ABCA13
  Gene Name: ATP-binding cassette, sub-family A (ABC1), member 13
  ENST ID: ENST00000435451
  CDS Start-End: 1-463
cctggagagcatccgtcagtgtggagtggccctctgcatcgtgctgggattctccatcctgtctgcatccatcggcagctctgtgctcttttacttggtttccgtctgcctgtgtgttgccgttattgtcgccttccagttaacagcttttactttccgcaagaacttggcagccacggccctcctgctgtcacttttcggatatgcaactcttccatggatgtacctgatgtccagaatcttttccagttcggacgtggctttcatttcctatgtctcactaaacttcatctttggcctttgtaccatgctcataaccattatgccccggttgctagccatcatctccaaagctaagaatttacagaatatctatgatgtcctcaagtgggtctttactatttttcctcaattctgtcttggtcaaggactggtagaactctgctataatcagatcaaatat

SEQ ID NO: 110032 - DNA, 4480 bp, Homo sapiens
  Payload ID: 1601
  Gene Symbol: ABCA13
  Gene Name: ATP-binding cassette, sub-family A (ABC1), member 13
  ENST ID: ENST00000411975
  CDS Start-End: 1-2496
gtgcagggcgtccagctgctccgcgcacaagtggccgcgatcctggcccggaggctccgccgcacgctgcgcgccgggaagagcaccctcgccgacctgctgctgccagtcctcttcgtggccttggccatgggcttgttcatggtgagacccctggccaccgagtaccctcccctcagactcacacctggacattaccagcgggccgagacctactttttcaggaagaattcttcatgctggcgcacagatcccttttctcacccagaattccaggattcatgtggctgcctgaagtgtccaaatagaagtgctagtgctccctacctgaccaaccacctgggccacacactgttgaatctctcaggcttcaatatggaggagtacttgctggcaccatctgaaaaaccaaggcttggaggttggtcttttggattaaaaatccccagtgaagctggaggtgcaaatggaaacatatcaaaacccccaactctggcaaaggtgtggtataatcagaagggttttcattccctaccttcctacttaaatcatctaaacaaccttattttgtggcagcacctaccccctactgtggactggagacaatacggaataacactctacagccacccatatggaggggccttgctgaacgaggacaagatcctggagagcatccgtcagtgtggagtggccctctgcatcgtgctgggattctccatcctgtctgcatccatcggcagctctgtggtgagggacagggtgattggagccaaaaggttgcagcacataagtggccttggctacaggatgtactggttcacaaacttcctatatgacatgctcttttacttggtttccgtctgcctgtgtgttgccgttattgtcgccttccagttaacagcttttactttccgcaagaacttggcagccacggccctcctgctgtcacttttcggatatgcaactcttccatggatgtacctgatgtccagaatcttttccagttcggacgtggctttcatttcctatgtctcactaaacttcatctttggcctttgtaccatgctcataaccattatgccccggttgctagccatcatctccaaagctaagaatttacagaatatctatgatgtcctcaagtgggtctttactatttttcctcaattctgtcttggtcaaggactggtagaactctgctataatcagatcaaatatgacctgacccacaacttcggcattgattcctatgtgagtccctttgagatgaactttctgggctggatcttcgtgcaactggcctcgcagggcacagtacttctcctcttgagggttctgctacactgggaccttctgcgatggccaaggggtcattctactctccaaggcacagtcaaatcttctaaggatacagatgttgaaaaagaggaaaagagagtgtttgaaggaaggaccaatggagacattcttgtgttatacaaccttagtaaacattatcgacgctttttccagaatattattgctgtgcaagatattagtttgggcataccaaaaggagagtgctttggacttctaggggtgaatggagctgggaagagcacgactttcaaaatgctgaatggtgaagtttctctaacttcaggacatgctatcatcaggactcccatgggagacgccgtggacctgtcttctgctggcacggcaggcgtgctcattggctactgtccccagcaggatgccctggacgagcttctgactggttgggaacatctctattattactgtagcttacgcgggattccaaggcagtgcatccctgaggttgctggagacctcatcaggcgcttacacctcgaagcccacgcggacaaacctgtggccacctacagtgggggaaccaagcggaaactctctacagccctggccctggtggggaaacctgacattcttttattggatgagcccagctctgggatggatccctgctctaagcggtacctgtggcaaacaataatgaaggaggttcgggaaggctgtgctgcggtgctgacctcccacagcatggaggagtgtgaggctctttgcacaagactggccataatggttaacggcagcttcaaatgtcttggttctcctcagcacatcaaaaataggtttggtgatggttatacagtcaaagtttggctctgtaaggaagcaaatcaacattgcactgtttctgaccacttgaagctttattttccaggaattcagttcaagggacagcacctgaatttattagaatatcatgtgccaaaaagatggggatgcctagctgacttgttcaaagttatagagaacaataaaaccttcttgaatattaagcattattccattaaccaaaccactttggagcaggtatttattaattttgcttctgagcagcagcaaactctacaatctactcttgatccatccactgacagtcaccacacacatcacttgcccatctgagcactaaagaagtttccataaggaataaaaccttgtcttccattacaattaacagtcaaggataaaacaagcacgcgcacaatcaaggagctggaacacactctccaggccgtcaaattattctcttgttcattttctattttgaatctccttgttagttaataaccaccaaatggaaaggtcattctttctgcagacttttggggagctcctccaaaacatttgttctctttaccatgccagatggacaccagcttctttgtgacaaaggcatgaatgatttgacagtgtccaaactgagacattctggagctggaaagcctgtcacactagagtgtgtgtgacatgtccactctaaacatgtcacttttctgttaagaaaactgagccccctccccacaggttaaaaaactttagtaacttgtttgtatagaaaatagtaacaaggactattttctattgttgtcatctatttactagatacatgtttttaatgattttaatgtaagcttttattaatactgatgacattatatggtatgatatgaaaaaatcaccaattttttacatataaaagatacctttttaaaaaaataggttttaagagctcttttagtatacactttagcaaaattaattaaattgaactagttactctgtatcaattacagtagttctaccagaatctcccaggttataatttatgagggtagagaaataaaatgtagatgcattttctttttcttcatttggatgaataattactgttttttgttattctaagtcagtgtttttcaaagcgtagtggtccccatattagctgcattgccatcttctgggagcttgcaagaaatgtacattctcaggatccactccagacctattgaatctcaaattctggggcttaaacaagcacattccaagttaagaaccaatgacctaagggaatgtctggttacctcctagttatacaagcaaaatctgcatagtatgtagtcttttttatttatttattttttttttttgaggcggagtctcgctctgtcacccaggctggagtgcagtggcgcgatgtcggctcactgcaagctccgcctcctgggttcacgccattctcctgcctcagcctccccagcagctgggactacaggcacacatcgccacacccggctaatttttagtatttttagtagagacggggtttcaccgtgttagccaggatggtctctatctcctgaccttgtgatccgcccccctccacctcccaaagtgctgggattacaggcgtgagccaccgtgtccggccgtagtttattttaaaatatatttttaaaagctttgtaaaaattatgtcattctcagaattgttgtcttcaaagcattgtcagatgtagagtgctcagatgtggctcttaaagactatatacatctgaatttttcatcctatagttagtaagatgcataaaatcaatccactactgaaatagtttccagtcagacatttctgagttcagacatttctcaacattcttttaacaacatttttctgaatcctcaatagaaaatcacattaatcttattttaaaatttggcctttttcaacactaacgttgagtaccggtagcttgtgatcaaaggcatatacttccttatgagatttctttactaaagcaagatttcattaaatctctatttcctaaatatcattctatacaaaagatattttttaaacggtaaggattaagacaatcactgatagctttgttgtgagcaattttgattcccatgtatcacatgaattacacttccttaaataaattacagtttatggctgtatgatttattctctaattctaacatagtctagttgtcaaaaggaaatatgtaatctttttatgattgttgaatcaataaataccaatttgtgaaacatgaatgtgtttaaactgcagtgaataaatgagatgtgctttaatttaacccg

SEQ ID NO: 110033 - DNA, 4275 bp, Homo sapiens
  Payload ID: 1601
  Gene Symbol: ABCA13
  Gene Name: ATP-binding cassette, sub-family A (ABC1), member 13
  ENST ID: ENST00000453246
  CDS Start-End: 1-3577
gattcaatggaataatatgtaccaggctctggaacaagggggcatgacatttggctgggtttgctggatgattctttttgattcaagcctttattttttgtgtggatggtacttgagcaacttgattcctggaacatttggtttacggaaaccatggtatttcccctttactgcctcatattggaagagtgtgggtttcttggtggagaaaaggcaatactttctaagttctagtctgttcttcttcaatgagaactttgacaataaagggtcatcactgcaaaacagggaaggagagcttgaaggaagtgccccgggagtcaccctggtgtctgtgaccaaggaatatgagggccacaaggctgtggtccaagacctcagcctgaccttctacagagaccaaatcaccgccctgctggggacaaacggtgccgggaaaaccactatcatatccatgttgacggggctccaccctcccacttctggaaccatcatcatcaatggcaagaacctacagacagacctgtcgagggtcagaatggagcttggtgtgtgtccgcagcaggacatcctgttggacaacctcaccgtccgggaacatttgctgctctttgcttccataaaggcgcctcagtggaccaagaaggagctgcatcagcaagtcaatcaaactcttcaggatgtggacttaactcagcatcagcacaaacagacccgagctctgtctggaggcctgaagaggaagctctcccttggcattgctttcatgggcatgtcgaggaccgtggttctggatgagcccaccagtggggtggacccttgctcccggcatagcctgtgggacattctgctcaagtaccgagaaggtcgtacgatcatcttcacaacccaccacctggatgaagctgaagcgctgagtgaccgcgtggccgtcctccagcatgggaggctcaggtgctgcggtcctcccttctgcctgaaggaggcatatggccaggggctccgcctgacactcacgaggcagccttctgttctggaggcccatgatctgaaagacatggcttgtgttacatccctgataaagatctatattccacaagcatttctcaaagacagcagtggaagtgagctgacctacaccattccaaaggacacagacaaggcctgcttgaaagggctcttccaggccctggatgagaacctgcatcagctgcacctgacgggctatgggatctcagacaccaccttagaagaggtgtttttgatgcttttgcaagattccaacaagaaatctcacattgccctggggactgagtcagagctgcagaaccacaggcctacaggacatctgtctggctactgtggctccctagcacggcccgcaactgtgcagggcgtccagctgctccgcgcacaagtggccgcgatcctggcccggaggctccgccgcacgctgcgcgccgggaagagcaccctcgccgacctgctgctgccagtcctcttcgtggccttggccatgggcttgttcatggtgagacccctggccaccgagtaccctcccctcagactcacacctggacattaccagcgggccgagacctactttttcagcagtgggggcgacaacttggacctcacccgtgtgcttctgcggaagtttagagatcaagatttgccctgtgcagatttaaacccacgccagaagaattcttcatgctggcgcacagatcccttttctcacccagaattccaggattcatgtggctgcctgaagtgtccaaatagaagtgctagtgctccctacctgaccaaccacctgggccacacactgttgaatctctcaggcttcaatatggaggagtacttgctggcaccatctgaaaaaccaaggcttggaggttggtcttttggattaaaaatccccagtgaagctggaggtgcaaatggaaacatatcaaaacccccaactctggcaaaggtgtggtataatcagaagggttttcattccctaccttcctacttaaatcatctaaacaaccttattttgtggcagcacctaccccctactgtggactggagacaatacggaataacactctacagccacccatatggaggggccttgctgaacgaggacaagatcctggagagcatccgtcagtgtggagtggccctctgcatcgtgctgggattctccatcctgtctgcatccatcggcagctctgtggtgagggacagggtgattggagccaaaaggttgcagcacataagtggccttggctacaggatgtactggttcacaaacttcctatatgacatgctcttttacttggtttccgtctgcctgtgtgttgccgttattgtcgccttccagttaacagcttttactttccgcaagaacttggcagccacggccctcctgctgtcacttttcggatatgcaactcttccatggatgtacctgatgtccagaatcttttccagttcggacgtggctttcatttcctatgtctcactaaacttcatctttggcctttgtaccatgctcataaccattatgccccggttgctagccatcatctccaaagctaagaatttacagaatatctatgatgtcctcaagtgggtctttactatttttcctcaattctgtcttggtcaaggactggtagaactctgctataatcagatcaaatatgacctgacccacaacttcggcattgattcctatgtgagtccctttgagatgaactttctgggctggatcttcgtgcaactggcctcgcagggcacagtacttctcctcttgagggttctgctacactgggaccttctgcgatggccaaggggtcattctactctccaaggcacagtcaaatcttctaaggatacagatgttgaaaaagaggaaaagagagtgtttgaaggaaggaccaatggagacattcttgtgttatacaaccttagtaaacattatcgacgctttttccagaatattattgctgtgcaagatattagtttgggcataccaaaaggagagtgctttggacttctaggggtgaatggagctgggaagagcacgactttcaaaatgctgaatggtgaagtttctctaacttcaggacatgctatcatcaggactcccatgggagacgccgtggacctgtcttctgctggcacggcaggcgtgctcattggctactgtccccagcaggatgccctggacgagcttctgactggttgggaacatctctattattactgtagcttacgcgggattccaaggcagtgcatccctgaggttgctggagacctcatcaggcgcttacacctcgaagcccacgcggacaaacctgtggccacctacagtgggggaaccaagcggaaactctctacagccctggccctggtggggaaacctgacattcttttattggatgagcccagctctgggatggatccctgctctaagcggtacctgtggcaaacaataatgaaggaggttcgggaaggctgtgctgcggtgctgacctcccacaggttttggtatcaggatgatgctggcctcataaaatgagttacagaggattccctctttttctattgattggaatagtttcagaaggaatggtaccagctcctctttgtacctctagtagaatttggctgtgaattcgtctggtcctggactttttttggaaaatatataaagcatatttggaaaatttatgacatgtatctcttggacttcatgctaagcaactataacaaagaaacctcaacttacagtggcccagacaagacacattttttcctctcgctaaattcatgtcagtgggctgtgcatcatcaggccaaccaaggccttgggttctttccaccgtgccaccatcaccatcatcatggttgatgttgactcatcagcaccgtatctacatcctagctcaagggaagtggagaaaaacaaaatccagcatggaggagtgtgaggctctttgcacaagactggccataatggttaacggcagcttcaaatgtcttggttctcctcagcacatcaaaaataggtttggtgatggttatacagtcaaagtttggctctgtaaggaagcaaatcaacattgcactgtttctgaccacttgaagctttattttccaggaattcagttcaagggacagcacctgaatttattagaatatcatgtgccaaaaagatggggatgcctagctgacttgttcaaagttatagagaacaataaaaccttcttgaatatt

SEQ ID NO: 110034 - DNA, 3528 bp, Homo sapiens
  Payload ID: 1601
  Gene Symbol: ABCA13
  Gene Name: ATP-binding cassette, sub-family A (ABC1), member 13
  Uniprot ID: Q86UQ4
  ENST ID: ENST00000417403
  CDS Start-End: 27-980
ctgactgagagcagggagcagcaggcatggggcatgccgggtgccagttcaaagccctgctgtggaagaattggctctgcagactcaggaacccggtccttttccttgctgaattcttctggccttgtatcctgtttgtaattctgacagttcttcgttttcaagaacctcccagatacagagacatttgttatttgcagccccgagatctacccagctgtggtgttatcccctttgttcaaagccttctttgtaacactggatcaaggtgtaggaacttcagctatgaagggtcaatggagcatcattttcgtttgtctaggttccaaactgcagctgaccccaagaaagtcaacaacctggcctttttaaaagagatacaagacctggcagaggaaattcatggaatgatggacaaggcaaaaaacttaaaaagactttgggtagaacgatccaacactccagattcttcttatggttccagtttttttacaatggatctcaataagaccgaggaggtaatattgaaactggaaagcctccatcagcagcctcatatctgggattttctacttttactgccgagactacacacaagccatgatcatgtggaagatggcatggatgttgcagtgaaccttctccagaccattttgaattccttaatatccctagaagatttagattggcttccactcaaccaaactttttcccaggtttctgaacttgtactgaatgtgaccatttcgacactgacatttctgcagcaacatggagtagcagtcaccgagccagtttaccacctgtccatgcagaatatagtgtgggatccacagaaagtccagtatgatctcaaatcccagtttggctttgatgatcttcacacggaacagatcctgaactcttcagctgaactgaaggaggtacacatgcttgactgcttctcacaccgctgggcctttcctggagactggatctagagcatgctgctggggcaggattcccacagacacttccttggagaagatggtgtgttcagtcttgtctagcacatcagaggatgaagctgagaaatggggccacgttggaggctgccaccctaagtggtcagaagccaaaaactatcttgtccatgcagtcagctggctgcgagtctaccaacaggtgtttgttcagtggcaacagggtagcctgcttcagaagacactcacaggcatgggccatagtctggaggctctcaggaatcagtttgaagaagagagcaagccctggaaggtggtggaagctctgcacactgcactgctcctgctgaatgacagcttgtcagcagatggcccaaaagataatcatacatttccaaagatgttctttctggttcctgcccacgtccctgcagtacgggtggctgaggtgtgggagctcttcacccaggctctagcagatagcgtggattttggcaagattacagcatctgtggaaattgcaaagcttgctgcaaaacctgccccagtggccggcactgaagagatttcttcagcttgatggagctctcagaaatgcgatagctcagaatttacattttgtccaagaagtcctcatttgcctggagacatcagctaatgattttaaatggtttgaacttaaccaattgaaactggaaaaggatgtgttcttttgggagctgaaacagatgttggcgaagaatgctgtctgcccgaatggtcgtttctctgagaaggaggtctttttgccgcctggaaactccagcatatggggtggtctccagggactgttgtgctattgtaactcctctgagacgagtgttttaaacaagctacttggttcagtagaggatgctgatcgtattttgcaagaggtcattacttggcacaaaaatatgtcagttttaatacctgaagaatatttggactggcaggaacttgagatgcagctgtcagaagcaagcctttcctgtactcggctcttcctgctgctgggagctgatccctctcctgagaatgatgtcttttctagtgactgtaagcaccagcttgtctccacagtgatatttcatacacttgaaaaaacacaatttttcctggaacaagcatattattggaaagccttcaaaaagtttatcaggaagacttgcgaagtggcccaatatgtaaatatgcaagagagtttccagaacagactattggcttttcctgaggaatctccttgttttgaagaaaacatggattggaaaatgatcagtgataattattttcaatttttgaataacttactcaagtctccaacagcttccatatccagggctttaaatttcacaaagcaccttctaatgatggaaaagaagttgcacacccttgaggatgaacaaatgaactttcttttatcatttgtggaattttttgagaaattattgttgcctaatctttttgactcctccattgttcccagtttccacagcctcccatctctcacagaggatattctgaatataagttctctgtggacaaatcatttaaaaagtttaaagagagacccatctgccactgatgctcagaaactcttggaatttggcaacgaagtgatttggaaaatgcagactctcggaagtcactggataaggaaggaaccaaaaaatcttttgagattcatagaattaatactttttgaaattaatcccaaattactagaattatgggcctatggcatttcaaaaggaaaaagagctaaattggaaaacttctttacacttttaaatttttctgttccagaaaatgagattctgagtacaagttttaacttttcccagttgttccattcagattggcctaaatcaccagctatgaacatagattttgtacgtttaagtgaggctataataactagtctccatgaatttggatttttggagcaggaacagatctcagaagctctgaacacagtctacgctatcaggaatgcatctgatcttttctcagccctttctgaaccacaaaaacaagaagttgataaaattttgactcacatacacctaaatgtcttccaggacaaggattcagctttacttctgcaaatttattcttcattttaccgatatatttatgaattattgaatattcagagtagaggctcttcgttgactttccttacacaaatctcaaaacacattttggatatcataaaacaatttaatttccaaaacatcagtaaagcatttgcatttttatttaagacagcagaggttcttgggggaatttctaatgtatcttactgtcagcaattgctttcaatttttaactttttggagcttcaggcccaatccttcatgtctacagagggccaagaactggaagtgatccacactactttgacaggcctcaaacagctgctcataattgatgaagattttcgtatttctttatttcaatatatgagccaattcttcaacagttcagtagaagacctattggataataaatgcttgatttcggacaataaacacatttcttccgt

SEQ ID NO: 110035 - DNA, 17184 bp, Homo sapiens
  Payload ID: 1601
  Gene Symbol: ABCA13
  Gene Name: ATP-binding cassette, sub-family A (ABC1), member 13
  ENST ID: ENST00000435803
  CDS Start-End: 25-15201
gactgagagcagggagcagcaggcatggggcatgccgggtgccagttcaaagccctgctgtggaagaattggctctgcagactcaggaacccggtccttttccttgctgaattcttctggccttgtatcctgtttgtaattctgacagttcttcgttttcaagaacctcccagatacagagacatttgttatttgcagccccgagatctacccagctgtggtgttatcccctttgttcaaagccttctttgtaacactggatcaaggtgtaggaacttcagctatgaagggtcaatggagcatcattttcgtttgtctaggttccaaactgcagctgaccccaagaaagtcaacaacctggcctttttaaaagagatacaagacctggcagaggaaattcatggaatgatggacaaggcaaaaaacttaaaaagactttgggtagaacgatccaacactccagattcttcttatggttccagtttttttacaatggatctcaataagaccgaggaggtaatattgaaactggaaagcctccatcagcagcctcatatctgggattttctacttttactgccgagactacacacaagccatgatcatgtggaagatggcatggatgttgcagtgaaccttctccagaccattttgaattccttaatatccctagaagatttagattggcttccactcaaccaaactttttcccaggtttctgaacttgtactgaatgtgaccatttcgacactgacatttctgcagcaacatggagtagcagtcaccgagccagtttaccacctgtccatgcagaatatagtgtgggatccacagaaagtccagtatgatctcaaatcccagtttggctttgatgatcttcacacggaacagatcctgaactcttcagctgaactgaaggagattcccacagacacttccttggagaagatggtgtgttcagtcttgtctagcacatcagaggatgaagctgagaaatggggccacgttggaggctgccaccctaagtggtcagaagccaaaaactatcttgtccatgcagtcagctggctgcgagtctaccaacaggtgtttgttcagtggcaacagggtagcctgcttcagaagacactcacaggcatgggccatagtctggaggctctcaggaatcagtttgaagaagagagcaagccctggaaggtggtggaagctctgcacactgcactgctcctgctgaatgacagcttgtcagcagatggcccaaaagataatcatacatttccaaagatattacagcatctgtggaaattgcaaagcttgctgcaaaacctgccccagtggccggcactgaagagatttcttcagcttgatggagctctcagaaatgcgatagctcagaatttacattttgtccaagaagtcctcatttgcctggagacatcagctaatgattttaaatggtttgaacttaaccaattgaaactggaaaaggatgtgttcttttgggagctgaaacagatgttggcgaagaatgctgtctgcccgaatggtcgtttctctgagaaggaggtctttttgccgcctggaaactccagcatatggggtggtctccagggactgttgtgctattgtaactcctctgagacgagtgttttaaacaagctacttggttcagtagaggatgctgatcgtattttgcaagaggtcattacttggcacaaaaatatgtcagttttaatacctgaagaatatttggactggcaggaacttgagatgcagctgtcagaagcaagcctttcctgtactcggctcttcctgctgctgggagctgatccctctcctgagaatgatgtcttttctagtgactgtaagcaccagcttgtctccacagtgatatttcatacacttgaaaaaacacaatttttcctggaacaagcatattattggaaagccttcaaaaagtttatcaggaagacttgcgaagtggcccaatatgtaaatatgcaagagagtttccagaacagactattggcttttcctgaggaatctccttgttttgaagaaaacatggattggaaaatgatcagtgataattattttcaatttttgaataacttactcaagtctccaacagcttccatatccagggctttaaatttcacaaagcaccttctaatgatggaaaagaagttgcacacccttgaggatgaacaaatgaactttcttttatcatttgtggaattttttgagaaattattgttgcctaatctttttgactcctccattgttcccagtttccacagcctcccatctctcacagaggatattctgaatataagttctctgtggacaaatcatttaaaaagtttaaagagagacccatctgccactgatgctcagaaactcttggaatttggcaacgaagtgatttggaaaatgcagactctcggaagtcactggataaggaaggaaccaaaaaatcttttgagattcatagaattaatactttttgaaattaatcccaaattactagaattatgggcctatggcatttcaaaaggaaaaagagctaaattggaaaacttctttacacttttaaatttttctgttccagaaaatgagattctgagtacaagttttaacttttcccagttgttccattcagattggcctaaatcaccagctatgaacatagattttgtacgtttaagtgaggctataataactagtctccatgaatttggatttttggagcaggaacagatctcagaagctctgaacacagtctacgctatcaggaatgcatctgatcttttctcagccctttctgaaccacaaaaacaagaagttgataaaattttgactcacatacacctaaatgtcttccaggacaaggattcagctttacttctgcaaatttattcttcattttaccgatatatttatgaattattgaatattcagagtagaggctcttcgttgactttccttacacaaatctcaaaacacattttggatatcataaaacaatttaatttccaaaacatcagtaaagcatttgcatttttatttaagacagcagaggttcttgggggaatttctaatgtatcttactgtcagcaattgctttcaatttttaactttttggagcttcaggcccaatccttcatgtctacagagggccaagaactggaagtgatccacactactttgacaggcctcaaacagctgctcataattgatgaagattttcgtatttctttatttcaatatatgagccaattcttcaacagttcagtagaagacctattggataataaatgcttgatttcggacaataaacacatttcttccgtaaattattcaacaagtgaggagtcttcatttgtttttccattggcacaaattttttcaaacctctcagcaaatgtcagtgtgttcaacaagtttatgtccattcactgtaccgtttcatggcttcaaatgtggactgaaatctgggaaaccatatctcaattatttaagtttgacatgaatgttttcacatctcttcatcatggtttcactcagcttttggatgaattggaagatgatgtgaaagtctctaaaagctgccagggtatacttcccacccataatgttgctagactcatattaaatttgtttaaaaatgtaactcaagccaatgacttccataattgggaggacttcctggatctcagggattttttggtagctttaggtaatgcattagtttcagtaaaaaaacttaacttggagcaagtggagaaatcccttttcaccatggaagctgccctgcatcagttgaagacatttccattcaacgaaagtacaagcagagagtttttaaattctctgcttgaagttttcattgagtttagcagtacctcagaatatatagtcagaaatctagattcaataaatgactttctttcaaataatctcacaaattatggagaaaaatttgaaaatatcatcactgagctaagagaagcaatagtatttcttagaaatgtatcacatgatcgagatttgttttcctgtgctgatattttccaaaatgttactgagtgtattttagaagatggctttttatatgtaaatacctcacagaggatgttacgtattctagacacgttaaattccacattttcctctgagaacacaattagcagtctgaaaggatgcattgtatggttagatgtcataaaccatttgtatttgttgtctaactccagtttttcacaaggtcatcttcaaaatattttggggaatttcagagatatagaaaacaaaatgaactctatattaaaaattgtaacttgggtgttaaatataaaaaaacctctttgttcatcaaatggctcacatataaattgtgtcaatatttacttgaaagatgtaactgactttctaaatattgtacttactacagtctttgaaaaagagaagaaacctaaatttgagattttattagctcttttaaatgattccacaaagcaagtaaggatgagtatcaacaacttaacaacagactttgattttgcatctcagtccaattggagatattttactgaattaattctaagaccaatagaaatgtcagatgaaattcctaatcagtttcaaaatatttggcttcatttaataacactggggaaggaatttcagaagcttgtaaaaggtatttactttaacatcctggaaaataattcctcttctaaaactgaaaacttgttaaacatatttgccaccagtccaaaagaaaaggatgtaaacagtgtaggcaattccatttatcacttagctagttaccttgccttcagcttatctcatgacctccaaaattcaccaaaaataataatttcacctgaaataatgaaagctacaggtcttggtattcaactgataagggatgtgttcaactccttaatgcctgtagttcatcacactagtccacaaaatgcaggttatatgcaagctttgaagaaggtaacttctgtcatgcgtacccttaagaaggcagacatagaccttttagtggatcagcttgaacaagttagtgtaaacctaatggatttctttaagaatatcagtagtgtgggaactggcaatttagtggtcaatttgcttgttggcttgatggaaaaatttgcagacagctcacattcttggaatgttaatcatctgctgcagctctcacgcctgtttcctaaagatgttgtggatgctgtgatagatgtgtactatgtgcttcctcatgctgtaaggctcctgcagggagtacctggtaaaaacatcactgaaggcctcaaggatgtctacagcttcacactccttcatggcataaccatttcaaatatcaccaaggaagacttcgcaattgtgataaaaattcttttggatacaattgaattagtatcagataagccagatattatttcagaggctttagcttgttttcctgtggtttggtgctggaatcacacaaattctggatttcggcagaattcaaagatagacccctgcaatgtccatgggctcatgtcttcttccttttatggcaaagtggccagtatacttgatcatttccacctgtctccccaaggtgaagattcaccatgttcaaatgaaagctcccgaatggaaataactaggaaagtggtctgcataattcatgaattagtggactggaattctattcttctggagctctctgaagtcttccatgttaacatttctcttgtgaaaactgtgcagaaattttggcataagatattaccgtttgtcccaccttcaataaatcaaactagggatagcatctctgaactctgtcctagtggttccataaagcaagttgctttgcaaatcatagaaaaacttaaaaatgtcaactttacaaaagttacatcaggtgaaaatattcttgacaaactaagtagtttaaacaagatccttaacattaatgaagacacagagacatctgttcaaaatattatttcctcaaatttggaaaggacagtacaattgatttctgaagactggagcctagaaaaaagtacgcataatctactctctttattcatgatgctccagaatgcaaatgtcacaggtagcagtttagaagcattatcaagttttattgaaaaaagtgaaacaccttacaactttgaagaactatggcccaagtttcaacaaatcatgaaagacctaacccaagattttagaatcagacacctgctttctgaaatgaacaaaggaatcaaaagtataaattcaatggctcttcaaaagataactttgcagtttgcccatttcctggaaatcctggattcaccgtcattgaagacattagaaattattgaagattttctattggtcacaaaaaactggcttcaggaatatgcaaatgaggattactccagaatgatagaaacattattcattcctgtgaccaatgagagttcaactgaagatatagctttgttagccaaagctattgctactttttggggctctttaaaaaatatatctagagcaggcaattttgatgttgcctttcttacccatctgctaaatcaagaacagctgactaatttctcagttgttcagctgctttttgaaaacatcctaattaatttgatcaataacttagctgggaattctcaggaagcagcttggaacttaaatgatactgaccttcaaataatgaatttcattaaccttatcttgaaccatatgcagtcagaaactagtaggaaaacagttctctctctgagaagcatagtagatttcacagaacagtttttgaaaacattcttctccctttttctaaaggaagattctgagaacaaaatatctcttctgctgaaatatttccacaaagatgttattgcagagatgagttttgtcccaaaagataaaattctagaaattctgaaactggatcaatttcttaccctgatgatacaagacagattgatgaacattttttcaagtttaaaggagactatatatcacctaatgaaaagttcatttatattagacaatggagaattttattttgatactcatcaaggactgaagttcatgcaagatttatttaatgcccttctcagggaaacttcaatgaaaaataagactgaaaataatatagactttttcacagtggtgagtcagttgtttttccatgtgaataagtctgaggacctcttcaaactcaatcaagatcttgggtcagctcttcaccttgtaagagaatgttcaacagagatggcaagacttctggatacaattttacactctcctaataaggacttctatgctttgtatcctaccctccaagaagttatacttgctaatctaacggatttgcttttctttataaataattcattccctctaagaaacagagcaacattagaaattactaagagattagttggtgctatttcaagagcaagtgaagaaagtcacgtcctgaaacccctcttagaaatgtctgggactctggtcatgctgttgaatgacagtgctgacctgagagatcttgccacatcaatggactccattgtgaaacttcttaagctggtcaagaaagtttcggggaagatgtccacagtttttaaaactcattttatctccaataccaaggacagtgtgaaattctttgacactctgtattccatcatgcaacaaagtgttcaaaatcttgtgaaagaaatagctactttaaaaaaaatagatcatttcacatttgaaaagataaatgatttgttggtgccatttcttgacttggcctttgaaatgattggggtagaaccttatatatcatcaaactctgatattttcagtatgtcacctagcatactctcatatatgaaccaatctaaggacttttctgatattttggaagaaattgctgaatttttaacatctgtgaaaatgaacttggaagatatgaggagtcttgcggtagcatttaacaatgagactcaaacattttctatggattctgtcaacttacgggaagaaattctgggttgcttagttcctataaataacatcaccaaccaaatggacttcttataccctaatccaatttccactcatagtggccctcaagatataaaatgggaaataattcatgaagtgatcccttttttggataaaatattatcacaaaacagcacagaaataggatctttcttgaaaatggtgatctgtctcaccttagaagctctttggaaaaacttaaagaaagataattggaatgtttctaatgtgttgatgacatttactcagcatccaaataaccttttgaaaaccatagaaacagttttagaggcctccagtggaattaaaagtgactatgaaggtgatttgaataaaagtttatattttgacacacctttgagtcagaatataactcatcatcaacttgaaaaagcaatccataatgttttaagtagaatagctctctggaggaaaggacttctgtttaacaactctgaatggataacttccacaagaactttgtttcagccactttttgagattttcattaaagcaaccaccggaaagaatgtcacatcagaaaaagaagagagaaccaagaaagagatgattgactttccttatagtttcaaaccatttttctgtttggagaaatacctgggaggattatttgtattgactaaatactggcaacaaatcccactaacagatcaaagtgttgttgagatttgtgaagttttccagcagactgtgaagccctcagaagccatggagatgctgcagaaagtgaagatgatggtcgtacgtgtgctcaccatcgttgcagaaaacccttcctggaccaaggacattttgtgtgctactctgagttgcaagcaaaatgggataaggcatctcattttatctgctatacaaggggtcactttggcgcaggaccacttccaggaaattgaaaagatatggtcctcgccgaatcagctaaattgtgaaagtcttagcaagaatctttctagcaccttggagagcttcaagagcagcttggaaaatgccactggccaggactgcacaagccagccgaggctggagacggtgcagcagcacttgtacatgttggccaaaagcctcgaggaaacttggtcatcagggaatcccatcatgacttttctcagcaatttcacagtaactgaggatgtaaaaataaaagatttgatgaagaatatcaccaagttgactgaggagcttcgctcttccatccaaatctcgaatgagactatccatagcattctagaagcaaatatttcccactccaaggttctcttcagtgccctcaccgtagctctgtctggaaagtgtgatcaggaaatccttcatctcctgctgacatttcccaaaggggaaaaatcttggatcgcagcggaggaactctgtagcctgccagggtcaaaagtgtattctctgattgtgttgctgagtcgaaacttggatgtgcgagctttcatttacaagactctgatgccttctgaagcaaatggcttgctcaactccttgctggatatagtttccagcctcagcgccttgcttgccaaagcccagcacgtctttgagtatcttcctgagtttcttcacacatttaaaatcactgccttgctagaaaccctggactttcaacaggtttcacaaaatgtccaggccagaagttcagcttttggttctttccagtttgtgatgaagatggtttgcaaggaccaagcatcattccttagcgattctaatatgtttattaatttgcccagagttaaggaactcttggaagatgacaaagaaaaattcaacattcctgaagattcaacaccgttttgcttgaagctttatcaggaaattctacaattgccaaatggtgctttggtgtggaccttcctaaaacccatattgcatggaaaaatactatacacaccaaacactccagaaattaacaaggtcattcaaaaggctaattacaccttttatattgtggacaaactaaaaactttatcagaaacactgctggaaatgtccagccttttccagagaagtggaagtggccagatgttcaaccagctgcaggaggccctgagaaacaaatttgtaagaaactttgtagaaaaccagttgcacattgatgtagacaaacttactgaaaaactccagacatacggagggctgctggatgagatgtttaaccatgcaggcgctggacgcttccgtttcttgggcagcatcttggtcaatctctcttcctgcgtggcactgaaccgtttccaggctctgcagtctgtcgacatcctggagactaaagcacatgaactcttgcagcagaacagcttcttggccagtatcattttcagcaattccttattcgacaagaacttcagatcagagtctgtcaaactgccaccccatgtctcatacacaatccggaccaatgtgttatacagcgtgcgaacagatgtggtaaaaaacccttcttggaagttccaccctcagaatctaccagctgatgggttcaaatataactacgtctttgccccactgcaagacatgatcgaaagagccatcattttggtgcagactgggcaggaagccctggaaccagcagcacagactcaggcggccccttacccctgccataccagcgacctattcctgaacaacgttggtttcttttttccactgataatgatgctgacgtggatggtgtctgtggccagcatggtcagaaagttggtgtatgagcaggagatacagatagaagagtatatgcggatgatgggagtgcatccagtgatccatttcctggcctggttcctggagaacatggctgtgttgaccataagcagtgctactctggccatcgttctgaaaacaagtggcatctttgcacacagcaatacctttattgttttcctctttctcttggattttgggatgtcagtcgtcatgctgagctacctcttgagtgcatttttcagccaagctaatacagcggccctttgtaccagcctggtgtacatgatcagctttctgccctacatagttctattggttctacataaccaattaagttttgttaatcagacatttctgtgccttctttcgacaaccgcctttggacaaggggtattttttattacattcctggaaggacaagagacagggattcaatggaataatatgtaccaggctctggaacaagggggcatgacatttggctgggtttgctggatgattctttttgattcaagcctttattttttgtgtggatggtacttgagcaacttgattcctggaacatttggtttacggaaaccatggtatttcccctttactgcctcatattggaagagtgtgggtttcttggtggagaaaaggcaatactttctaagttctagtctgttcttcttcaatgagaactttgacaataaagggtcatcactgcaaaacagggaaggagagcttgaaggaagtgccccgggagtcaccctggtgtctgtgaccaaggaatatgagggccacaaggctgtggtccaagacctcagcctgaccttctacagagaccaaatcaccgccctgctggggacaaacggtgccgggaaaaccactatcatatccatgttgacggggctccaccctcccacttctggaaccatcatcatcaatggcaagaacctacagacagacctgtcgagggtcagaatggagcttggtgtgtgtccgcagcaggacatcctgttggacaacctcaccgtccgggaacatttgctgctctttgcttccataaaggcgcctcagtggaccaagaaggagctgcatcagcaagtcaatcaaactcttcaggatgtggacttaactcagcatcagcacaaacagacccgagctctgtctggaggcctgaagaggaagctctcccttggcattgctttcatgggcatgtcgaggaccgtggttctggatgagcccaccagtggggtggacccttgctcccggcatagcctgtgggacattctgctcaagtaccgagaaggtcgtacgatcatcttcacaacccaccacctggatgaagctgaagcgctgagtgaccgcgtggccgtcctccagcatgggaggctcaggtgctgcggtcctcccttctgcctgaaggaggcatatggccaggggctccgcctgacactcacgaggcagccttctgttctggaggcccatgatctgaaagacatggcttgtgttacatccctgataaagatctatattccacaagcatttctcaaagacagcagtggaagtgagctgacctacaccattccaaaggacacagacaaggcctgcttgaaagggctcttccaggccctggatgagaacctgcatcagctgcacctgacgggctatgggatctcagacaccaccttagaagaggtgtttttgatgcttttgcaagattccaacaagaaatctcacattgccctggggactgagtcagagctgcagaaccacaggcctacaggacatctgtctggctactgtggctccctagcacggcccgcaactgtgcagggcgtccagctgctccgcgcacaagtggccgcgatcctggcccggaggctccgccgcacgctgcgcgccgggaagagcaccctcgccgacctgctgctgccagtcctcttcgtggccttggccatgggcttgttcatggtgagacccctggccaccgagtaccctcccctcagactcacacctggacattaccagcgggccgagacctactttttcagcagtgggggcgacaacttggacctcacccgtgtgcttctgcggaagtttagagatcaagatttgccctgtgcagatttaaacccacgccagaagaattcttcatgctggcgcacagatcccttttctcacccagaattccaggattcatgtggctgcctgaagtgtccaaatagaagtgctagtgctccctacctgaccaaccacctgggccacacactgttgaatctctcaggcttcaatatggaggagtacttgctggcaccatctgaaaaaccaaggcttggaggttggtcttttggattaaaaatccccagtgaagctggaggtgcaaatggaaacatatcaaaacccccaactctggcaaaggtgtggtataatcagaagggttttcattccctaccttcctacttaaatcatctaaacaaccttattttgtggcagcacctaccccctactgtggactggagacaatacggaataacactctacagccacccatatggaggggccttgctgaacgaggacaagatcctggagagcatccgtcagtgtggagtggccctctgcatcgtgctgggattctccatcctgtctgcatccatcggcagctctgtggtgagggacagggtgattggagccaaaaggttgcagcacataagtggccttggctacaggatgtactggttcacaaacttcctatatgacatgctcttttacttggtttccgtctgcctgtgtgttgccgttattgtcgccttccagttaacagcttttactttccgcaagaacttggcagccacggccctcctgctgtcacttttcggatatgcaactcttccatggatgtacctgatgtccagaatcttttccagttcggacgtggctttcatttcctatgtctcactaaacttcatctttggcctttgtaccatgctcataaccattatgccccggttgctagccatcatctccaaagctaagaatttacagaatatctatgatgtcctcaagtgggtctttactatttttcctcaattctgtcttggtcaaggactggtagaactctgctataatcagatcaaatatgacctgacccacaacttcggcattgattcctatgtgagtccctttgagatgaactttctgggctggatcttcgtgcaactggcctcgcagggcacagtacttctcctcttgagggttctgctacactgggaccttctgcgatggccaaggggtcattctactctccaaggcacagtcaaatcttctaaggatacagatgttgaaaaagaggaaaagagagtgtttgaaggaaggaccaatggagacattcttgtgttatacaaccttagtaaacattatcgacgctttttccagaatattattgctgtgcaagatattagtttgggcataccaaaaggagagtgctttggacttctaggggtgaatggagctgggaagagcacgactttcaaaatgctgaatggtgaagtttctctaacttcaggacatgctatcatcaggactcccatgggagacgccgtggacctgtcttctgctggcacggcaggcgtgctcattggctactgtccccagcaggatgccctggacgagcttctgactggttgggaacatctctattattactgtagcttacgcgggattccaaggcagtgcatccctgaggttgctggagacctcatcaggcgcttacacctcgaagcccacgcggacaaacctgtggccacctacagtgggggaaccaagcggaaactctctacagccctggccctggtggggaaacctgacattcttttattggatgagcccagctctgggatggatccctgctctaagcggtacctgtggcaaacaataatgaaggaggttcgggaaggctgtgctgcggtgctgacctcccacagcatggaggagtgtgaggctctttgcacaagactggccataatggttaacggcagcttcaaatgtcttggttctcctcagcacatcaaaaataggtttggtgatggttatacagtcaaagtttggctctgtaaggaagcaaatcaacattgcactgtttctgaccacttgaagctttattttccaggaattcagttcaagggacagcacctgaatttattagaatatcatgtgccaaaaagatggggatgcctagctgacttgttcaaagttatagagaacaataaaaccttcttgaatattaagcattattccattaaccaaaccactttggagcaggtatttattaattttgcttctgagcagcagcaaactctacaatctactcttgatccatccactgacagtcaccacacacatcacttgcccatctgagcactaaagaagtttccataaggaataaaaccttgtcttccattacaattaacagtcaaggataaaacaagcacgcgcacaatcaaggagctggaacacactctccaggccgtcaaattattctcttgttcattttctattttgaatctccttgttagttaataaccaccaaatggaaaggtcattctttctgcagacttttggggagctcctccaaaacatttgttctctttaccatgccagatggacaccagcttctttgtgacaaaggcatgaatgatttgacagtgtccaaactgagacattctggagctggaaagcctgtcacactagagtgtgtgtgacatgtccactctaaacatgtcacttttctgttaagaaaactgagccccctccccacaggttaaaaaactttagtaacttgtttgtatagaaaatagtaacaaggactattttctattgttgtcatctatttactagatacatgtttttaatgattttaatgtaagcttttattaatactgatgacattatatggtatgatatgaaaaaatcaccaattttttacatataaaagatacctttttaaaaaaataggttttaagagctcttttagtatacactttagcaaaattaattaaattgaactagttactctgtatcaattacagtagttctaccagaatctcccaggttataatttatgagggtagagaaataaaatgtagatgcattttctttttcttcatttggatgaataattactgttttttgttattctaagtcagtgtttttcaaagcgtagtggtccccatattagctgcattgccatcttctgggagcttgcaagaaatgtacattctcaggatccactccagacctattgaatctcaaattctggggcttaaacaagcacattccaagttaagaaccaatgacctaagggaatgtctggttacctcctagttatacaagcaaaatctgcatagtatgtagtcttttttatttatttattttttttttttgaggcggagtctcgctctgtcacccaggctggagtgcagtggcgcgatgtcggctcactgcaagctccgcctcctgggttcacgccattctcctgcctcagcctccccagcagctgggactacaggcacacatcgccacacccggctaatttttagtatttttagtagagacggggtttcaccgtgttagccaggatggtctctatctcctgaccttgtgatccgcccccctccacctcccaaagtgctgggattacaggcgtgagccaccgtgtccggccgtagtttattttaaaatatatttttaaaagctttgtaaaaattatgtcattctcagaattgttgtcttcaaagcattgtcagatgtagagtgctcagatgtggctcttaaagactatatacatctgaatttttcatcctatagttagtaagatgcataaaatcaatccactactgaaatagtttccagtcagacatttctgagttcagacatttctcaacattcttttaacaacatttttctgaatcctcaatagaaaatcacattaatcttattttaaaatttggcctttttcaacactaacgttgagtaccggtagcttgtgatcaaaggcatatacttccttatgagatttctttactaaagcaagatttcattaaatctctatttcctaaatatcattctatacaaaagatattttttaaacggtaaggattaagacaatcactgatagctttgttgtgagcaattttgattcccatgtatcacatgaattacacttccttaaataaattacagtttatggctgtatgatttattctctaattctaacatagtctagttgtcaaaaggaaatatgtaatctttttatgattgttgaatcaataaataccaatttgtgaaacatgaatgtgtttaaactgcagtgaataaatgagatgtgctttaatttaaccc

SEQ ID NO: 110036 - DNA, 7870 bp, Homo sapiens
  Payload ID: 1601
  Gene Symbol: ABCA13
  Gene Name: ATP-binding cassette, sub-family A (ABC1), member 13
  ENST ID: ENST00000544596
  CDS Start-End: 1-7099
ataccctaatccaatttccactcatagtggccctcaagatataaaatgggaaataattcatgaagtgatcccttttttggataaaatattatcacaaaacagcacagaaataggatctttcttgaaaatggtgatctgtctcaccttagaagctctttggaaaaacttaaagaaagataattggaatgtttctaatgtgttgatgacatttactcagcatccaaataaccttttgaaaaccatagaaacagttttagaggcctccagtggaattaaaagtgactatgaaggtgatttgaataaaagtttatattttgacacacctttgagtcagaatataactcatcatcaacttgaaaaagcaatccataatgttttaagtagaatagctctctggaggaaaggacttctgtttaacaactctgaatggataacttccacaagaactttgtttcagccactttttgagattttcattaaagcaaccaccggaaagaatgtcacatcagaaaaagaagagagaaccaagaaagagatgattgactttccttatagtttcaaaccatttttctgtttggagaaatacctgggaggattatttgtattgactaaatactggcaacaaatcccactaacagatcaaagtgttgttgagatttgtgaagttttccagcagactgtgaagccctcagaagccatggagatgctgcagaaagtgaagatgatggtcgtacgtgtgctcaccatcgttgcagaaaacccttcctggaccaaggacattttgtgtgctactctgagttgcaagcaaaatgggataaggcatctcattttatctgctatacaaggggtcactttggcgcaggaccacttccaggaaattgaaaagatatggtcctcgccgaatcagctaaattgtgaaagtcttagcaagaatctttctagcaccttggagagcttcaagagcagcttggaaaatgccactggccaggactgcacaagccagccgaggctggagacggtgcagcagcacttgtacatgttggccaaaagcctcgaggaaacttggtcatcagggaatcccatcatgacttttctcagcaatttcacagtaactgaggatgtaaaaataaaagatttgatgaagaatatcaccaagttgactgaggagcttcgctcttccatccaaatctcgaatgagactatccatagcattctagaagcaaatatttcccactccaaggttctcttcagtgccctcaccgtagctctgtctggaaagtgtgatcaggaaatccttcatctcctgctgacatttcccaaaggggaaaaatcttggatcgcagcggaggaactctgtagcctgccagggtcaaaagtgtattctctgattgtgttgctgagtcgaaacttggatgtgcgagctttcatttacaagactctgatgccttctgaagcaaatggcttgctcaactccttgctggatatagtttccagcctcagcgccttgcttgccaaagcccagcacgtctttgagtatcttcctgagtttcttcacacatttaaaatcactgccttgctagaaaccctggactttcaacaggtttcacaaaatgtccaggccagaagttcagcttttggttctttccagtttgtgatgaagatggtttgcaaggaccaagcatcattccttagcgattctaatatgtttattaatttgcccagagttaaggaactcttggaagatgacaaagaaaaattcaacattcctgaagattcaacaccgttttgcttgaagctttatcaggaaattctacaattgccaaatggtgctttggtgtggaccttcctaaaacccatattgcatggaaaaatactatacacaccaaacactccagaaattaacaaggtcattcaaaaggctaattacaccttttatattgtggacaaactaaaaactttatcagaaacactgctggaaatgtccagccttttccagagaagtggaagtggccagatgttcaaccagctgcaggaggccctgagaaacaaatttgtaagaaactttgtagaaaaccagttgcacattgatgtagacaaacttactgaaaaactccagacatacggagggctgctggatgagatgtttaaccatgcaggcgctggacgcttccgtttcttgggcagcatcttggtcaatctctcttcctgcgtggcactgaaccgtttccaggctctgcagtctgtcgacatcctggagactaaagcacatgaactcttgcagcagaacagcttcttggccagtatcattttcagcaattccttattcgacaagaacttcagatcagagtctgtcaaactgccaccccatgtctcatacacaatccggaccaatgtgttatacagcgtgcgaacagatgtggtaaaaaacccttcttggaagttccaccctcagaatctaccagctgatgggttcaaatataactacgtctttgccccactgcaagacatgatcgaaagagccatcattttggtgcagactgggcaggaagccctggaaccagcagcacagactcaggcggccccttacccctgccataccagcgacctattcctgaacaacgttggtttcttttttccactgataatgatgctgacgtggatggtgtctgtggccagcatggtcagaaagttggtgtatgagcaggagatacagatagaagagtatatgcggatgatgggagtgcatccagtgatccatttcctggcctggttcctggagaacatggctgtgttgaccataagcagtgctactctggccatcgttctgaaaacaagtggcatctttgcacacagcaatacctttattgttttcctctttctcttggattttgggatgtcagtcgtcatgctgagctacctcttgagtgcatttttcagccaagctaatacagcggccctttgtaccagcctggtgtacatgatcagctttctgccctacatagttctattggttctacataaccaattaagttttgttaatcagacatttctgtgccttctttcgacaaccgcctttggacaaggggtattttttattacattcctggaaggacaagagacagggattcaatggaataatatgtaccaggctctggaacaagggggcatgacatttggctgggtttgctggatgattctttttgattcaagcctttattttttgtgtggatggtacttgagcaacttgattcctggaacatttggtttacggaaaccatggtatttcccctttactgcctcatattggaagagtgtgggtttcttggtggagaaaaggcaatactttctaagttctagtctgttcttcttcaatgagaactttgacaataaagggtcatcactgcaaaacagggaaggagagcttgaaggaagtgccccgggagtcaccctggtgtctgtgaccaaggaatatgagggccacaaggctgtggtccaagacctcagcctgaccttctacagagaccaaatcaccgccctgctggggacaaacggtgccgggaaaaccactatcatatccatgttgacggggctccaccctcccacttctggaaccatcatcatcaatggcaagaacctacagacagacctgtcgagggtcagaatggagcttggtgtgtgtccgcagcaggacatcctgttggacaacctcaccgtccgggaacatttgctgctctttgcttccataaaggcgcctcagtggaccaagaaggagctgcatcagcaagtcaatcaaactcttcaggatgtggacttaactcagcatcagcacaaacagacccgagctctgtctggaggcctgaagaggaagctctcccttggcattgctttcatgggcatgtcgaggaccgtggttctggatgagcccaccagtggggtggacccttgctcccggcatagcctgtgggacattctgctcaagtaccgagaaggtcgtacgatcatcttcacaacccaccacctggatgaagctgaagcgctgagtgaccgcgtggccgtcctccagcatgggaggctcaggtgctgcggtcctcccttctgcctgaaggaggcatatggccaggggctccgcctgacactcacgaggcagccttctgttctggaggcccatgatctgaaagacatggcttgtgttacatccctgataaagatctatattccacaagcatttctcaaagacagcagtggaagtgagctgacctacaccattccaaaggacacagacaaggcctgcttgaaagggctcttccaggccctggatgagaacctgcatcagctgcacctgacgggctatgggatctcagacaccaccttagaagaggtgtttttgatgcttttgcaagattccaacaagaaatctcacattgccctggggactgagtcagagctgcagaaccacaggcctacaggacatctgtctggctactgtggctccctagcacggcccgcaactgtgcagggcgtccagctgctccgcgcacaagtggccgcgatcctggcccggaggctccgccgcacgctgcgcgccgggaagagcaccctcgccgacctgctgctgccagtcctcttcgtggccttggccatgggcttgttcatggtgagacccctggccaccgagtaccctcccctcagactcacacctggacattaccagcgggccgagacctactttttcagcagcagtgggggcgacaacttggacctcacccgtgtgcttctgcggaagtttagagatcaagatttgccctgtgcagatttaaacccacgccagaagaattcttcatgctggcgcacagatcccttttctcacccagaattccaggattcatgtggctgcctgaagtgtccaaatagaagtgctagtgctccctacctgaccaaccacctgggccacacactgttgaatctctcaggcttcaatatggaggagtacttgctggcaccatctgaaaaaccaaggcttggaggttggtcttttggattaaaaatccccagtgaagctggaggtgcaaatggaaacatatcaaaacccccaactctggcaaaggtgtggtataatcagaagggttttcattccctaccttcctacttaaatcatctaaacaaccttattttgtggcagcacctaccccctactgtggactggagacaatacggaataacactctacagccacccatatggaggggccttgctgaacgaggacaagatcctggagagcatccgtcagtgtggagtggccctctgcatcgtgctgggattctccatcctgtctgcatccatcggcagctctgtggtgagggacagggtgattggagccaaaaggttgcagcacataagtggccttggctacaggatgtactggttcacaaacttcctatatgacatgctcttttacttggtttccgtctgcctgtgtgttgccgttattgtcgccttccagttaacagcttttactttccgcaagaacttggcagccacggccctcctgctgtcacttttcggatatgcaactcttccatggatgtacctgatgtccagaatcttttccagttcggacgtggctttcatttcctatgtctcactaaacttcatctttggcctttgtaccatgctcataaccattatgccccggttgctagccatcatctccaaagctaagaatttacagaatatctatgatgtcctcaagtgggtctttactatttttcctcaattctgtcttggtcaaggactggtagaactctgctataatcagatcaaatatgacctgacccacaacttcggcattgattcctatgtgagtccctttgagatgaactttctgggctggatcttcgtgcaactggcctcgcagggcacagtacttctcctcttgagggttctgctacactgggaccttctgcgatggccaaggggtcattctactctccaaggcacagtcaaatcttctaaggatacagatgttgaaaaagaggaaaagagagtgtttgaaggaaggaccaatggagacattcttgtgttatacaaccttagtaaacattatcgacgctttttccagaatattattgctgtgcaagatattagtttgggcataccaaaaggagagtgctttggacttctaggggtgaatggagctgggaagagcacgactttcaaaatgctgaatggtgaagtttctctaacttcaggacatgctatcatcaggactcccatgggagacgccgtggacctgtcttctgctggcacggcaggcgtgctcattggctactgtccccagcaggatgccctggacgagcttctgactggttgggaacatctctattattactgtagcttacgcgggattccaaggcagtgcatccctgaggttgctggagacctcatcaggcgcttacacctcgaagcccacgcggacaaacctgtggccacctacagtgggggaaccaagcggaaactctctacagccctggccctggtggggaaacctgacattcttttattggatgagcccagctctgggatggatccctgctctaagcggtacctgtggcaaacaataatgaaggaggttcgggaaggctgtgctgcggtgctgacctcccacagcatggaggagtgtgaggctctttgcacaagactggccataatggttaacggcagcttcaaatgtcttggttctcctcagcacatcaaaaataggtttggtgatggttatacagtcaaagtttggctctgtaaggaagcaaatcaacattgcactgtttctgaccacttgaagctttattttccaggaattcagttcaagggacagcacctgaatttattagaatatcatgtgccaaaaagatggggatgcctagctgacttgttcaaagttatagagaacaataaaaccttcttgaatattaagcattattccattaaccaaaccactttggagcaggtatttattaattttgcttctgagcagcagcaaactctacaatctactcttgatccatccactgacagtcaccacacacatcacttgcccatctgagcactaaagaagtttccataaggaataaaaccttgtcttccattacaattaacagtcaaggataaaacaagcacgcgcacaatcaaggagctggaacacactctccaggccgtcaaattattctcttgttcattttctattttgaatctccttgttagttaataaccaccaaatggaaaggtcattctttctgcagacttttggggagctcctccaaaacatttgttctctttaccatgccagatggacaccagcttctttgtgacaaaggcatgaatgatttgacagtgtccaaactgagacattctggagctggaaagcctgtcacactagagtgtgtgtgacatgtccactctaaacatgtcacttttctgttaagaaaactgagccccctccccacaggttaaaaaactttagtaacttgtttgtatagaaaatagtaacaaggactattttctattgttgtcatctatttactagatacatgtttttaatgattttaatgtaagcttttattaatactgatgacattatatggtatgatatgaaaaaatcaccaattttttacatataaaagatacctttttaaaaaaataggttttaagagctcttttagtatacactttagcaaaattaattaaattgaactagttactctgtatcaattacagtagttctaccagaatctcccaggttataatttatgagggtagagaaataaaatgtagatgcattttctttttcttcatttggatgaataattactgtttt

SEQ ID NO: 110037 - DNA, 8154 bp, Homo sapiens
  Payload ID: 1602
  Gene Symbol: ABCA2
  Gene Name: ATP-binding cassette, sub-family A (ABC1), member 2
  ENST ID: ENST00000265662
  CDS Start-End: 149-7459
ggggcggagccagcgcggatcgggtcccggacgcccgagcgccccgcccccgcgcgggcgatgcccagcggcgcggcgggctgcggggcccggcggggcgcgcagaggagcgggccgcggcgctgaggcggcggagcgtggccccgccatgggcttcctgcaccagctgcagctgctgctctggaagaacgtgacgctcaaacgccggagcccgtgggtcctggccttcgagatcttcatccccctggtgctgttctttatcctgctggggctgcgacagaagaagcccaccatctccgtgaaggaagtcgccttctacacagcggcgcccctgacgtctgccggcatcctgcctgtcatgcaatcgctgtgcccggacggccagcgagacgagttcggcttcctgcagtacgccaactccacggtcacgcagctgcttgagcgcctggaccgcgtggtggaggaaggcaacctgtttgacccagcgcggcccagcctgggctcagagctcgaggccctacgccagcatctggaggccctcagtgcgggcccgggcacctcggggagccacctggacagatccacagtgtcttccttctctctggactcggtggccagaaacccgcaggagctctggcgtttcctgacgcaaaacttgtcgctgcccaatagcacggcccaagcactcttggccgcccgtgtggacccgcccgaggtctaccacctgctctttggtccctcatctgccctggattcacagtctggcctccacaagggtcaggagccctggagccgcctagggggcaatcccctgttccggatggaggagctgctgctggctcctgccctcctggagcagctcacctgcacgccgggctcgggggagctgggccggatcctcactgtgcctgagagtcagaagggagccctgcagggctaccgggatgctgtctgcagtgggcaggctgctgcgcgtgccaggcgcttctctgggctgtctgctgagctccggaaccagctggacgtggccaaggtctcccagcagctgggcctggatgcccccaacggctcggactcctcgccacaggcgccacccccacggaggctgcaggcgcttctgggggacctgctggatgcccagaaggttctgcaggatgtggatgtcctgtcggccctggccctgctactgccccagggtgcctgcactggccggacccccggacccccagccagtggtgcgggtggggcggccaatggcactggggcaggggcagtcatgggccccaacgccaccgctgaggagggcgcaccctctgctgcagcactggccaccccggacacgctgcagggccagtgctcagccttcgtacagctctgggccggcctgcagcccatcttgtgtggcaacaaccgcaccattgaacccgaggcgctgcggcggggcaacatgagctccctgggcttcacgagcaaggagcagcggaacctgggcctcctcgtgcacctcatgaccagcaaccccaaaatcctgtacgcgcctgcgggctctgaggtcgaccgcgtcatcctcaaggccaacgagacttttgcttttgtgggcaacgtgactcactatgcccaggtctggctcaacatctcggcggagatccgcagcttcctggagcagggcaggctgcagcaacacctgcgctggctgcagcagtatgtagcagagctgcggctgcaccccgaggcactgaacctgtcactggatgagctgccgccggccctgagacaggacaacttctcgctgcccagtggcatggccctcctgcagcagctggataccattgacaacgcggcctgcggctggatccagttcatgtccaaggtgagcgtggacatcttcaagggcttccccgacgaggagagcattgtcaactacaccctcaaccaggcctaccaggacaacgtcactgtttttgccagtgtgatcttccagacccggaaggacggctcgctcccgcctcacgtgcactacaagatccgccagaactccagcttcaccgagaaaaccaacgagatccgccgcgcctactggcggcctgggcccaatactggcggccgcttctacttcctctacggcttcgtctggatccaggacatgatggagcgcgccatcatcgacacttttgtggggcacgatgtggtggagccaggcagctacgtgcagatgttcccctacccctgctacacacgcgatgacttcctgtttgtcattgagcacatgatgccgctgtgcatggtgatctcctgggtctactccgtggccatgaccatccagcacatcgtggcggagaaggagcaccggctcaaggaggtgatgaagaccatgggcctgaacaacgcggtgcactgggtggcctggttcatcaccggctttgtgcagctgtccatctccgtgacagcactcaccgccatcctgaagtacggccaggtgcttatgcacagccacgtggtcatcatctggctcttcctggcagtctacgcggtggccaccatcatgttctgcttcctggtgtctgtgctgtactccaaggccaagctggcctcggcctgcggtggcatcatctacttcctgagctacgtgccctacatgtacgtggcgatccgagaggaggtggcgcatgataagatcacggccttcgagaagtgcatcgcgtccctcatgtccacgacggcctttggtctgggctctaagtacttcgcgctgtatgaggtggccggcgtgggcatccagtggcacaccttcagccagtccccggtggagggggacgacttcaacttgctcctggctgtcaccatgctgatggtggacgccgtggtctatggcatcctcacgtggtacattgaggctgtgcacccaggcatgtacgggctgccccggccctggtacttcccactgcagaagtcctactggctgggcagtgggcggacagaagcctgggagtggagctggccgtgggcacgcaccccccgcctcagtgtcatggaggaggaccaggcctgtgccatggagagccggcgctttgaggagacccgtggcatggaggaggagcccacccacctgcctctggttgtctgcgtggacaaactcaccaaggtctacaaggacgacaagaagctggccctgaacaagctgagcctgaacctctacgagaaccaggtggtctccttcttgggccacaacggggcgggcaagaccaccaccatgtccatcctgaccggcctgttccctccaacgtcgggttccgccaccatctacgggcacgacatccgcacggagatggatgagatccgcaagaacctgggcatgtgcccgcagcacaatgtgctctttgaccggctcacggtggaggaacacctctggttctactcacggctcaagagcatggctcaggaggagatccgcagagagatggacaagatgatcgaggacctggagctctccaacaaacggcactcactggtgcagacattgtcgggtggcatgaagcgcaagctgtccgtggccatcgccttcgtgggcggctctcgcgccatcatcctggacgagcccacggcgggcgtggacccctacgcgcgccgcgccatctgggacctcatcctgaagtacaagccaggccgcaccatccttctgtccacccaccacatggatgaggctgacctgcttggggaccgcattgccatcatctcccatgggaagctcaagtgctgcggctccccgctcttcctcaagggcacctatggcgacgggtaccgcctcacgctggtcaagcggcccgccgagccggggggcccccaagagccagggctggcatccagccccccaggtcgggccccgctgagcagctgctccgagctccaggtgtcccagttcatccgcaagcatgtggcctcctgcctgctggtctcagacacaagcacggagctctcctacatcctgcccagcgaggccgccaagaagggggctttcgagcgcctcttccagcacctggagcgcagcctggatgcactgcacctcagcagcttcgggctgatggacacgaccctggaggaagtgttcctcaaggtgtcggaggaggatcagtcgctggagaacagtgaggccgatgtgaaggagtccaggaaggatgtgctccctggggcggagggcccggcgtctggggagggtcacgctggcaatctggcccggtgctcggagctgacccagtcgcaggcatcgctgcagtcggcgtcatctgtgggctctgcccgtggcgacgagggagctggctacaccgacgtctatggcgactaccgccccctctttgataacccacaggacccagacaatgtcagcctgcaagaggtggaggcagaggccctgtcgagggtcggccagggcagccgcaagctggacggcgggtggctgaaggtgcgccagttccacgggctgctggtcaaacgcttccactgcgcccgccgcaactccaaggcactcttctcccagatcttgctgccagccttcttcgtctgcgtggccatgaccgtggccctgtccgtcccggagattggtgatctgcccccgctggtcctgtcaccttcccagtaccacaactacacccagccccgtggcaatttcatcccctacgccaacgaggagcgccgcgagtaccggctgcggctatcgcccgacgccagcccccagcagctcgtgagcacgttccggctgccgtcgggggtgggtgccacctgcgtgctcaagtctcccgccaacggctcgctggggcccacgttgaacctgagcagcggggagtcgcgcctgctggcggctcggttcttcgacagcatgtgtctggagtccttcacacaggggctgccactgtccaatttcgtgccacccccaccctcgcccgccccatctgactcgccagcgtccccggatgaggacctgcaggcctggaacgtctccctgccgcccaccgctgggccagaaatgtggacgtcggcaccctccctgccgcgcctggtacgggagcccgtccgctgcacctgctctgcgcagggcaccggcttctcctgccccagcagtgtgggcgggcacccgccccagatgcgggtggtcacaggcgacatcctgaccgacatcaccggccacaatgtctctgagtacctgctcttcacctccgaccgcttccgactgcaccggtatggggccatcacctttggaaacgtcctgaagtccatcccagcctcatttggcaccagggccccacccatggtgcggaagatcgcggtgcgcagggctgcccaggttttctacaacaacaagggctatcacagcatgcccacctacctcaacagcctcaacaacgccatcctgcgtgccaacctgcccaagagcaagggcaacccggcggcttacggcatcaccgtcaccaaccaccccatgaataagaccagcgccagcctctccctggattacctgctgcagggcacggatgtcgtcatcgccatcttcatcatcgtggccatgtccttcgtgccggccagcttcgttgtcttcctcgtggccgagaagtccaccaaggccaagcacctgcagtttgtcagcggctgcaaccccatcatctactggctggcgaactacgtgtgggacatgctcaactacctggtccccgctacctgctgtgtcatcatcctgtttgtgttcgacctgccggcctacacgtcgcccaccaacttccctgccgtcctctccctcttcctgctctatgggtggtccatcacgcccatcatgtacccggcctccttctggttcgaggtccccagctccgcctacgtgttcctcattgtcatcaatctcttcatcggcatcaccgccaccgtggccaccttcctgctacagctcttcgagcacgacaaggacctgaaggttgtcaacagttacctgaaaagctgcttcctcattttccccaactacaacctgggccacgggctcatggagatggcctacaacgagtacatcaacgagtactacgccaagattggccagtttgacaagatgaagtccccgttcgagtgggacattgtcacccgcggactggtggccatggcggttgagggcgtcgtgggcttcctcctgaccatcatgtgccagtacaacttcctgcggcggccacagcgcatgcctgtgtctaccaagcctgtggaggatgatgtggacgtggccagtgagcggcagcgagtgctccggggagacgccgacaatgacatggtcaagattgagaacctgaccaaggtctacaagtcccggaagattggccgtatcctggccgttgaccgcctgtgcctgggtgtgcgtcctggcgagtgcttcgggctcctgggcgtcaacggtgcgggcaagaccagcaccttcaagatgctgaccggcgacgagagcacgacggggggcgaggccttcgtcaatggacacagcgtgctgaaggagctgctccaggtgcagcagagcctcggctactgcccgcagtgtgacgcgctgttcgacgagctcacggcccgggagcacctgcagctgtacacgcggctgcgtgggatctcctggaaggacgaggcccgggtggtgaagtgggctctggagaagctggagctgaccaagtacgcagacaagccggctggcacctacagcggcggcaacaagcggaagctctccacggccatcgccctcattgggtacccagccttcatcttcctggacgagcccaccacaggcatggaccccaaggcccggcgcttcctctggaacctcatccttgacctcatcaagacagggcgttcagtggtgctgacatcacacagcatggaggagtgcgaggcgctgtgcacgcggctggccatcatggtgaacggtcgcctgcggtgcctgggcagcatccagcacctgaagaaccggtttggagatggctacatgatcacggtgcggaccaagagcagccagagtgtgaaggacgtggtgcggttcttcaaccgcaacttcccggaagccatgctcaaggagcggcaccacacaaaggtgcagtaccagctcaagtcggagcacatctcgctggcccaggtgttcagcaagatggagcaggtgtctggcgtgctgggcatcgaggactactcggtcagccagaccacactggacaatgtgttcgtgaactttgccaagaagcagagtgacaacctggagcagcaggagacggagccgccatccgcactgcagtcccctctcggctgcttgctcagcctgctccggccccggtctgcccccacggagctccgggcacttgtggcagacgagcccgaggacctggacacggaggacgagggcctcatcagcttcgaggaggagcgggcccagctgtccttcaacacggacacgctctgctgaccacccagagctgggccagggaggacacgctccactgaccacccagagctgggccagggactcaacaatggggacagaagtcccccagtgcctgccagggcctggagtggaggttcaggaccaaggggcttctggtcctccagcccctgtactcggccatgccctgtggtcactgcggttgccgcccctaattgtgccaaaggctgacccggcccgggctgcgtacacccttgccctgctttgccttaaagcctcggggtctgcccggcccctcgcccctgcctggcactgctcaccgcccaaggcgacgccggctggaccaggcactgctggcctttctcctgcccggcctcggaaccagcttttctctcttacgatgaaggctgatgccgagagcgggctgtgggcggagctgggtcagtcccgtatttattttgctttgagaagaggctcctctggccctgctctcctgcagggaggtggctgtcctgcgggaagccatcagcttgggccagctggcaggtggcaggaatggagaagctgaccctgctggccaggcaaggggccagaccccccccaacccccagctgccatcgctctcccacccagcttggccccctgcccgcccacctccctgggagccgggcctgtacatagcgcacagatgtttgttttaaataaataaacaaaatgtc

SEQ ID NO: 110038 - DNA, 8063 bp, Homo sapiens
  Payload ID: 1602
  Gene Symbol: ABCA2
  Gene Name: ATP-binding cassette, sub-family A (ABC1), member 2
  Uniprot ID: Q9BZC7
  ENST ID: ENST00000341511
  CDS Start-End: 51-7361
cgcgcagaggagcgggccgcggcgctgaggcggcggagcgtggccccgccatgggcttcctgcaccagctgcagctgctgctctggaagaacgtgacgctcaaacgccggagcccgtgggtcctggccttcgagatcttcatccccctggtgctgttctttatcctgctggggctgcgacagaagaagcccaccatctccgtgaaggaagtctccttctacacagcggcgcccctgacgtctgccggcatcctgcctgtcatgcaatcgctgtgcccggacggccagcgagacgagttcggcttcctgcagtacgccaactccacggtcacgcagctgcttgagcgcctggaccgcgtggtggaggaaggcaacctgtttgacccagcgcggcccagcctgggctcagagctcgaggccctacgccagcatctggaggccctcagtgcgggcccgggcacctcggggagccacctggacagatccacagtgtcttccttctctctggactcggtggccagaaacccgcaggagctctggcgtttcctgacgcaaaacttgtcgctgcccaatagcacggcccaagcactcttggccgcccgtgtggacccgcccgaggtctaccacctgctctttggtccctcatctgccctggattcacagtctggcctccacaagggtcaggagccctggagccgcctagggggcaatcccctgttccggatggaggagctgctgctggctcctgccctcctggagcagctcacctgcacgccgggctcgggggagctgggccggatcctcactgtgcctgagagtcagaagggagccctgcagggctaccgggatgctgtctgcagtgggcaggctgctgcgcgtgccaggcgcttctctgggctgtctgctgagctccggaaccagctggacgtggccaaggtctcccagcagctgggcctggatgcccccaacggctcggactcctcgccacaggcgccacccccacggaggctgcaggcgcttctgggggacctgctggatgcccagaaggttctgcaggatgtggatgtcctgtcggccctggccctgctactgccccagggtgcctgcactggccggacccccggacccccagccagtggtgcgggtggggcggccaatggcactggggcaggggcagtcatgggccccaacgccaccgctgaggagggcgcaccctctgctgcagcactggccaccccggacacgctgcagggccagtgctcagccttcgtacagctctgggccggcctgcagcccatcttgtgtggcaacaaccgcaccattgaacccgaggcgctgcggcggggcaacatgagctccctgggcttcacgagcaaggagcagcggaacctgggcctcctcgtgcacctcatgaccagcaaccccaaaatcctgtacgcgcctgcgggctctgaggtcgaccgcgtcatcctcaaggccaacgagacttttgcttttgtgggcaacgtgactcactatgcccaggtctggctcaacatctcggcggagatccgcagcttcctggagcagggcaggctgcagcaacacctgcgctggctgcagcagtatgtagcagagctgcggctgcaccccgaggcactgaacctgtcactggatgagctgccgccggccctgagacaggacaacttctcgctgcccagtggcatggccctcctgcagcagctggataccattgacaacgcggcctgcggctggatccagttcatgtccaaggtgagcgtggacatcttcaagggcttccccgacgaggagagcattgtcaactacaccctcaaccaggcctaccaggacaacgtcactgtttttgccagtgtgatcttccagacccggaaggacggctcgctcccgcctcacgtgcactacaagatccgccagaactccagcttcaccgagaaaaccaacgagatccgccgcgcctactggcggcctgggcccaatactggcggccgcttctacttcctctacggcttcgtctggatccaggacatgatggagcgcgccatcatcgacacttttgtggggcacgatgtggtggagccaggcagctacgtgcagatgttcccctacccctgctacacacgcgatgacttcctgtttgtcattgagcacatgatgccgctgtgcatggtgatctcctgggtctactccgtggccatgaccatccagcacatcgtggcggagaaggagcaccggctcaaggaggtgatgaagaccatgggcctgaacaacgcggtgcactgggtggcctggttcatcaccggctttgtgcagctgtccatctccgtgacagcactcaccgccatcctgaagtacggccaggtgcttatgcacagccacgtggtcatcatctggctcttcctggcagtctacgcggtggccaccatcatgttctgcttcctggtgtctgtgctgtactccaaggccaagctggcctcggcctgcggtggcatcatctacttcctgagctacgtgccctacatgtacgtggcgatccgagaggaggtggcgcatgataagatcacggccttcgagaagtgcatcgcgtccctcatgtccacgacggcctttggtctgggctctaagtacttcgcgctgtatgaggtggccggcgtgggcatccagtggcacaccttcagccagtccccggtggagggggacgacttcaacttgctcctggctgtcaccatgctgatggtggacgccgtggtctatggcatcctcacgtggtacattgaggctgtgcacccaggcatgtacgggctgccccggccctggtacttcccactgcagaagtcctactggctgggcagtgggcggacagaagcctgggagtggagctggccgtgggcacgcaccccccgcctcagtgtcatggaggaggaccaggcctgtgccatggagagccggcgctttgaggagacccgtggcatggaggaggagcccacccacctgcctctggttgtctgcgtggacaaactcaccaaggtctacaaggacgacaagaagctggccctgaacaagctgagcctgaacctctacgagaaccaggtggtctccttcttgggccacaacggggcgggcaagaccaccaccatgtccatcctgaccggcctgttccctccaacgtcgggttccgccaccatctacgggcacgacatccgcacggagatggatgagatccgcaagaacctgggcatgtgcccgcagcacaatgtgctctttgaccggctcacggtggaggaacacctctggttctactcacggctcaagagcatggctcaggaggagatccgcagagagatggacaagatgatcgaggacctggagctctccaacaaacggcactcactggtgcagacattgtcgggtggcatgaagcgcaagctgtccgtggccatcgccttcgtgggcggctctcgcgccatcatcctggacgagcccacggcgggcgtggacccctacgcgcgccgcgccatctgggacctcatcctgaagtacaagccaggccgcaccatccttctgtccacccaccacatggatgaggctgacctgcttggggaccgcattgccatcatctcccatgggaagctcaagtgctgcggctccccgctcttcctcaagggcacctatggcgacgggtaccgcctcacgctggtcaagcggcccgccgagccggggggcccccaagagccagggctggcatccagccccccaggtcgggccccgctgagcagctgctccgagctccaggtgtcccagttcatccgcaagcatgtggcctcctgcctgctggtctcagacacaagcacggagctctcctacatcctgcccagcgaggccgccaagaagggggctttcgagcgcctcttccagcacctggagcgcagcctggatgcactgcacctcagcagcttcgggctgatggacacgaccctggaggaagtgttcctcaaggtgtcggaggaggatcagtcgctggagaacagtgaggccgatgtgaaggagtccaggaaggatgtgctccctggggcggagggcccggcgtctggggagggtcacgctggcaatctggcccggtgctcggagctgacccagtcgcaggcatcgctgcagtcggcgtcatctgtgggctctgcccgtggcgacgagggagctggctacaccgacgtctatggcgactaccgccccctctttgataacccacaggacccagacaatgtcagcctgcaagaggtggaggcagaggccctgtcgagggtcggccagggcagccgcaagctggacggcgggtggctgaaggtgcgccagttccacgggctgctggtcaaacgcttccactgcgcccgccgcaactccaaggcactcttctcccagatcttgctgccagccttcttcgtctgcgtggccatgaccgtggccctgtccgtcccggagattggtgatctgcccccgctggtcctgtcaccttcccagtaccacaactacacccagccccgtggcaatttcatcccctacgccaacgaggagcgccgcgagtaccggctgcggctatcgcccgacgccagcccccagcagctcgtgagcacgttccggctgccgtcgggggtgggtgccacctgcgtgctcaagtctcccgccaacggctcgctggggcccacgttgaacctgagcagcggggagtcgcgcctgctggcggctcggttcttcgacagcatgtgtctggagtccttcacacaggggctgccactgtccaatttcgtgccacccccaccctcgcccgccccatctgactcgccagcgtccccggatgaggacctgcaggcctggaacgtctccctgccgcccaccgctgggccagaaatgtggacgtcggcaccctccctgccgcgcctggtacgggagcccgtccgctgcacctgctctgcgcagggcaccggcttctcctgccccagcagtgtgggcgggcacccgccccagatgcgggtggtcacaggcgacatcctgaccgacatcaccggccacaatgtctctgagtacctgctcttcacctccgaccgcttccgactgcaccggtatggggccatcacctttggaaacgtcctgaagtccatcccagcctcatttggcaccagggccccacccatggtgcggaagatcgcggtgcgcagggctgcccaggttttctacaacaacaagggctatcacagcatgcccacctacctcaacagcctcaacaacgccatcctgcgtgccaacctgcccaagagcaagggcaacccggcggcttacggcatcaccgtcaccaaccaccccatgaataagaccagcgccagcctctccctggattacctgctgcagggcacggatgtcgtcatcgccatcttcatcatcgtggccatgtccttcgtgccggccagcttcgttgtcttcctcgtggccgagaagtccaccaaggccaagcacctgcagtttgtcagcggctgcaaccccatcatctactggctggcgaactacgtgtgggacatgctcaactacctggtccccgctacctgctgtgtcatcatcctgtttgtgttcgacctgccggcctacacgtcgcccaccaacttccctgccgtcctctccctcttcctgctctatgggtggtccatcacgcccatcatgtacccggcctccttctggttcgaggtccccagctccgcctacgtgttcctcattgtcatcaatctcttcatcggcatcaccgccaccgtggccaccttcctgctacagctcttcgagcacgacaaggacctgaaggttgtcaacagttacctgaaaagctgcttcctcattttccccaactacaacctgggccacgggctcatggagatggcctacaacgagtacatcaacgagtactacgccaagattggccagtttgacaagatgaagtccccgttcgagtgggacattgtcacccgcggactggtggccatggcggttgagggcgtcgtgggcttcctcctgaccatcatgtgccagtacaacttcctgcggcggccacagcgcatgcctgtgtctaccaagcctgtggaggatgatgtggacgtggccagtgagcggcagcgagtgctccggggagacgccgacaatgacatggtcaagattgagaacctgaccaaggtctacaagtcccggaagattggccgtatcctggccgttgaccgcctgtgcctgggtgtgcgtcctggcgagtgcttcgggctcctgggcgtcaacggtgcgggcaagaccagcaccttcaagatgctgaccggcgacgagagcacgacggggggcgaggccttcgtcaatggacacagcgtgctgaaggagctgctccaggtgcagcagagcctcggctactgcccgcagtgtgacgcgctgttcgacgagctcacggcccgggagcacctgcagctgtacacgcggctgcgtgggatctcctggaaggacgaggcccgggtggtgaagtgggctctggagaagctggagctgaccaagtacgcagacaagccggctggcacctacagcggcggcaacaagcggaagctctccacggccatcgccctcattgggtacccagccttcatcttcctggacgagcccaccacaggcatggaccccaaggcccggcgcttcctctggaacctcatccttgacctcatcaagacagggcgttcagtggtgctgacatcacacagcatggaggagtgcgaggcgctgtgcacgcggctggccatcatggtgaacggtcgcctgcggtgcctgggcagcatccagcacctgaagaaccggtttggagatggctacatgatcacggtgcggaccaagagcagccagagtgtgaaggacgtggtgcggttcttcaaccgcaacttcccggaagccatgctcaaggagcggcaccacacaaaggtgcagtaccagctcaagtcggagcacatctcgctggcccaggtgttcagcaagatggagcaggtgtctggcgtgctgggcatcgaggactactcggtcagccagaccacactggacaatgtgttcgtgaactttgccaagaagcagagtgacaacctggagcagcaggagacggagccgccatccgcactgcagtcccctctcggctgcttgctcagcctgctccggccccggtctgcccccacggagctccgggcacttgtggcagacgagcccgaggacctggacacggaggacgagggcctcatcagcttcgaggaggagcgggcccagctgtccttcaacacggacacgctctgctgaccacccagagctgggccagggaggacacgctccactgaccacccagagctgggccagggactcaacaatggggacagaagtcccccagtgcctgccagggcctggagtggaggttcaggaccaaggggcttctggtcctccagcccctgtactcggccatgccctgtggtcactgcggttgccgcccctaattgtgccaaaggctgacccggcccgggctgcgtacacccttgccctgctttgccttaaagcctcggggtctgcccggcccctcgcccctgcctggcactgctcaccgcccaaggcgacgccggctggaccaggcactgctggcctttctcctgcccggcctcggaaccagcttttctctcttacgatgaaggctgatgccgagagcgggctgtgggcggagctgggtcagtcccgtatttattttgctttgagaagaggctcctctggccctgctctcctgcagggaggtggctgtcctgcgggaagccatcagcttgggccagctggcaggtggcaggaatggagaagctgaccctgctggccaggcaaggggccagaccccccccaacccccagctgccatcgctctcccacccagcttggccccctgcccgcccacctccctgggagccgggcctgtacatagcgcacagatgtttgttttaaataaataaacaaaatgtctgcgggt

SEQ ID NO: 110039 - DNA, 8151 bp, Homo sapiens
  Payload ID: 1602
  Gene Symbol: ABCA2
  Gene Name: ATP-binding cassette, sub-family A (ABC1), member 2
  Uniprot ID: Q9BZC7
  ENST ID: ENST00000371605
  CDS Start-End: 149-7456
ggggcggagccagcgcggatcgggtcccggacgcccgagcgccccgcccccgcgcgggcgatgcccagcggcgcggcgggctgcggggcccggcggggcgcgcagaggagcgggccgcggcgctgaggcggcggagcgtggccccgccatgggcttcctgcaccagctgcagctgctgctctggaagaacgtgacgctcaaacgccggagcccgtgggtcctggccttcgagatcttcatccccctggtgctgttctttatcctgctggggctgcgacagaagaagcccaccatctccgtgaaggaagccttctacacagcggcgcccctgacgtctgccggcatcctgcctgtcatgcaatcgctgtgcccggacggccagcgagacgagttcggcttcctgcagtacgccaactccacggtcacgcagctgcttgagcgcctggaccgcgtggtggaggaaggcaacctgtttgacccagcgcggcccagcctgggctcagagctcgaggccctacgccagcatctggaggccctcagtgcgggcccgggcacctcggggagccacctggacagatccacagtgtcttccttctctctggactcggtggccagaaacccgcaggagctctggcgtttcctgacgcaaaacttgtcgctgcccaatagcacggcccaagcactcttggccgcccgtgtggacccgcccgaggtctaccacctgctctttggtccctcatctgccctggattcacagtctggcctccacaagggtcaggagccctggagccgcctagggggcaatcccctgttccggatggaggagctgctgctggctcctgccctcctggagcagctcacctgcacgccgggctcgggggagctgggccggatcctcactgtgcctgagagtcagaagggagccctgcagggctaccgggatgctgtctgcagtgggcaggctgctgcgcgtgccaggcgcttctctgggctgtctgctgagctccggaaccagctggacgtggccaaggtctcccagcagctgggcctggatgcccccaacggctcggactcctcgccacaggcgccacccccacggaggctgcaggcgcttctgggggacctgctggatgcccagaaggttctgcaggatgtggatgtcctgtcggccctggccctgctactgccccagggtgcctgcactggccggacccccggacccccagccagtggtgcgggtggggcggccaatggcactggggcaggggcagtcatgggccccaacgccaccgctgaggagggcgcaccctctgctgcagcactggccaccccggacacgctgcagggccagtgctcagccttcgtacagctctgggccggcctgcagcccatcttgtgtggcaacaaccgcaccattgaacccgaggcgctgcggcggggcaacatgagctccctgggcttcacgagcaaggagcagcggaacctgggcctcctcgtgcacctcatgaccagcaaccccaaaatcctgtacgcgcctgcgggctctgaggtcgaccgcgtcatcctcaaggccaacgagacttttgcttttgtgggcaacgtgactcactatgcccaggtctggctcaacatctcggcggagatccgcagcttcctggagcagggcaggctgcagcaacacctgcgctggctgcagcagtatgtagcagagctgcggctgcaccccgaggcactgaacctgtcactggatgagctgccgccggccctgagacaggacaacttctcgctgcccagtggcatggccctcctgcagcagctggataccattgacaacgcggcctgcggctggatccagttcatgtccaaggtgagcgtggacatcttcaagggcttccccgacgaggagagcattgtcaactacaccctcaaccaggcctaccaggacaacgtcactgtttttgccagtgtgatcttccagacccggaaggacggctcgctcccgcctcacgtgcactacaagatccgccagaactccagcttcaccgagaaaaccaacgagatccgccgcgcctactggcggcctgggcccaatactggcggccgcttctacttcctctacggcttcgtctggatccaggacatgatggagcgcgccatcatcgacacttttgtggggcacgatgtggtggagccaggcagctacgtgcagatgttcccctacccctgctacacacgcgatgacttcctgtttgtcattgagcacatgatgccgctgtgcatggtgatctcctgggtctactccgtggccatgaccatccagcacatcgtggcggagaaggagcaccggctcaaggaggtgatgaagaccatgggcctgaacaacgcggtgcactgggtggcctggttcatcaccggctttgtgcagctgtccatctccgtgacagcactcaccgccatcctgaagtacggccaggtgcttatgcacagccacgtggtcatcatctggctcttcctggcagtctacgcggtggccaccatcatgttctgcttcctggtgtctgtgctgtactccaaggccaagctggcctcggcctgcggtggcatcatctacttcctgagctacgtgccctacatgtacgtggcgatccgagaggaggtggcgcatgataagatcacggccttcgagaagtgcatcgcgtccctcatgtccacgacggcctttggtctgggctctaagtacttcgcgctgtatgaggtggccggcgtgggcatccagtggcacaccttcagccagtccccggtggagggggacgacttcaacttgctcctggctgtcaccatgctgatggtggacgccgtggtctatggcatcctcacgtggtacattgaggctgtgcacccaggcatgtacgggctgccccggccctggtacttcccactgcagaagtcctactggctgggcagtgggcggacagaagcctgggagtggagctggccgtgggcacgcaccccccgcctcagtgtcatggaggaggaccaggcctgtgccatggagagccggcgctttgaggagacccgtggcatggaggaggagcccacccacctgcctctggttgtctgcgtggacaaactcaccaaggtctacaaggacgacaagaagctggccctgaacaagctgagcctgaacctctacgagaaccaggtggtctccttcttgggccacaacggggcgggcaagaccaccaccatgtccatcctgaccggcctgttccctccaacgtcgggttccgccaccatctacgggcacgacatccgcacggagatggatgagatccgcaagaacctgggcatgtgcccgcagcacaatgtgctctttgaccggctcacggtggaggaacacctctggttctactcacggctcaagagcatggctcaggaggagatccgcagagagatggacaagatgatcgaggacctggagctctccaacaaacggcactcactggtgcagacattgtcgggtggcatgaagcgcaagctgtccgtggccatcgccttcgtgggcggctctcgcgccatcatcctggacgagcccacggcgggcgtggacccctacgcgcgccgcgccatctgggacctcatcctgaagtacaagccaggccgcaccatccttctgtccacccaccacatggatgaggctgacctgcttggggaccgcattgccatcatctcccatgggaagctcaagtgctgcggctccccgctcttcctcaagggcacctatggcgacgggtaccgcctcacgctggtcaagcggcccgccgagccggggggcccccaagagccagggctggcatccagccccccaggtcgggccccgctgagcagctgctccgagctccaggtgtcccagttcatccgcaagcatgtggcctcctgcctgctggtctcagacacaagcacggagctctcctacatcctgcccagcgaggccgccaagaagggggctttcgagcgcctcttccagcacctggagcgcagcctggatgcactgcacctcagcagcttcgggctgatggacacgaccctggaggaagtgttcctcaaggtgtcggaggaggatcagtcgctggagaacagtgaggccgatgtgaaggagtccaggaaggatgtgctccctggggcggagggcccggcgtctggggagggtcacgctggcaatctggcccggtgctcggagctgacccagtcgcaggcatcgctgcagtcggcgtcatctgtgggctctgcccgtggcgacgagggagctggctacaccgacgtctatggcgactaccgccccctctttgataacccacaggacccagacaatgtcagcctgcaagaggtggaggcagaggccctgtcgagggtcggccagggcagccgcaagctggacggcgggtggctgaaggtgcgccagttccacgggctgctggtcaaacgcttccactgcgcccgccgcaactccaaggcactcttctcccagatcttgctgccagccttcttcgtctgcgtggccatgaccgtggccctgtccgtcccggagattggtgatctgcccccgctggtcctgtcaccttcccagtaccacaactacacccagccccgtggcaatttcatcccctacgccaacgaggagcgccgcgagtaccggctgcggctatcgcccgacgccagcccccagcagctcgtgagcacgttccggctgccgtcgggggtgggtgccacctgcgtgctcaagtctcccgccaacggctcgctggggcccacgttgaacctgagcagcggggagtcgcgcctgctggcggctcggttcttcgacagcatgtgtctggagtccttcacacaggggctgccactgtccaatttcgtgccacccccaccctcgcccgccccatctgactcgccagcgtccccggatgaggacctgcaggcctggaacgtctccctgccgcccaccgctgggccagaaatgtggacgtcggcaccctccctgccgcgcctggtacgggagcccgtccgctgcacctgctctgcgcagggcaccggcttctcctgccccagcagtgtgggcgggcacccgccccagatgcgggtggtcacaggcgacatcctgaccgacatcaccggccacaatgtctctgagtacctgctcttcacctccgaccgcttccgactgcaccggtatggggccatcacctttggaaacgtcctgaagtccatcccagcctcatttggcaccagggccccacccatggtgcggaagatcgcggtgcgcagggctgcccaggttttctacaacaacaagggctatcacagcatgcccacctacctcaacagcctcaacaacgccatcctgcgtgccaacctgcccaagagcaagggcaacccggcggcttacggcatcaccgtcaccaaccaccccatgaataagaccagcgccagcctctccctggattacctgctgcagggcacggatgtcgtcatcgccatcttcatcatcgtggccatgtccttcgtgccggccagcttcgttgtcttcctcgtggccgagaagtccaccaaggccaagcacctgcagtttgtcagcggctgcaaccccatcatctactggctggcgaactacgtgtgggacatgctcaactacctggtccccgctacctgctgtgtcatcatcctgtttgtgttcgacctgccggcctacacgtcgcccaccaacttccctgccgtcctctccctcttcctgctctatgggtggtccatcacgcccatcatgtacccggcctccttctggttcgaggtccccagctccgcctacgtgttcctcattgtcatcaatctcttcatcggcatcaccgccaccgtggccaccttcctgctacagctcttcgagcacgacaaggacctgaaggttgtcaacagttacctgaaaagctgcttcctcattttccccaactacaacctgggccacgggctcatggagatggcctacaacgagtacatcaacgagtactacgccaagattggccagtttgacaagatgaagtccccgttcgagtgggacattgtcacccgcggactggtggccatggcggttgagggcgtcgtgggcttcctcctgaccatcatgtgccagtacaacttcctgcggcggccacagcgcatgcctgtgtctaccaagcctgtggaggatgatgtggacgtggccagtgagcggcagcgagtgctccggggagacgccgacaatgacatggtcaagattgagaacctgaccaaggtctacaagtcccggaagattggccgtatcctggccgttgaccgcctgtgcctgggtgtgcgtcctggcgagtgcttcgggctcctgggcgtcaacggtgcgggcaagaccagcaccttcaagatgctgaccggcgacgagagcacgacggggggcgaggccttcgtcaatggacacagcgtgctgaaggagctgctccaggtgcagcagagcctcggctactgcccgcagtgtgacgcgctgttcgacgagctcacggcccgggagcacctgcagctgtacacgcggctgcgtgggatctcctggaaggacgaggcccgggtggtgaagtgggctctggagaagctggagctgaccaagtacgcagacaagccggctggcacctacagcggcggcaacaagcggaagctctccacggccatcgccctcattgggtacccagccttcatcttcctggacgagcccaccacaggcatggaccccaaggcccggcgcttcctctggaacctcatccttgacctcatcaagacagggcgttcagtggtgctgacatcacacagcatggaggagtgcgaggcgctgtgcacgcggctggccatcatggtgaacggtcgcctgcggtgcctgggcagcatccagcacctgaagaaccggtttggagatggctacatgatcacggtgcggaccaagagcagccagagtgtgaaggacgtggtgcggttcttcaaccgcaacttcccggaagccatgctcaaggagcggcaccacacaaaggtgcagtaccagctcaagtcggagcacatctcgctggcccaggtgttcagcaagatggagcaggtgtctggcgtgctgggcatcgaggactactcggtcagccagaccacactggacaatgtgttcgtgaactttgccaagaagcagagtgacaacctggagcagcaggagacggagccgccatccgcactgcagtcccctctcggctgcttgctcagcctgctccggccccggtctgcccccacggagctccgggcacttgtggcagacgagcccgaggacctggacacggaggacgagggcctcatcagcttcgaggaggagcgggcccagctgtccttcaacacggacacgctctgctgaccacccagagctgggccagggaggacacgctccactgaccacccagagctgggccagggactcaacaatggggacagaagtcccccagtgcctgccagggcctggagtggaggttcaggaccaaggggcttctggtcctccagcccctgtactcggccatgccctgtggtcactgcggttgccgcccctaattgtgccaaaggctgacccggcccgggctgcgtacacccttgccctgctttgccttaaagcctcggggtctgcccggcccctcgcccctgcctggcactgctcaccgcccaaggcgacgccggctggaccaggcactgctggcctttctcctgcccggcctcggaaccagcttttctctcttacgatgaaggctgatgccgagagcgggctgtgggcggagctgggtcagtcccgtatttattttgctttgagaagaggctcctctggccctgctctcctgcagggaggtggctgtcctgcgggaagccatcagcttgggccagctggcaggtggcaggaatggagaagctgaccctgctggccaggcaaggggccagaccccccccaacccccagctgccatcgctctcccacccagcttggccccctgcccgcccacctccctgggagccgggcctgtacatagcgcacagatgtttgttttaaataaataaacaaaatgtc

SEQ ID NO: 110040 - DNA, 8031 bp, Homo sapiens
  Payload ID: 1602
  Gene Symbol: ABCA2
  Gene Name: ATP-binding cassette, sub-family A (ABC1), member 2
  ENST ID: ENST00000487109
  CDS Start-End: 44-3013
cctgatcccgaactccctgtgcagagaccagactcgcccgaatatggggagaaaaacgagccgcgtgcagcaggggccgcctcggtcccctgcctgctccgctcacggcgagcgttcctggggcctcgagtttccccccttccgctggctgctcggaatcgcgggacggacccacctggccgccctgcctcccttccagtgggtcctggccttcgagatcttcatccccctggtgctgttctttatcctgctggggctgcgacagaagaagcccaccatctccgtgaaggaagccttctacacagcggcgcccctgacgtctgccggcatcctgcctgtcatgcaatcgctgtgcccggacggccagcgagacgagttcggcttcctgcagtacgccaactccacggtcacgcagctgcttgagcgcctggaccgcgtggtggaggaaggcaacctgtttgacccagcgcggcccagcctgggctcagagctcgaggccctacgccagcatctggaggccctcagtgcgggcccgggcacctcggggagccacctggacagatccacagtgtcttccttctctctggactcggtggccagaaacccgcaggagctctggcgtttcctgacgcaaaacttgtcgctgcccaatagcacggcccaagcactcttggccgcccgtgtggacccgcccgaggtctaccacctgctctttggtccctcatctgccctggattcacagtctggcctccacaagggtcaggagccctggagccgcctagggggcaatcccctgttccggatggaggagctgctgctggctcctgccctcctggagcagctcacctgcacgccgggctcgggggagctgggccggatcctcactgtgcctgagagtcagaagggagccctgcagggctaccgggatgctgtctgcagtgggcaggctgctgcgcgtgccaggcgcttctctgggctgtctgctgagctccggaaccagctggacgtggccaaggtctcccagcagctgggcctggatgcccccaacggctcggactcctcgccacaggcgccacccccacggaggctgcaggcgcttctgggggacctgctggatgcccagaaggttctgcaggatgtggatgtcctgtcggccctggccctgctactgccccagggtgcctgcactggccggacccccggacccccagccagtggtgcgggtggggcggccaatggcactggggcaggggcagtcatgggccccaacgccaccgctgaggagggcgcaccctctgctgcagcactggccaccccggacacgctgcagggccagtgctcagccttcgtacagctctgggccggcctgcagcccatcttgtgtggcaacaaccgcaccattgaacccgaggcgctgcggcggggcaacatgagctccctgggcttcacgagcaaggagcagcggaacctgggcctcctcgtgcacctcatgaccagcaaccccaaaatcctgtacgcgcctgcgggctctgaggtcgaccgcgtcatcctcaaggccaacgagacttttgcttttgtgggcaacgtgactcactatgcccaggtctggctcaacatctcggcggagatccgcagcttcctggagcagggcaggctgcagcaacacctgcgctggctgcagcagtatgtagcagagctgcggctgcaccccgaggcactgaacctgtcactggatgagctgccgccggccctgagacaggacaacttctcgctgcccagtggcatggccctcctgcagcagctggataccattgacaacgcggcctgcggctggatccagttcatgtccaaggtgagcgtggacatcttcaagggcttccccgacgaggagagcattgtcaactacaccctcaaccaggcctaccaggacaacgtcactgtttttgccagtgtgatcttccagacccggaaggacggctcgctcccgcctcacgtgcactacaagatccgccagaactccagcttcaccgagaaaaccaacgagatccgccgcgcctactggcggcctgggcccaatactggcggccgcttctacttcctctacggcttcgtctggatccaggacatgatggagcgcgccatcatcgacacttttgtggggcacgatgtggtggagccaggcagctacgtgcagatgttcccctacccctgctacacacgcgatgacttcctgtttgtcattgagcacatgatgccgctgtgcatggtgatctcctgggtctactccgtggccatgaccatccagcacatcgtggcggagaaggagcaccggctcaaggaggtgatgaagaccatgggcctgaacaacgcggtgcactgggtggcctggttcatcaccggctttgtgcagctgtccatctccgtgacagcactcaccgccatcctgaagtacggccaggtgcttatgcacagccacgtggtcatcatctggctcttcctggcagtctacgcggtggccaccatcatgttctgcttcctggtgtctgtgctgtactccaaggccaagctggcctcggcctgcggtggcatcatctacttcctgagctacgtgccctacatgtacgtggcgatccgagaggaggtggcgcatgataagatcacggccttcgagaagtgcatcgcgtccctcatgtccacgacggcctttggtctgggctctaagtacttcgcgctgtatgaggtggccggcgtgggcatccagtggcacaccttcagccagtccccggtggagggggacgacttcaacttgctcctggctgtcaccatgctgatggtggacgccgtggtctatggcatcctcacgtggtacattgaggctgtgcacccagaagtcctactggctgggcagtgggcggacagaagcctgggagtggagctggccgtgggcacgcaccccccgcctcagtgtcatggaggaggaccaggcctgtgccatggagagccggcgctttgaggagacccgtggcatggaggaggagcccacccacctgcctctggttgtctgcgtggacaaactcaccaaggtctacaaggacgacaagaagctggccctgaacaagctgagcctgaacctctacgagaaccaggtggtctccttcttgggccacaacggggcgggcaagaccaccaccatgtccatcctgaccggcctgttccctccaacgtcgggttccgccaccatctacgggcacgacatccgcacggagatggatgagatccgcaagaacctgggcatgtgcccgcagcacaatgtgctctttgaccggctcacggtggaggaacacctctggttctactcacggctcaagagcatggctcaggaggagatccgcagagagatggacaagatgatcgaggacctggagctctccaacaaacggcactcactggtgcagacattgtcgggtggcatgaagcgcaagctgtccgtggccatcgccttcgtgggcggctctcgcgccatcatcctggacgagcccacggcgggcgtggacccctacgcgcgccgcgccatctgggacctcatcctgaagtacaagccaggccgcaccatccttctgtccacccaccacatggatgaggctgacctgcttggggaccgcattgccatcatctcccatgggaagctcaagtgctgcggctccccgctcttcctcaagggcacctatggcgacgggtaccgcctcacgctggtcaagcggcccgccgagccggggggcccccaagagccagggctggcatccagccccccaggtcgggccccgctgagcagctgctccgagctccaggtgtcccagttcatccgcaagcatgtggcctcctgcctgctggtctcagacacaagcacggagctctcctacatcctgcccagcgaggccgccaagaagggggctttcgagcgcctcttccagcacctggagcgcagcctggatgcactgcacctcagcagcttcgggctgatggacacgaccctggaggaagtgttcctcaaggtgtcggaggaggatcagtcgctggagaacagtgaggccgatgtgaaggagtccaggaaggatgtgctccctggggcggagggcccggcgtctggggagggtcacgctggcaatctggcccggtgctcggagctgacccagtcgcaggcatcgctgcagtcggcgtcatctgtgggctctgcccgtggcgacgagggagctggctacaccgacgtctatggcgactaccgccccctctttgataacccacaggacccagacaatgtcagcctgcaagaggtggaggcagaggccctgtcgagggtcggccagggcagccgcaagctggacggcgggtggctgaaggtgcgccagttccacgggctgctggtcaaacgcttccactgcgcccgccgcaactccaaggcactcttctcccagatcttgctgccagccttcttcgtctgcgtggccatgaccgtggccctgtccgtcccggagattggtgatctgcccccgctggtcctgtcaccttcccagtaccacaactacacccagccccgtggcaatttcatcccctacgccaacgaggagcgccgcgagtaccggctgcggctatcgcccgacgccagcccccagcagctcgtgagcacgttccggctgccgtcgggggtgggtgccacctgcgtgctcaagtctcccgccaacggctcgctggggcccacgttgaacctgagcagcggggagtcgcgcctgctggcggctcggttcttcgacagcatgtgtctggagtccttcacacaggggctgccactgtccaatttcgtgccacccccaccctcgcccgccccatctgactcgccagcgtccccggatgaggacctgcaggcctggaacgtctccctgccgcccaccgctgggccagaaatgtggacgtcggcaccctccctgccgcgcctggtacgggagcccgtccgctgcacctgctctgcgcagggcaccggcttctcctgccccagcagtgtgggcgggcacccgccccagatgcgggtggtcacaggcgacatcctgaccgacatcaccggccacaatgtctctgagtacctgctcttcacctccgaccgcttccgactgcaccggtatggggccatcacctttggaaacgtcctgaagtccatcccagcctcatttggcaccagggccccacccatggtgcggaagatcgcggtgcgcagggctgcccaggttttctacaacaacaagggctatcacagcatgcccacctacctcaacagcctcaacaacgccatcctgcgtgccaacctgcccaagagcaagggcaacccggcggcttacggcatcaccgtcaccaaccaccccatgaataagaccagcgccagcctctccctggattacctgctgcagggcacggatgtcgtcatcgccatcttcatcatcgtggccatgtccttcgtgccggccagcttcgttgtcttcctcgtggccgagaagtccaccaaggccaagcacctgcagtttgtcagcggctgcaaccccatcatctactggctggcgaactacgtgtgggacatgctcaactacctggtccccgctacctgctgtgtcatcatcctgtttgtgttcgacctgccggcctacacgtcgcccaccaacttccctgccgtcctctccctcttcctgctctatgggtaagcggaagcggaggggggagcggcctcaggtgggaccggggctgcctggtgaccactgcccgccacctgcccgcaggtggtccatcacgcccatcatgtacccggcctccttctggttcgaggtccccagctccgcctacgtgttcctcattgtcatcaatctcttcatcggcatcaccgccaccgtggccaccttcctgctacagctcttcgagcacgacaaggacctgaaggttgtcaacagttacctgaaaagctgcttcctcattttccccaactacaacctgggccacgggctcatggagatggcctacaacgagtacatcaacgagtactacgccaagattggccagtttgacaagatgaagtccccgttcgagtgggacattgtcacccgcggactggtggccatggcggttgagggcgtcgtgggcttcctcctgaccatcatgtgccagtacaacttcctgcggcggccacagcgcatgcctgtgtctaccaagcctgtggaggatgatgtggacgtggccagtgagcggcagcgagtgctccggggagacgccgacaatgacatggtcaagattgagaacctgaccaaggtctacaagtcccggaagattggccgtatcctggccgttgaccgcctgtgcctgggtgtgcgtcctggcgagtgcttcgggctcctgggcgtcaacggtgcgggcaagaccagcaccttcaagatgctgaccggcgacgagagcacgacggggggcgaggccttcgtcaatggacacagcgtgctgaaggagctgctccaggtgcagcagagcctcggctactgcccgcagtgtgacgcgctgttcgacgagctcacggcccgggagcacctgcagctgtacacgcggctgcgtgggatctcctggaaggacgaggcccgggtggtgaagtgggctctggagaagctggagctgaccaagtacgcagacaagccggctggcacctacagcggcggcaacaagcggaagctctccacggccatcgccctcattgggtacccagccttcatcttcctggacgagcccaccacaggcatggaccccaaggcccggcgcttcctctggaacctcatccttgacctcatcaagacagggcgttcagtggtgctgacatcacacagcatggaggagtgcgaggcgctgtgcacgcggctggccatcatggtgaacggtcgcctgcggtgcctgggcagcatccagcacctgaagaaccggtttggagatggctacatgatcacggtgcggaccaagagcagccagagtgtgaaggacgtggtgcggttcttcaaccgcaacttcccggaagccatgctcaaggagcggcaccacacaaaggtgcagtaccagctcaagtcggagcacatctcgctggcccaggtgttcagcaagatggagcaggtgtctggcgtgctgggcatcgaggactactcggtcagccagaccacactggacaatgtgttcgtgaactttgccaagaagcagagtgacaacctggagcagcaggagacggagccgccatccgcactgcagtcccctctcggctgcttgctcagcctgctccggccccggtctgcccccacggagctccgggcacttgtggcagacgagcccgaggacctggacacggaggacgagggcctcatcagcttcgaggaggagcgggcccagctgtccttcaacacggacacgctctgctgaccacccagagctgggccagggaggacacgctccactgaccacccagagctgggccagggactcaacaatggggacagaagtcccccagtgcctgccagggcctggagtggaggttcaggaccaaggggcttctggtcctccagcccctgtactcggccatgccctgtggtcactgcggttgccgcccctaattgtgccaaaggctgacccggcccgggctgcgtacacccttgccctgctttgccttaaagcctcggggtctgcccggcccctcgcccctgcctggcactgctcaccgcccaaggcgacgccggctggaccaggcactgctggcctttctcctgcccggcctcggaaccagcttttctctcttacgatgaaggctgatgccgagagcgggctgtgggcggagctgggtcagtcccgtatttattttgctttgagaagaggctcctctggccctgctctcctgcagggaggtggctgtcctgcgggaagccatcagcttgggccagctggcaggtggcaggaatggagaagctgaccctgctg

SEQ ID NO: 110041 - DNA, 3327 bp, Homo sapiens
  Payload ID: 1602
  Gene Symbol: ABCA2
  Gene Name: ATP-binding cassette, sub-family A (ABC1), member 2
  ENST ID: ENST00000488535
  CDS Start-End: 1-3201
ttctacttcctctacggcttcgtctggatccaggacatgatggagcgcgccatcatcgacacttttgtggggcacgatgtggtggagccaggcagctacgtgcagatgttcccctacccctgctacacacgcgatgacttcctgtttgtcattgagcacatgatgccgctgtgcatggtgatctcctgggtctactccgtggccatgaccatccagcacatcgtggcggagaaggagcaccggctcaaggaggtgatgaagaccatgggcctgaacaacgcggtgcactgggtggcctggttcatcaccggctttgtgcagctgtccatctccgtgacagcactcaccgccatcctgaagtacggccaggtgcttatgcacagccacgtggtcatcatctggctcttcctggcagtctacgcggtggccaccatcatgttctgcttcctggtgtctgtgctgtactccaaggccaagctggcctcggcctgcggtggcatcatctacttcctgagctacgtgccctacatgtacgtggcgatccgagaggaggtggcgcatgataagatcacggccttcgagaagtgcatcgcgtccctcatgtccacgacggcctttggtctgggctctaagtacttcgcgctgtatgaggtggccggcgtgggcatccagtggcacaccttcagccagtccccggtggagggggacgacttcaacttgctcctggctgtcaccatgctgatggtggacgccgtggtctatggcatcctcacgtggtacattgaggctgtgcacccaggcatgtacgggctgccccggccctggtacttcccactgcagaagtcctactggctgggcagtgggcggacagaagcctgggagtggagctggccgtgggcacgcaccccccgcctcagtgtcatggaggaggaccaggcctgtgccatggagagccggcgctttgaggagacccgtggcatggaggaggagcccacccacctgcctctggttgtctgcgtggacaaactcaccaaggtctacaaggacgacaagaagctggccctgaacaagctgagcctgaacctctacgagaaccaggtggtctccttcttgggccacaacggggcgggcaagaccaccaccatgtccatcctgaccggcctgttccctccaacgtcgggttccgccaccatctacgggcacgacatccgcacggagatggatgagatccgcaagaacctgggcatgtgcccgcagcacaatgtgctctttgaccggctcacggtggaggaacacctctggttctactcacggctcaagagcatggctcaggaggagatccgcagagagatggacaagatgatcgaggacctggagctctccaacaaacggcactcactggtgcagacattgtcgggtggcatgaagcgcaagctgtccgtggccatcgccttcgtgggcggctctcgcgccatcatcctggacgagcccacggcgggcgtggacccctacgcgcgccgcgccatctgggacctcatcctgaagtacaagccaggccgcaccatccttctgtccacccaccacatggatgaggctgacctgcttggggaccgcattgccatcatctcccatgggaagctcaagtgctgcggctccccgctcttcctcaagggcacctatggcgacgggtaccgcctcacgctggtcaagcggcccgccgagccggggggcccccaagagccagggctggcatccagccccccaggtcgggccccgctgagcagctgctccgagctccaggtgtcccagttcatccgcaagcatgtggcctcctgcctgctggtctcagacacaagcacggagctctcctacatcctgcccagcgaggccgccaagaagggggctttcgagcgcctcttccagcacctggagcgcagcctggatgcactgcacctcagcagcttcgggctgatggacacgaccctggaggaagtgttcctcaaggtgtcggaggaggatcagtcgctggagaacagtgaggccgatgtgaaggagtccaggaaggatgtgctccctggggcggagggcccggcgtctggggagggtcacgctggcaatctggcccggtgctcggagctgacccagtcgcaggcatcgctgcagtcggcgtcatctgtgggctctgcccgtggcgacgagggagctggctacaccgacgtctatggcgactaccgccccctctttgataacccacaggacccagacaatgtcagcctgcaagaggtggaggcagaggccctgtcgagggtcggccagggcagccgcaagctggacggcgggtggctgaaggtgcgccagttccacgggctgctggtcaaacgcttccactgcgcccgccgcaactccaaggcactcttctcccagatcttgctgccagccttcttcgtctgcgtggccatgaccgtggccctgtccgtcccggagattggtgatctgcccccgctggtcctgtcaccttcccagtaccacaactacacccagccccgtggcaatttcatcccctacgccaacgaggagcgccgcgagtaccggctgcggctatcgcccgacgccagcccccagcagctcgtgagcacgttccggctgccgtcgggggtgggtgccacctgcgtgctcaagtctcccgccaacggctcgctggggcccacgttgaacctgagcagcggggagtcgcgcctgctggcggctcggttcttcgacagcatgtgtctggagtccttcacacaggggctgccactgtccaatttcgtgccacccccaccctcgcccgccccatctgactcgccagcgtccccggatgaggacctgcaggcctggaacgtctccctgccgcccaccgctgggccagaaatgtggacgtcggcaccctccctgccgcgcctggtacgggagcccgtccgctgcacctgctctgcgcagggcaccggcttctcctgccccagcagtgtgggcgggcacccgccccagatgcgggtggtcacaggcgacatcctgaccgacatcaccggccacaatgtctctgagtacctgctcttcacctccgaccgcttccgactgcaccgcctcactgcctgcctagcctcaccgcccctcccacctgcctgcccaggtatggggccatcacctttggaaacgtcctgaagtccatcccagcctcatttggcaccagggccccacccatggtgcggaagatcgcggtgcgcagggctgcccaggttttctacaacaacaagggctatcacagcatgcccacctacctcaacagcc

SEQ ID NO: 110042 - DNA, 6295 bp, Homo sapiens
  Payload ID: 1602
  Gene Symbol: ABCA2
  Gene Name: ATP-binding cassette, sub-family A (ABC1), member 2
  ENST ID: ENST00000479446
  CDS Start-End: 1-4325
gcggccgcttctacttcctctacggcttcgtctggatccaggacatgatggagcgcgccatcatcgacacttttgtggggcacgatgtggtggagccaggcagctacgtgcagatgttcccctacccctgctacacacgcgatgacttcctgtttgtcattgagcacatgatgccgctgtgcatggtgatctcctgggtctactccgtggccatgaccatccagcacatcgtggcggagaaggagcaccggctcaaggaggtgatgaagaccatgggcctgaacaacgcggtgcactgggtggcctggttcatcaccggctttgtgcagctgtccatctccgtgacagcactcaccgccatcctgaagtacggccaggtgcttatgcacagccacgtggtcatcatctggctcttcctggcagtctacgcggtggccaccatcatgttctgcttcctggtgtctgtgctgtactccaaggccaagctggcctcggcctgcggtggcatcatctacttcctgagctacgtgccctacatgtacgtggcgatccgagaggaggtggcgcatgataagatcacggccttcgagaagtgcatcgcgtccctcatgtccacgacggcctttggtctgggctctaagtacttcgcgctgtatgaggtggccggcgtgggcatccagtggcacaccttcagccagtccccggtggagggggacgacttcaacttgctcctggctgtcaccatgctgatggtggacgccgtggtctatggcatcctcacgtggtacattgaggctgtgcacccaggcatgtacgggctgccccggccctggtacttcccactgcagaagtcctactggctgggcagtgggcggacagaagcctgggagtggagctggccgtgggcacgcaccccccgcctcagtgtcatggaggaggaccaggcctgtgccatggagagccggcgctttgaggagacccgtggcatggaggaggagcccacccacctgcctctggttgtctgcgtggacaaactcaccaaggtctacaaggacgacaagaagctggccctgaacaagctgagcctgaacctctacgagaaccaggtggtctccttcttgggccacaacggggcgggcaagaccaccaccatgtccatcctgaccggcctgttccctccaacgtcgggttccgccaccatctacgggcacgacatccgcacggagatggatgagatccgcaagaacctgggcatgtgcccgcagcacaatgtgctctttgaccggctcacggtggaggaacacctctggttctactcacggctcaagagcatggctcaggaggagatccgcagagagatggacaagatgatcgaggacctggagctctccaacaaacggcactcactggtgcagacattgtcgggtggcatgaagcgcaagctgtccgtggccatcgccttcgtgggcggctctcgcgccatcatcctggacgagcccacggcgggcgtggacccctacgcgcgccgcgccatctgggacctcatcctgaagtacaagccaggccgcaccatccttctgtccacccaccacatggatgaggctgacctgcttggggaccgcattgccatcatctcccatgggaagctcaagtgctgcggctccccgctcttcctcaagggcacctatggcgacgggtaccgcctcacgctggtcaagcggcccgccgagccggggggcccccaagagccagggctggcatccagccccccaggtcgggccccgctgagcagctgctccgagctccaggtgtcccagttcatccgcaagcatgtggcctcctgcctgctggtctcagacacaagcacggagctctcctacatcctgcccagcgaggccgccaagaagggggctttcgagcgcctcttccagcacctggagcgcagcctggatgcactgcacctcagcagcttcgggctgatggacacgaccctggaggaagtgttcctcaaggtgtcggaggaggatcagtcgctggagaacagtgaggccgatgtgaaggagtccaggaaggatgtgctccctggggcggagggcccggcgtctggggagggtcacgctggcaatctggcccggtgctcggagctgacccagtcgcaggcatcgctgcagtcggcgtcatctgtgggctctgcccgtggcgacgagggagctggctacaccgacgtctatggcgactaccgccccctctttgataacccacaggacccagacaatgtcagcctgcaagaggtggaggcagaggccctgtcgagggtcggccagggcagccgcaagctggacggcgggtggctgaaggtgcgccagttccacgggctgctggtcaaacgcttccactgcgcccgccgcaactccaaggcactcttctcccagatcttgctgccagccttcttcgtctgcgtggccatgaccgtggccctgtccgtcccggagattggtgatctgcccccgctggtcctgtcaccttcccagtaccacaactacacccagccccgtggcaatttcatcccctacgccaacgaggagcgccgcgagtaccggctgcggctatcgcccgacgccagcccccagcagctcgtgagcacgttccggctgccgtcgggggtgggtgccacctgcgtgctcaagtctcccgccaacggctcgctggggcccacgttgaacctgagcagcggggagtcgcgcctgctggcggctcggttcttcgacagcatgtgtctggagtccttcacacaggggctgccactgtccaatttcgtgccacccccaccctcgcccgccccatctgactcgccagcgtccccggatgaggacctgcaggcctggaacgtctccctgccgcccaccgctgggccagaaatgtggacgtcggcaccctccctgccgcgcctggtacgggagcccgtccgctgcacctgctctgcgcagggcaccggcttctcctgccccagcagtgtgggcgggcacccgccccagatgcgggtggtcacaggcgacatcctgaccgacatcaccggccacaatgtctctgagtacctgctcttcacctccgaccgcttccgactgcaccggtatggggccatcacctttggaaacgtcctgaagtccatcccagcctcatttggcaccagggccccacccatggtgcggaagatcgcggtgcgcagggctgcccaggttttctacaacaacaagggctatcacagcatgcccacctacctcaacagcctcaacaacgccatcctgcgtgccaacctgcccaagagcaagggcaacccggcggcttacggcatcaccgtcaccaaccaccccatgaataagaccagcgccagcctctccctggattacctgctgcagggcacggatgtcgtcatcgccatcttcatcatcgtggccatgtccttcgtgccggccagcttcgttgtcttcctcgtggccgagaagtccaccaaggccaagcacctgcagtttgtcagcggctgcaaccccatcatctactggctggcgaactacgtgtgggacatgctcaactacctggtccccgctacctgctgtgtcatcatcctgtttgtgttcgacctgccggcctacacgtcgcccaccaacttccctgccgtcctctccctcttcctgctctatgggtggtccatcacgcccatcatgtacccggcctccttctggttcgaggtccccagctccgcctacgtgttcctcattgtcatcaatctcttcatcggcatcaccgccaccgtggccaccttcctgctacagctcttcgagcacgacaaggacctgaaggttgtcaacagttacctgaaaagctgcttcctcattttccccaactacaacctgggccacgggctcatggagatggcctacaacgagtacatcaacgagtactacgccaagattggccagtttgacaagatgaagtccccgttcgagtgggacattgtcacccgcggactggtggccatggcggttgagggcgtcgtgggcttcctcctgaccatcatgtgccagtacaacttcctgcggcggccacagcgcatgcctgtgtctaccaagcctgtggaggatgatgtggacgtggccagtgagcggcagcgagtgctccggggagacgccgacaatgacatggtcaagattgagaacctgaccaaggtgggctctgggcatgtagggtggggcctgggtggggtaggccagggccaggggggtggggccccagcagtggaggtggagcctgggtgggcagggccctgagctctgggggtggggcctgcatggggtggggctgtggggcacgtggccccctgggctctggaggtggggcagggtctgggtggggtggggccagaggggcagggtgggggcaggatgccccgctgagtgggcaggctcctggccaggtctacaagtcccggaagattggccgtatcctggccgttgaccgcctgtgcctgggtgtgcgtcctggcgagtgcttcgggctcctgggcgtcaacggtgcgggcaagaccagcaccttcaagatgctgaccggcgacgagagcacgacggggggcgaggccttcgtcaatggacacagcgtgctgaaggagctgctccaggtgcagcagagcctcggctactgcccgcagtgtgacgcgctgttcgacgagctcacggcccgggagcacctgcagctgtacacgcggctgcgtgggatctcctggaaggacgaggcccgggtggtgaagtgggctctggagaagctggagctgaccaagtacgcagacaagccggctggcacctacagcggcggcaacaagcggaagctctccacggccatcgccctcattgggtacccagccttcatcttcctggacgagcccaccacaggcatggaccccaaggcccggcgcttcctctggaacctcatccttgacctcatcaagacagggcgttcagtggtgctgacatcacacagcatggaggagtgcgaggcgctgtgcacgcggctggccatcatggtgaacggtcgcctgcggtgcctgggcagcatccagcacctgaagaaccggtttggagatggctacatgatcacggtgcggaccaagagcagccagagtgtgaaggacgtggtgcggttcttcaaccgcaacttcccggaagccatgctcaaggagcggcaccacacaaaggtgcagtaccagctcaagtcggagcacatctcgctggcccaggtgttcagcaagatggagcaggtgtctggcgtgctgggcatcgaggactactcggtcagccagaccacactggacaatgtgttcgtgaactttgccaagaagcagagtgacaacctggagcagcaggagacggagccgccatccgcactgcagtcccctctcggctgcttgctcagcctgctccggccccggtctgcccccacggagctccgggcacttgtggcagacgagcccgaggacctggacacggaggacgagggcctcatcagcttcgaggaggagcgggcccagctgtccttcaacacggacacgctctgctgaccacccagagctgggccagggaggacacgctccactgaccacccagagctgggccagggactcaacaatggggacagaagtcccccagtgcctgccagggcctggagtggaggttcaggaccaaggggcttctggtcctccagcccctgtactcggccatgccctgtggtcactgcggttgccgcccctaattgtgccaaaggctgacccggcccgggctgcgtacacccttgccctgctttgccttaaagcctcggggtctgcccggcccctcgcccctgcctggcactgctcaccgcccaaggcgacgccggctggaccaggcactgctggcctttctcctgcccggcctcggaaccagcttttctctcttacgatgaaggctgatgccgagagcgggctgtgggcggagctgggtcagtcccgtatttattttgctttgagaagaggctcctctggccctgctctcctgcagggaggtggctgtcctgcgggaagccatcagcttgggccagctggcaggtggcaggaatggagaagctgaccctgctggccaggcaaggggccagaccccccccaacccccagctgccatcgctctcccacccagcttggccccctgcccgcccacctccctgggagccgggcctgtacatagcgcacagatgtttgttttaaataaataaac

SEQ ID NO: 110043 - DNA, 586 bp, Homo sapiens
  Payload ID: 1602
  Gene Symbol: ABCA2
  Gene Name: ATP-binding cassette, sub-family A (ABC1), member 2
  ENST ID: ENST00000470535
  CDS Start-End: 1-134
agggcgcaccctctgctgcagcactggccaccccggacacgctgcagggccagtgctcagccttcgtacagctctgggccggcctgcagcccatcttgtgtggcaacaaccggcgctgcggcggggcaacatgagctccctgggcttcacgagcaaggagcagcggaacctgggcctcctcgtgcacctcatgaccagcaaccccaaaatcctgtacgcgcctgcgggctctgaggtcgaccgcgtcatcctcaaggccaacgagacttttgcttttgtgggcaacgtgactcactatgcccaggtctggctcaacatctcggcggagatccgcagcttcctggagcagggcaggctgcagcaacacctgcgctggctgcagcagtatgtagcagagctgcggctgcaccccgaggcactgaacctgtcactggatgagctgccgccggccctgagacaggacaacttctcgctgcccagtggcatggccctcctgcagcagctggataccattgacaacgcggcctgcggctggatccagttcatgtccaaggtgagcgtggacatcttcaagggcttccccgac

SEQ ID NO: 110044 - DNA, 666 bp, Homo sapiens
  Payload ID: 1602
  Gene Symbol: ABCA2
  Gene Name: ATP-binding cassette, sub-family A (ABC1), member 2
  ENST ID: ENST00000490486
  CDS Start-End: 1-588
atcaagacagggcgttcagtggtgctgacatcacacagcatggaggagtgcgaggcgctgtgcacgcggctggccatcatggtgaacggtcgcctgcggtgcctgggcagcatccagcacctgaagaaccggtttggagatggctacatgatcacggtgcggaccaagagcagccagagtgtgaaggacgtggtgcggttcttcaaccgcaacttcccggaagccatgctcaaggagcggcaccacacaaaggtgcagtaccagctcaagtcggagcacatctcgctggcccaggtgttcagcaagatggagcaggtgtctggcgtgctgggcatcgaggactactcggtcagccagaccacactggacaatagtgacaacctggagcagcaggagacggagccgccatccgcactgcagtcccctctcggctgcttgctcagcctgctccggccccggtctgcccccacggagctccgggcacttgtggcagacgagcccgaggacctggacacggaggacgagggcctcatcagcttcgaggaggagcgggcccagctgtccttcaacacggacacgctctgctgaccacccagagctgggccagggaggacacgctccactgaccacccagagctgggccagggactcaacaatggggacaga

SEQ ID NO: 110045 - DNA, 8146 bp, Homo sapiens
  Payload ID: 1602
  Gene Symbol: ABCA2
  Gene Name: ATP-binding cassette, sub-family A (ABC1), member 2
  ENST ID: ENST00000614293
  CDS Start-End: 51-7451
agaaccgcctgatcccgaactccctgtgcagagaccagactcgcccgaatatggggagaaaaacgagccgcgtgcagcaggggccgcctcggtcccctgcctgctccgctcacggcgagcgttcctggggcctcgagtttccccccttccgctggctgctcggaatcgcgggacggacccacctggccgccctgcctcccttccagtgggtcctggccttcgagatcttcatccccctggtgctgttctttatcctgctggggctgcgacagaagaagcccaccatctccgtgaaggaagtcgccttctacacagcggcgcccctgacgtctgccggcatcctgcctgtcatgcaatcgctgtgcccggacggccagcgagacgagttcggcttcctgcagtacgccaactccacggtcacgcagctgcttgagcgcctggaccgcgtggtggaggaaggcaacctgtttgacccagcgcggcccagcctgggctcagagctcgaggccctacgccagcatctggaggccctcagtgcgggcccgggcacctcggggagccacctggacagatccacagtgtcttccttctctctggactcggtggccagaaacccgcaggagctctggcgtttcctgacgcaaaacttgtcgctgcccaatagcacggcccaagcactcttggccgcccgtgtggacccgcccgaggtctaccacctgctctttggtccctcatctgccctggattcacagtctggcctccacaagggtcaggagccctggagccgcctagggggcaatcccctgttccggatggaggagctgctgctggctcctgccctcctggagcagctcacctgcacgccgggctcgggggagctgggccggatcctcactgtgcctgagagtcagaagggagccctgcagggctaccgggatgctgtctgcagtgggcaggctgctgcgcgtgccaggcgcttctctgggctgtctgctgagctccggaaccagctggacgtggccaaggtctcccagcagctgggcctggatgcccccaacggctcggactcctcgccacaggcgccacccccacggaggctgcaggcgcttctgggggacctgctggatgcccagaaggttctgcaggatgtggatgtcctgtcggccctggccctgctactgccccagggtgcctgcactggccggacccccggacccccagccagtggtgcgggtggggcggccaatggcactggggcaggggcagtcatgggccccaacgccaccgctgaggagggcgcaccctctgctgcagcactggccaccccggacacgctgcagggccagtgctcagccttcgtacagctctgggccggcctgcagcccatcttgtgtggcaacaaccgcaccattgaacccgaggcgctgcggcggggcaacatgagctccctgggcttcacgagcaaggagcagcggaacctgggcctcctcgtgcacctcatgaccagcaaccccaaaatcctgtacgcgcctgcgggctctgaggtcgaccgcgtcatcctcaaggccaacgagacttttgcttttgtgggcaacgtgactcactatgcccaggtctggctcaacatctcggcggagatccgcagcttcctggagcagggcaggctgcagcaacacctgcgctggctgcagcagtatgtagcagagctgcggctgcaccccgaggcactgaacctgtcactggatgagctgccgccggccctgagacaggacaacttctcgctgcccagtggcatggccctcctgcagcagctggataccattgacaacgcggcctgcggctggatccagttcatgtccaaggtgagcgtggacatcttcaagggcttccccgacgaggagagcattgtcaactacaccctcaaccaggcctaccaggacaacgtcactgtttttgccagtgtgatcttccagacccggaaggacggctcgctcccgcctcacgtgcactacaagatccgccagaactccagcttcaccgagaaaaccaacgagatccgccgcgcctactggcggcctgggcccaatactggcggccgcttctacttcctctacggcttcgtctggatccaggacatgatggagcgcgccatcatcgacacttttgtggggcacgatgtggtggagccaggcagctacgtgcagatgttcccctacccctgctacacacgcgatgacttcctgtttgtcattgagcacatgatgccgctgtgcatggtgatctcctgggtctactccgtggccatgaccatccagcacatcgtggcggagaaggagcaccggctcaaggaggtgatgaagaccatgggcctgaacaacgcggtgcactgggtggcctggttcatcaccggctttgtgcagctgtccatctccgtgacagcactcaccgccatcctgaagtacggccaggtgcttatgcacagccacgtggtcatcatctggctcttcctggcagtctacgcggtggccaccatcatgttctgcttcctggtgtctgtgctgtactccaaggccaagctggcctcggcctgcggtggcatcatctacttcctgagctacgtgccctacatgtacgtggcgatccgagaggaggtggcgcatgataagatcacggccttcgagaagtgcatcgcgtccctcatgtccacgacggcctttggtctgggctctaagtacttcgcgctgtatgaggtggccggcgtgggcatccagtggcacaccttcagccagtccccggtggagggggacgacttcaacttgctcctggctgtcaccatgctgatggtggacgccgtggtctatggcatcctcacgtggtacattgaggctgtgcacccaggcatgtacgggctgccccggccctggtacttcccactgcagaagtcctactggctgggcagtgggcggacagaagcctgggagtggagctggccgtgggcacgcaccccccgcctcagtgtcatggaggaggaccaggcctgtgccatggagagccggcgctttgaggagacccgtggcatggaggaggagcccacccacctgcctctggttgtctgcgtggacaaactcaccaaggtctacaaggacgacaagaagctggccctgaacaagctgagcctgaacctctacgagaaccaggtggtctccttcttgggccacaacggggcgggcaagaccaccaccatgtccatcctgaccggcctgttccctccaacgtcgggttccgccaccatctacgggcacgacatccgcacggagatggatgagatccgcaagaacctgggcatgtgcccgcagcacaatgtgctctttgaccggctcacggtggaggaacacctctggttctactcacggctcaagagcatggctcaggaggagatccgcagagagatggacaagatgatcgaggacctggagctctccaacaaacggcactcactggtgcagacattgtcgggtggcatgaagcgcaagctgtccgtggccatcgccttcgtgggcggctctcgcgccatcatcctggacgagcccacggcgggcgtggacccctacgcgcgccgcgccatctgggacctcatcctgaagtacaagccaggccgcaccatccttctgtccacccaccacatggatgaggctgacctgcttggggaccgcattgccatcatctcccatgggaagctcaagtgctgcggctccccgctcttcctcaagggcacctatggcgacgggtaccgcctcacgctggtcaagcggcccgccgagccggggggcccccaagagccagggctggcatccagccccccaggtcgggccccgctgagcagctgctccgagctccaggtgtcccagttcatccgcaagcatgtggcctcctgcctgctggtctcagacacaagcacggagctctcctacatcctgcccagcgaggccgccaagaagggggctttcgagcgcctcttccagcacctggagcgcagcctggatgcactgcacctcagcagcttcgggctgatggacacgaccctggaggaagtgttcctcaaggtgtcggaggaggatcagtcgctggagaacagtgaggccgatgtgaaggagtccaggaaggatgtgctccctggggcggagggcccggcgtctggggagggtcacgctggcaatctggcccggtgctcggagctgacccagtcgcaggcatcgctgcagtcggcgtcatctgtgggctctgcccgtggcgacgagggagctggctacaccgacgtctatggcgactaccgccccctctttgataacccacaggacccagacaatgtcagcctgcaagaggtggaggcagaggccctgtcgagggtcggccagggcagccgcaagctggacggcgggtggctgaaggtgcgccagttccacgggctgctggtcaaacgcttccactgcgcccgccgcaactccaaggcactcttctcccagatcttgctgccagccttcttcgtctgcgtggccatgaccgtggccctgtccgtcccggagattggtgatctgcccccgctggtcctgtcaccttcccagtaccacaactacacccagccccgtggcaatttcatcccctacgccaacgaggagcgccgcgagtaccggctgcggctatcgcccgacgccagcccccagcagctcgtgagcacgttccggctgccgtcgggggtgggtgccacctgcgtgctcaagtctcccgccaacggctcgctggggcccacgttgaacctgagcagcggggagtcgcgcctgctggcggctcggttcttcgacagcatgtgtctggagtccttcacacaggggctgccactgtccaatttcgtgccacccccaccctcgcccgccccatctgactcgccagcgtccccggatgaggacctgcaggcctggaacgtctccctgccgcccaccgctgggccagaaatgtggacgtcggcaccctccctgccgcgcctggtacgggagcccgtccgctgcacctgctctgcgcagggcaccggcttctcctgccccagcagtgtgggcgggcacccgccccagatgcgggtggtcacaggcgacatcctgaccgacatcaccggccacaatgtctctgagtacctgctcttcacctccgaccgcttccgactgcaccggtatggggccatcacctttggaaacgtcctgaagtccatcccagcctcatttggcaccagggccccacccatggtgcggaagatcgcggtgcgcagggctgcccaggttttctacaacaacaagggctatcacagcatgcccacctacctcaacagcctcaacaacgccatcctgcgtgccaacctgcccaagagcaagggcaacccggcggcttacggcatcaccgtcaccaaccaccccatgaataagaccagcgccagcctctccctggattacctgctgcagggcacggatgtcgtcatcgccatcttcatcatcgtggccatgtccttcgtgccggccagcttcgttgtcttcctcgtggccgagaagtccaccaaggccaagcacctgcagtttgtcagcggctgcaaccccatcatctactggctggcgaactacgtgtgggacatgctcaactacctggtccccgctacctgctgtgtcatcatcctgtttgtgttcgacctgccggcctacacgtcgcccaccaacttccctgccgtcctctccctcttcctgctctatgggtggtccatcacgcccatcatgtacccggcctccttctggttcgaggtccccagctccgcctacgtgttcctcattgtcatcaatctcttcatcggcatcaccgccaccgtggccaccttcctgctacagctcttcgagcacgacaaggacctgaaggttgtcaacagttacctgaaaagctgcttcctcattttccccaactacaacctgggccacgggctcatggagatggcctacaacgagtacatcaacgagtactacgccaagattggccagtttgacaagatgaagtccccgttcgagtgggacattgtcacccgcggactggtggccatggcggttgagggcgtcgtgggcttcctcctgaccatcatgtgccagtacaacttcctgcggcggccacagcgcatgcctgtgtctaccaagcctgtggaggatgatgtggacgtggccagtgagcggcagcgagtgctccggggagacgccgacaatgacatggtcaagattgagaacctgaccaaggtctacaagtcccggaagattggccgtatcctggccgttgaccgcctgtgcctgggtgtgcgtcctggcgagtgcttcgggctcctgggcgtcaacggtgcgggcaagaccagcaccttcaagatgctgaccggcgacgagagcacgacggggggcgaggccttcgtcaatggacacagcgtgctgaaggagctgctccaggtgcagcagagcctcggctactgcccgcagtgtgacgcgctgttcgacgagctcacggcccgggagcacctgcagctgtacacgcggctgcgtgggatctcctggaaggacgaggcccgggtggtgaagtgggctctggagaagctggagctgaccaagtacgcagacaagccggctggcacctacagcggcggcaacaagcggaagctctccacggccatcgccctcattgggtacccagccttcatcttcctggacgagcccaccacaggcatggaccccaaggcccggcgcttcctctggaacctcatccttgacctcatcaagacagggcgttcagtggtgctgacatcacacagcatggaggagtgcgaggcgctgtgcacgcggctggccatcatggtgaacggtcgcctgcggtgcctgggcagcatccagcacctgaagaaccggtttggagatggctacatgatcacggtgcggaccaagagcagccagagtgtgaaggacgtggtgcggttcttcaaccgcaacttcccggaagccatgctcaaggagcggcaccacacaaaggtgcagtaccagctcaagtcggagcacatctcgctggcccaggtgttcagcaagatggagcaggtgtctggcgtgctgggcatcgaggactactcggtcagccagaccacactggacaatgtgttcgtgaactttgccaagaagcagagtgacaacctggagcagcaggagacggagccgccatccgcactgcagtcccctctcggctgcttgctcagcctgctccggccccggtctgcccccacggagctccgggcacttgtggcagacgagcccgaggacctggacacggaggacgagggcctcatcagcttcgaggaggagcgggcccagctgtccttcaacacggacacgctctgctgaccacccagagctgggccagggaggacacgctccactgaccacccagagctgggccagggactcaacaatggggacagaagtcccccagtgcctgccagggcctggagtggaggttcaggaccaaggggcttctggtcctccagcccctgtactcggccatgccctgtggtcactgcggttgccgcccctaattgtgccaaaggctgacccggcccgggctgcgtacacccttgccctgctttgccttaaagcctcggggtctgcccggcccctcgcccctgcctggcactgctcaccgcccaaggcgacgccggctggaccaggcactgctggcctttctcctgcccggcctcggaaccagcttttctctcttacgatgaaggctgatgccgagagcgggctgtgggcggagctgggtcagtcccgtatttattttgctttgagaagaggctcctctggccctgctctcctgcagggaggtggctgtcctgcgggaagccatcagcttgggccagctggcaggtggcaggaatggagaagctgaccctgctggccaggcaaggggccagaccccccccaacccccagctgccatcgctctcccacccagcttggccccctgcccgcccacctccctgggagccgggcctgtacatagcgcacagatgtttgttttaaataaataaacaaaatgtc

SEQ ID NO: 110046 - DNA, 371 bp, Homo sapiens
  Payload ID: 1602
  Gene Symbol: ABCA2
  Gene Name: ATP-binding cassette, sub-family A (ABC1), member 2
  ENST ID: ENST00000625103
  CDS Start-End: 7-371
ccgaatatggggagaaaaacgagccgcgtgcagcaggggccgcctcggtcccctgcctgctccgctcacggcgagcgttcctggggcctcgagtttccccccttccgctggctgctcggaatcgcgggacggacccacctggccgccctgcctcccttccagtgggtcctggccttcgagatcttcatccccctggtgctgttctttatcctgctggggctgcgacagaagaagcccaccatctccgtgaaggaagtctccttctacacagcggcgcccctgacgtctgccggcatcctgcctgtcatgcaatcgctgtgcccggacggccagcgagacgagttcggcttcctgcagtacgccaactccac

SEQ ID NO: 110047 - DNA, 6609 bp, Homo sapiens
  Payload ID: 1603
  Gene Symbol: ABCA3
  Gene Name: ATP-binding cassette, sub-family A (ABC1), member 3
  Uniprot ID: Q99758
  ENST ID: ENST00000301732
  CDS Start-End: 702-5816
gtccgccagtagcgggttgcaggcgcaccctcccctccagggcggccacgcagctgtcagtgccgccgccactgcgaggctggagcggagcccgggtggccgagggaggggaccccgcgagagggccgcgcgccggccgccgccgccccggcgcccaggctcggtgctggagagtcatgcctgtgagccctgggcacctcctgatgtcctgcgaggtcacggtgttcccaaacctcagggttgccctgccccactccagaggctctcaggccccaccccggagccctctgtgcggagccgcctcctcctggccagttccccagtagtcctgaagggagacctgctgtgtggagcctcttctgggacccagccatgagtgtggagctgagcaactgaacctgaaactcttccactgtgagtcaaggaggcttttccgcacatgaaggacgctgagcgggaaggactcctctctgcctgcagttgtagcgagtggaccagcaccaggggctctctagactgcccctcctccatcgccttccctgcctctccaggacagagcagccacgtctgcacacctcgccctctttacactcagttttcagagcacgtttctcctatttcctgcgggttgcagcgcctacttgaacttactcagaccacctacttctctagcagcactgggcgtccctttcagcaagacgatggctgtgctcaggcagctggcgctcctcctctggaagaactacaccctgcagaagcggaaggtcctggtgacggtcctggaactcttcctgccattgctgttttctgggatcctcatctggctccgcttgaagattcagtcggaaaatgtgcccaacgccaccatctacccgggccagtccatccaggagctgcctctgttcttcaccttccctccgccaggagacacctgggagcttgcctacatcccttctcacagtgacgctgccaagaccgtcactgagacagtgcgcagggcacttgtgatcaacatgcgagtgcgcggctttccctccgagaaggactttgaggactacattaggtacgacaactgctcgtccagcgtgctggccgccgtggtcttcgagcaccccttcaaccacagcaaggagcccctgccgctggcggtgaaatatcacctacggttcagttacacacggagaaattacatgtggacccaaacaggctcctttttcctgaaagagacagaaggctggcacactacttcccttttcccgcttttcccaaacccaggaccaagggaacctacatcccctgatggcggagaacctgggtacatccgggaaggcttcctggccgtgcagcatgctgtggaccgggccatcatggagtaccatgccgatgccgccacacgccagctgttccagagactgacggtgaccatcaagaggttcccgtacccgccgttcatcgcagaccccttcctcgtggccatccagtaccagctgcccctgctgctgctgctcagcttcacctacaccgcgctcaccattgcccgtgctgtcgtgcaggagaaggaaaggaggctgaaggagtacatgcgcatgatggggctcagcagctggctgcactggagtgcctggttcctcttgttcttcctcttcctcctcatcgccgcctccttcatgaccctgctcttctgtgtcaaggtgaagccaaatgtagccgtgctgtcccgcagcgacccctccctggtgctcgccttcctgctgtgcttcgccatctctaccatctccttcagcttcatggtcagcaccttcttcagcaaagccaacatggcagcagccttcggaggcttcctctacttcttcacctacatcccctacttcttcgtggcccctcggtacaactggatgactctgagccagaagctctgctcctgcctcctgtctaatgtcgccatggcaatgggagcccagctcattgggaaatttgaggcgaaaggcatgggcatccagtggcgagacctcctgagtcccgtcaacgtggacgacgacttctgcttcgggcaggtgctggggatgctgctgctggactctgtgctctatggcctggtgacctggtacatggaggccgtcttcccagggcagttcggcgtgcctcagccctggtacttcttcatcatgccctcctattggtgtgggaagccaagggcggttgcagggaaggaggaagaagacagtgaccccgagaaagcactcagaaacgagtactttgaagccgagccagaggacctggtggcggggatcaagatcaagcacctgtccaaggtgttcagggtgggaaataaggacagggcggccgtcagagacctgaacctcaacctgtacgagggacagatcaccgtcctgctgggccacaacggtgccgggaagaccaccaccctctccatgctcacaggtctctttccccccaccagtggacgggcatacatcagcgggtatgaaatttcccaggacatggttcagatccggaagagcctgggcctgtgcccgcagcacgacatcctgtttgacaacttgacagtcgcagagcacctttatttctacgcccagctgaagggcctgtcacgtcagaagtgccctgaagaagtcaagcagatgctgcacatcatcggcctggaggacaagtggaactcacggagccgcttcctgagcgggggcatgaggcgcaagctctccatcggcatcgccctcatcgcaggctccaaggtgctgatactggacgagcccacctcgggcatggacgccatctccaggagggccatctgggatcttcttcagcggcagaaaagtgaccgcaccatcgtgctgaccacccacttcatggacgaggctgacctgctgggagaccgcatcgccatcatggccaagggggagctgcagtgctgcgggtcctcgctgttcctcaagcagaaatacggtgccggctatcacatgacgctggtgaaggagccgcactgcaacccggaagacatctcccagctggtccaccaccacgtgcccaacgccacgctggagagcagcgctggggccgagctgtctttcatccttcccagagagagcacgcacaggtttgaaggtctctttgctaaactggagaagaagcagaaagagctgggcattgccagctttggggcatccatcaccaccatggaggaagtcttccttcgggtcgggaagctggtggacagcagtatggacatccaggccatccagctccctgccctgcagtaccagcacgagaggcgcgccagcgactgggctgtggacagcaacctctgtggggccatggacccctccgacggcattggagccctcatcgaggaggagcgcaccgctgtcaagctcaacactgggctcgccctgcactgccagcaattctgggccatgttcctgaagaaggccgcatacagctggcgcgagtggaaaatggtggcggcacaggtcctggtgcctctgacctgcgtcaccctggccctcctggccatcaactactcctcggagctcttcgacgaccccatgctgaggctgaccttgggcgagtacggcagaaccgtcgtgcccttctcagttcccgggacctcccagctgggtcagcagctgtcagagcatctgaaagacgcactgcaggctgagggacaggagccccgcgaggtgctcggtgacctggaggagttcttgatcttcagggcttctgtggaggggggcggctttaatgagcggtgccttgtggcagcgtccttcagagatgtgggagagcgcacggtcgtcaacgccttgttcaacaaccaggcgtaccactctccagccactgccctggccgtcgtggacaaccttctgttcaagctgctgtgcgggcctcacgcctccattgtggtctccaacttcccccagccccggagcgccctgcaggctgccaaggaccagtttaacgagggccggaagggattcgacattgccctcaacctgctcttcgccatggcattcttggccagcacgttctccatcctggcggtcagcgagagggccgtgcaggccaagcatgtgcagtttgtgagtggagtccacgtggccagtttctggctctctgctctgctgtgggacctcatctccttcctcatccccagtctgctgctgctggtggtgtttaaggccttcgacgtgcgtgccttcacgcgggacggccacatggctgacaccctgctgctgctcctgctctacggctgggccatcatccccctcatgtacctgatgaacttcttcttcttgggggcggccactgcctacacgaggctgaccatcttcaacatcctgtcaggcatcgccaccttcctgatggtcaccatcatgcgcatcccagctgtaaaactggaagaactttccaaaaccctggatcacgtgttcctggtgctgcccaaccactgtctggggatggcagtcagcagtttctacgagaactacgagacgcggaggtactgcacctcctccgaggtcgccgcccactactgcaagaaatataacatccagtaccaggagaacttctatgcctggagcgccccgggggtcggccggtttgtggcctccatggccgcctcagggtgcgcctacctcatcctgctcttcctcatcgagaccaacctgcttcagagactcaggggcatcctctgcgccctccggaggaggcggacactgacagaattatacacccggatgcctgtgcttcctgaggaccaagatgtagcggacgagaggacccgcatcctggcccccagtccggactccctgctccacacacctctgattatcaaggagctctccaaggtgtacgagcagcgggtgcccctcctggccgtggacaggctctccctcgcggtgcagaaaggggagtgcttcggcctgctgggcttcaatggagccgggaagaccacgactttcaaaatgctgaccggggaggagagcctcacttctggggatgcctttgtcgggggtcacagaatcagctctgatgtcggaaaggtgcggcagcggatcggctactgcccgcagtttgatgccttgctggaccacatgacaggccgggagatgctggtcatgtacgctcggctccggggcatccctgagcgccacatcggggcctgcgtggagaacactctgcggggcctgctgctggagccacatgccaacaagctggtcaggacgtacagtggtggtaacaagcggaagctgagcaccggcatcgccctgatcggagagcctgctgtcatcttcctggacgagccgtccactggcatggaccccgtggcccggcgcctgctttgggacaccgtggcacgagcccgagagtctggcaaggccatcatcatcacctcccacagcatggaggagtgtgaggccctgtgcacccggctggccatcatggtgcaggggcagttcaagtgcctgggcagcccccagcacctcaagagcaagttcggcagcggctactccctgcgggccaaggtgcagagtgaagggcaacaggaggcgctggaggagttcaaggccttcgtggacctgacctttccaggcagcgtcctggaagatgagcaccaaggcatggtccattaccacctgccgggccgtgacctcagctgggcgaaggttttcggtattctggagaaagccaaggaaaagtacggcgtggacgactactccgtgagccagatctcgctggaacaggtcttcctgagcttcgcccacctgcagccgcccaccgcagaggaggggcgatgaggggtggcggctgtctcgccatcaggcagggacaggacgggcaagcagggcccatcttacatcctctctctccaagtttatctcatcctttatttttaatcacttttttctatgatggatatgaaaaattcaaggcagtatgcacagaatggacgagtgcagcccagccctcatgcccaggatcagcatgcgcatctccatgtctgcatactctggagttcactttcccagagctggggcaggccgggcagtctgcgggcaagctccggggtctctgggtggagagctgacccaggaagggctgcagctgagctgggggttgaatttctccaggcactccctggagagaggacccagtgacttgtccaagtttacacacgacactaatctcccctggggaggaagcgggaagccagccaggttgaactgtagcgaggcccccaggccgccaggaatggaccatgcagatcactgtcagtggagggaagctgctgactgtgattaggtgctggggtcttagcgtccagcgcagcccgggggcatcctggaggctctgctccttagggcatggtagtcaccgcgaagccgggcaccgtcccacagcatctcctagaagcagccggcacaggagggaaggtggccaggctcgaagcagtctctgtttccagcactgcaccctcaggaagtcgcccgccccaggacacgcagggaccaccctaagggctgggtggctgtctcaaggacacattgaatacgttgtgaccatccagaaaataaatgctgaggggacaca

SEQ ID NO: 110048 - DNA, 6446 bp, Homo sapiens
  Payload ID: 1603
  Gene Symbol: ABCA3
  Gene Name: ATP-binding cassette, sub-family A (ABC1), member 3
  ENST ID: ENST00000382381
  CDS Start-End: 713-5653
gcggccgctgcgtccgccagtagcgggttgcaggcgcaccctcccctccagggcggccacgcagctgtcagtgccgccgccactgcgaggctggagcggagcccgggtggccgagggaggggaccccgcgagagggccgcgcgccggccgccgccgccccggcgcccaggctcggtgctggagagtcatgcctgtgagccctgggcacctcctgatgtcctgcgaggtcacggtgttcccaaacctcagggttgccctgccccactccagaggctctcaggccccaccccggagccctctgtgcggagccgcctcctcctggccagttccccagtagtcctgaagggagacctgctgtgtggagcctcttctgggacccagccatgagtgtggagctgagcaactgaacctgaaactcttccactgtgagtcaaggaggcttttccgcacatgaaggacgctgagcgggaaggactcctctctgcctgcagttgtagcgagtggaccagcaccaggggctctctagactgcccctcctccatcgccttccctgcctctccaggacagagcagccacgtctgcacacctcgccctctttacactcagttttcagagcacgtttctcctatttcctgcgggttgcagcgcctacttgaacttactcagaccacctacttctctagcagcactgggcgtccctttcagcaagacgatggctgtgctcaggcagctggcgctcctcctctggaagaactacaccctgcagaagcggaaggtcctggtgacggtcctggaactcttcctgccattgctgttttctgggatcctcatctggctccgcttgaagattcagtcggaaaatgtgcccaacgccaccatctacccgggccagtccatccaggagctgcctctgttcttcaccttccctccgccaggagacacctgggagcttgcctacatcccttctcacagtgacgctgccaagaccgtcactgagacagtgcgcagggcacttgtgatcaacatgcgagtgcgcggctttccctccgagaaggactttgaggactacattaggtacgacaactgctcgtccagcgtgctggccgccgtggtcttcgagcaccccttcaaccacagcaaggagcccctgccgctggcggtgaaatatcacctacggttcagttacacacggagaaattacatgtggacccaaacaggctcctttttcctgaaagagacagaaggctggcacactacttcccttttcccgcttttcccaaacccaggaccaagggaacctacatcccctgatggcggagaacctgggtacatccgggaaggcttcctggccgtgcagcatgctgtggaccgggccatcatggagtaccatgccgatgccgccacacgccagctgttccagagactgacggtgaccatcaagaggttcccgtacccgccgttcatcgcagaccccttcctcgtggccatccagtaccagctgcccctgctgctgctgctcagcttcacctacaccgcgctcaccattgcccgtgctgtcgtgcaggagaaggaaaggaggctgaaggagtacatgcgcatgatggggctcagcagctggctgcactggagtgcctggttcctcttgttcttcctcttcctcctcatcgccgcctccttcatgaccctgctcttctgtgtcaaggtgaagccaaatgtagccgtgctgtcccgcagcgacccctccctggtgctcgccttcctgctgtgcttcgccatctctaccatctccttcagcttcatggtcagcaccttcttcagcaaaggcatgggcatccagtggcgagacctcctgagtcccgtcaacgtggacgacgacttctgcttcgggcaggtgctggggatgctgctgctggactctgtgctctatggcctggtgacctggtacatggaggccgtcttcccagggcagttcggcgtgcctcagccctggtacttcttcatcatgccctcctattggtgtgggaagccaagggcggttgcagggaaggaggaagaagacagtgaccccgagaaagcactcagaaacgagtactttgaagccgagccagaggacctggtggcggggatcaagatcaagcacctgtccaaggtgttcagggtgggaaataaggacagggcggccgtcagagacctgaacctcaacctgtacgagggacagatcaccgtcctgctgggccacaacggtgccgggaagaccaccaccctctccatgctcacaggtctctttccccccaccagtggacgggcatacatcagcgggtatgaaatttcccaggacatggttcagatccggaagagcctgggcctgtgcccgcagcacgacatcctgtttgacaacttgacagtcgcagagcacctttatttctacgcccagctgaagggcctgtcacgtcagaagtgccctgaagaagtcaagcagatgctgcacatcatcggcctggaggacaagtggaactcacggagccgcttcctgagcgggggcatgaggcgcaagctctccatcggcatcgccctcatcgcaggctccaaggtgctgatactggacgagcccacctcgggcatggacgccatctccaggagggccatctgggatcttcttcagcggcagaaaagtgaccgcaccatcgtgctgaccacccacttcatggacgaggctgacctgctgggagaccgcatcgccatcatggccaagggggagctgcagtgctgcgggtcctcgctgttcctcaagcagaaatacggtgccggctatcacatgacgctggtgaaggagccgcactgcaacccggaagacatctcccagctggtccaccaccacgtgcccaacgccacgctggagagcagcgctggggccgagctgtctttcatccttcccagagagagcacgcacaggtttgaaggtctctttgctaaactggagaagaagcagaaagagctgggcattgccagctttggggcatccatcaccaccatggaggaagtcttccttcgggtcgggaagctggtggacagcagtatggacatccaggccatccagctccctgccctgcagtaccagcacgagaggcgcgccagcgactgggctgtggacagcaacctctgtggggccatggacccctccgacggcattggagccctcatcgaggaggagcgcaccgctgtcaagctcaacactgggctcgccctgcactgccagcaattctgggccatgttcctgaagaaggccgcatacagctggcgcgagtggaaaatggtggcggcacaggtcctggtgcctctgacctgcgtcaccctggccctcctggccatcaactactcctcggagctcttcgacgaccccatgctgaggctgaccttgggcgagtacggcagaaccgtcgtgcccttctcagttcccgggacctcccagctgggtcagcagctgtcagagcatctgaaagacgcactgcaggctgagggacaggagccccgcgaggtgctcggtgacctggaggagttcttgatcttcagggcttctgtggaggggggcggctttaatgagcggtgccttgtggcagcgtccttcagagatgtgggagagcgcacggtcgtcaacgccttgttcaacaaccaggcgtaccactctccagccactgccctggccgtcgtggacaaccttctgttcaagctgctgtgcgggcctcacgcctccattgtggtctccaacttcccccagccccggagcgccctgcaggctgccaaggaccagtttaacgagggccggaagggattcgacattgccctcaacctgctcttcgccatggcattcttggccagcacgttctccatcctggcggtcagcgagagggccgtgcaggccaagcatgtgcagtttgtgagtggagtccacgtggccagtttctggctctctgctctgctgtgggacctcatctccttcctcatccccagtctgctgctgctggtggtgtttaaggccttcgacgtgcgtgccttcacgcgggacggccacatggctgacaccctgctgctgctcctgctctacggctgggccatcatccccctcatgtacctgatgaacttcttcttcttgggggcggccactgcctacacgaggctgaccatcttcaacatcctgtcaggcatcgccaccttcctgatggtcaccatcatgcgcatcccagctgtaaaactggaagaactttccaaaaccctggatcacgtgttcctggtgctgcccaaccactgtctggggatggcagtcagcagtttctacgagaactacgagacgcggaggtactgcacctcctccgaggtcgccgcccactactgcaagaaatataacatccagtaccaggagaacttctatgcctggagcgccccgggggtcggccggtttgtggcctccatggccgcctcagggtgcgcctacctcatcctgctcttcctcatcgagaccaacctgcttcagagactcaggggcatcctctgcgccctccggaggaggcggacactgacagaattatacacccggatgcctgtgcttcctgaggaccaagatgtagcggacgagaggacccgcatcctggcccccagtccggactccctgctccacacacctctgattatcaaggagctctccaaggtgtacgagcagcgggtgcccctcctggccgtggacaggctctccctcgcggtgcagaaaggggagtgcttcggcctgctgggcttcaatggagccgggaagaccacgactttcaaaatgctgaccggggaggagagcctcacttctggggatgcctttgtcgggggtcacagaatcagctctgatgtcggaaaggtgcggcagcggatcggctactgcccgcagtttgatgccttgctggaccacatgacaggccgggagatgctggtcatgtacgctcggctccggggcatccctgagcgccacatcggggcctgcgtggagaacactctgcggggcctgctgctggagccacatgccaacaagctggtcaggacgtacagtggtggtaacaagcggaagctgagcaccggcatcgccctgatcggagagcctgctgtcatcttcctggacgagccgtccactggcatggaccccgtggcccggcgcctgctttgggacaccgtggcacgagcccgagagtctggcaaggccatcatcatcacctcccacagcatggaggagtgtgaggccctgtgcacccggctggccatcatggtgcaggggcagttcaagtgcctgggcagcccccagcacctcaagagcaagttcggcagcggctactccctgcgggccaaggtgcagagtgaagggcaacaggaggcgctggaggagttcaaggccttcgtggacctgacctttccaggcagcgtcctggaagatgagcaccaaggcatggtccattaccacctgccgggccgtgacctcagctgggcgaaggttttcggtattctggagaaagccaaggaaaagtacggcgtggacgactactccgtgagccagatctcgctggaacaggtcttcctgagcttcgcccacctgcagccgcccaccgcagaggaggggcgatgaggggtggcggctgtctcgccatcaggcagggacaggacgggcaagcagggcccatcttacatcctctctctccaagtttatctcatcctttatttttaatcacttttttctatgatggatatgaaaaattcaaggcagtatgcacagaatggacgagtgcagcccagccctcatgcccaggatcagcatgcgcatctccatgtctgcatactctggagttcactttcccagagctggggcaggccgggcagtctgcgggcaagctccggggtctctgggtggagagctgacccaggaagggctgcagctgagctgggggttgaatttctccaggcactccctggagagaggacccagtgacttgtccaagtttacacacgacactaatctcccctggggaggaagcgggaagccagccaggttgaactgtagcgaggcccccaggccgccaggaatggaccatgcagatcactgtcagtggagggaagctgctgactgtgattaggtgctggggtcttagcgtccagcgcagcccgggggcatcctggaggctctgctccttagggcatggtagtcaccgcgaagccgggcaccgtcccacagcatctcctagaagcagccggcacaggagggaaggtggccaggctcgaagcagtctctgtttccagcactgcaccctcaggaagtcgcccgccccaggacacgcagggaccaccctaagggctgggtggctgtctcaaggacacattgaatacgttgtgaccatccagaaaataaatgctgaggggacaca

SEQ ID NO: 110049 - DNA, 1205 bp, Homo sapiens
  Payload ID: 1603
  Gene Symbol: ABCA3
  Gene Name: ATP-binding cassette, sub-family A (ABC1), member 3
  Uniprot ID: Q99758
  ENST ID: ENST00000567910
  CDS Start-End: 409-1038
ggagccgcctcctcctggccagttccccagtagtcctgaagggagacctgctgtgtggagcctcttctgggacccagccatgagtgtggagctgagcaactgaacctgaaactcttccactgtgagtcaaggaggcttttccgcacatgaaggacgctgagcgggaaggactcctctctgcctgcagttgtagcgagtggaccagcaccaggggctctctagactgcccctcctccatcgccttccctgcctctccaggacagagcagccacgtctgcacacctcgccctctttacactcagttttcagagcacgtttctcctatttcctgcgggttgcagcgcctacttgaacttactcagaccacctacttctctagcagcactgggcgtccctttcagcaagacgatggctgtgctcaggcagctggcgctcctcctctggaagaactacaccctgcagaagcggaaggtcctggtgacggtcctggaactcttcctgccattgctgttttctgggatcctcatctggctccgcttgaagattcagtcggaaaatgtgcccaacgccaccatctacccgggccagtccatccaggagctgcctctgttcttcaccttccctccgccaggagacacctgggagcttgcctacatcccttctcacagtgacgctgccaagaccgtcactgagacagtgcgcagggcacttgtgatcaacatgcgagtgcgcggctttccctccgagaaggactttgaggactacattaggtacgacaactgctcgtccagcgtgctggccgccgtggtcttcgagcaccccttcaaccacagcaaggagcccctgccgctggcggtgaaatatcacctacggttcagttacacacggagaaattacatgtggacccaaacaggctcctttttcctgaaagagacagaaggctggcacactacttcccttttcccgcttttcccaaacccaggaccaagggaacctacatcccctgatggcggagaacctggtgagaagctcggttagggttcgtgttaccagcccgggctgttgactagtgacagtcatatgggggcagccccactttgcaaaagtatttcttgaagaaatacttttcaggacatttggcttggttccaagtctttgctgttgtgaatagtgccgcaataaacatacgtgtgcatgtgtcctta

SEQ ID NO: 110050 - DNA, 7309 bp, Homo sapiens
  Payload ID: 1604
  Gene Symbol: ABCA4
  Gene Name: ATP-binding cassette, sub-family A (ABC1), member 4
  Uniprot ID: P78363
  ENST ID: ENST00000370225
  CDS Start-End: 88-6909
gccagaggcgctcttaacggcgtttatgtcctttgctgtctgaggggcctcagctctgaccaatctggtcttcgtgtggtcattagcatgggcttcgtgagacagatacagcttttgctctggaagaactggaccctgcggaaaaggcaaaagattcgctttgtggtggaactcgtgtggcctttatctttatttctggtcttgatctggttaaggaatgccaacccactctacagccatcatgaatgccatttccccaacaaggcgatgccctcagcaggaatgctgccgtggctccaggggatcttctgcaatgtgaacaatccctgttttcaaagccccaccccaggagaatctcctggaattgtgtcaaactataacaactccatcttggcaagggtatatcgagattttcaagaactcctcatgaatgcaccagagagccagcaccttggccgtatttggacagagctacacatcttgtcccaattcatggacaccctccggactcacccggagagaattgcaggaagaggaatacgaataagggatatcttgaaagatgaagaaacactgacactatttctcattaaaaacatcggcctgtctgactcagtggtctaccttctgatcaactctcaagtccgtccagagcagttcgctcatggagtcccggacctggcgctgaaggacatcgcctgcagcgaggccctcctggagcgcttcatcatcttcagccagagacgcggggcaaagacggtgcgctatgccctgtgctccctctcccagggcaccctacagtggatagaagacactctgtatgccaacgtggacttcttcaagctcttccgtgtgcttcccacactcctagacagccgttctcaaggtatcaatctgagatcttggggaggaatattatctgatatgtcaccaagaattcaagagtttatccatcggccgagtatgcaggacttgctgtgggtgaccaggcccctcatgcagaatggtggtccagagacctttacaaagctgatgggcatcctgtctgacctcctgtgtggctaccccgagggaggtggctctcgggtgctctccttcaactggtatgaagacaataactataaggcctttctggggattgactccacaaggaaggatcctatctattcttatgacagaagaacaacatccttttgtaatgcattgatccagagcctggagtcaaatcctttaaccaaaatcgcttggagggcggcaaagcctttgctgatgggaaaaatcctgtacactcctgattcacctgcagcacgaaggatactgaagaatgccaactcaacttttgaagaactggaacacgttaggaagttggtcaaagcctgggaagaagtagggccccagatctggtacttctttgacaacagcacacagatgaacatgatcagagataccctggggaacccaacagtaaaagactttttgaataggcagcttggtgaagaaggtattactgctgaagccatcctaaacttcctctacaagggccctcgggaaagccaggctgacgacatggccaacttcgactggagggacatatttaacatcactgatcgcaccctccgcctggtcaatcaatacctggagtgcttggtcctggataagtttgaaagctacaatgatgaaactcagctcacccaacgtgccctctctctactggaggaaaacatgttctgggccggagtggtattccctgacatgtatccctggaccagctctctaccaccccacgtgaagtataagatccgaatggacatagacgtggtggagaaaaccaataagattaaagacaggtattgggattctggtcccagagctgatcccgtggaagatttccggtacatctggggcgggtttgcctatctgcaggacatggttgaacaggggatcacaaggagccaggtgcaggcggaggctccagttggaatctacctccagcagatgccctacccctgcttcgtggacgattctttcatgatcatcctgaaccgctgtttccctatcttcatggtgctggcatggatctactctgtctccatgactgtgaagagcatcgtcttggagaaggagttgcgactgaaggagaccttgaaaaatcagggtgtctccaatgcagtgatttggtgtacctggttcctggacagcttctccatcatgtcgatgagcatcttcctcctgacgatattcatcatgcatggaagaatcctacattacagcgacccattcatcctcttcctgttcttgttggctttctccactgccaccatcatgctgtgctttctgctcagcaccttcttctccaaggccagtctggcagcagcctgtagtggtgtcatctatttcaccctctacctgccacacatcctgtgcttcgcctggcaggaccgcatgaccgctgagctgaagaaggctgtgagcttactgtctccggtggcatttggatttggcactgagtacctggttcgctttgaagagcaaggcctggggctgcagtggagcaacatcgggaacagtcccacggaaggggacgaattcagcttcctgctgtccatgcagatgatgctccttgatgctgctgtctatggcttactcgcttggtaccttgatcaggtgtttccaggagactatggaaccccacttccttggtactttcttctacaagagtcgtattggcttggcggtgaagggtgttcaaccagagaagaaagagccctggaaaagaccgagcccctaacagaggaaacggaggatccagagcacccagaaggaatacacgactccttctttgaacgtgagcatccagggtgggttcctggggtatgcgtgaagaatctggtaaagatttttgagccctgtggccggccagctgtggaccgtctgaacatcaccttctacgagaaccagatcaccgcattcctgggccacaatggagctgggaaaaccaccaccttgtccatcctgacgggtctgttgccaccaacctctgggactgtgctcgttgggggaagggacattgaaaccagcctggatgcagtccggcagagccttggcatgtgtccacagcacaacatcctgttccaccacctcacggtggctgagcacatgctgttctatgcccagctgaaaggaaagtcccaggaggaggcccagctggagatggaagccatgttggaggacacaggcctccaccacaagcggaatgaagaggctcaggacctatcaggtggcatgcagagaaagctgtcggttgccattgcctttgtgggagatgccaaggtggtgattctggacgaacccacctctggggtggacccttactcgagacgctcaatctgggatctgctcctgaagtatcgctcaggcagaaccatcatcatgtccactcaccacatggacgaggccgacctccttggggaccgcattgccatcattgcccagggaaggctctactgctcaggcaccccactcttcctgaagaactgctttggcacaggcttgtacttaaccttggtgcgcaagatgaaaaacatccagagccaaaggaaaggcagtgaggggacctgcagctgctcgtctaagggtttctccaccacgtgtccagcccacgtcgatgacctaactccagaacaagtcctggatggggatgtaaatgagctgatggatgtagttctccaccatgttccagaggcaaagctggtggagtgcattggtcaagaacttatcttccttcttccaaataagaacttcaagcacagagcatatgccagccttttcagagagctggaggagacgctggctgaccttggtctcagcagttttggaatttctgacactcccctggaagagatttttctgaaggtcacggaggattctgattcaggacctctgtttgcgggtggcgctcagcagaaaagagaaaacgtcaacccccgacacccctgcttgggtcccagagagaaggctggacagacaccccaggactccaatgtctgctccccaggggcgccggctgctcacccagagggccagcctcccccagagccagagtgcccaggcccgcagctcaacacggggacacagctggtcctccagcatgtgcaggcgctgctggtcaagagattccaacacaccatccgcagccacaaggacttcctggcgcagatcgtgctcccggctacctttgtgtttttggctctgatgctttctattgttatccctccttttggcgaataccccgctttgacccttcacccctggatatatgggcagcagtacaccttcttcagcatggatgaaccaggcagtgagcagttcacggtacttgcagacgtcctcctgaataagccaggctttggcaaccgctgcctgaaggaagggtggcttccggagtacccctgtggcaactcaacaccctggaagactccttctgtgtccccaaacatcacccagctgttccagaagcagaaatggacacaggtcaacccttcaccatcctgcaggtgcagcaccagggagaagctcaccatgctgccagagtgccccgagggtgccgggggcctcccgcccccccagagaacacagcgcagcacggaaattctacaagacctgacggacaggaacatctccgacttcttggtaaaaacgtatcctgctcttataagaagcagcttaaagagcaaattctgggtcaatgaacagaggtatggaggaatttccattggaggaaagctcccagtcgtccccatcacgggggaagcacttgttgggtttttaagcgaccttggccggatcatgaatgtgagcgggggccctatcactagagaggcctctaaagaaatacctgatttccttaaacatctagaaactgaagacaacattaaggtgtggtttaataacaaaggctggcatgccctggtcagctttctcaatgtggcccacaacgccatcttacgggccagcctgcctaaggacaggagccccgaggagtatggaatcaccgtcattagccaacccctgaacctgaccaaggagcagctctcagagattacagtgctgaccacttcagtggatgctgtggttgccatctgcgtgattttctccatgtccttcgtcccagccagctttgtcctttatttgatccaggagcgggtgaacaaatccaagcacctccagtttatcagtggagtgagccccaccacctactgggtgaccaacttcctctgggacatcatgaattattccgtgagtgctgggctggtggtgggcatcttcatcgggtttcagaagaaagcctacacttctccagaaaaccttcctgcccttgtggcactgctcctgctgtatggatgggcggtcattcccatgatgtacccagcatccttcctgtttgatgtccccagcacagcctatgtggctttatcttgtgctaatctgttcatcggcatcaacagcagtgctattaccttcatcttggaattatttgagaataaccggacgctgctcaggttcaacgccgtgctgaggaagctgctcattgtcttcccccacttctgcctgggccggggcctcattgaccttgcactgagccaggctgtgacagatgtctatgcccggtttggtgaggagcactctgcaaatccgttccactgggacctgattgggaagaacctgtttgccatggtggtggaaggggtggtgtacttcctcctgaccctgctggtccagcgccacttcttcctctcccaatggattgccgagcccactaaggagcccattgttgatgaagatgatgatgtggctgaagaaagacaaagaattattactggtggaaataaaactgacatcttaaggctacatgaactaaccaagatttatccaggcacctccagcccagcagtggacaggctgtgtgtcggagttcgccctggagagtgctttggcctcctgggagtgaatggtgccggcaaaacaaccacattcaagatgctcactggggacaccacagtgacctcaggggatgccaccgtagcaggcaagagtattttaaccaatatttctgaagtccatcaaaatatgggctactgtcctcagtttgatgcaattgatgagctgctcacaggacgagaacatctttacctttatgcccggcttcgaggtgtaccagcagaagaaatcgaaaaggttgcaaactggagtattaagagcctgggcctgactgtctacgccgactgcctggctggcacgtacagtgggggcaacaagcggaaactctccacagccatcgcactcattggctgcccaccgctggtgctgctggatgagcccaccacagggatggacccccaggcacgccgcatgctgtggaacgtcatcgtgagcatcatcagagaagggagggctgtggtcctcacatcccacagcatggaagaatgtgaggcactgtgtacccggctggccatcatggtaaagggcgcctttcgatgtatgggcaccattcagcatctcaagtccaaatttggagatggctatatcgtcacaatgaagatcaaatccccgaaggacgacctgcttcctgacctgaaccctgtggagcagttcttccaggggaacttcccaggcagtgtgcagagggagaggcactacaacatgctccagttccaggtctcctcctcctccctggcgaggatcttccagctcctcctctcccacaaggacagcctgctcatcgaggagtactcagtcacacagaccacactggaccaggtgtttgtaaattttgctaaacagcagactgaaagtcatgacctccctctgcaccctcgagctgctggagccagtcgacaagcccaggactgatctttcacaccgctcgttcctgcagccagaaaggaactctgggcagctggaggcgcaggagcctgtgcccatatggtcatccaaatggactggccagcgtaaatgaccccactgcagcagaaaacaaacacacgaggagcatgcagcgaattcagaaagaggtctttcagaaggaaaccgaaactgacttgctcacctggaacacctgatggtgaaaccaaacaaatacaaaatccttctccagaccccagaactagaaaccccgggccatcccactagcagctttggcctccatattgctctcatttcaagcagatctgcttttctgcatgtttgtctgtgtgtctgcgttgtgtgtgattttcatggaaaaataaaatgcaaatgcactcatcacaaa

SEQ ID NO: 110051 - DNA, 3740 bp, Homo sapiens
  Payload ID: 1604
  Gene Symbol: ABCA4
  Gene Name: ATP-binding cassette, sub-family A (ABC1), member 4
  ENST ID: ENST00000536513
  CDS Start-End: 141-3338
actggaggaaaacatgttctgggccggagtggtattccctgacatgtatccctggaccagctctctaccaccccacgtgtccagcccacgtcgatgacctaactccagaacaagtcctggatggggatgtaaatgagctgatggatgtagttctccaccatgttccagaggcaaagctggtggagtgcattggtcaagaacttatcttccttcttccaaataagaacttcaagcacagagcatatgccagccttttcagagagctggaggagacgctggctgaccttggtctcagcagttttggaatttctgacactcccctggaagagatttttctgaaggtcacggaggattctgattcaggacctctgtttgcgggtggcgctcagcagaaaagagaaaacgtcaacccccgacacccctgcttgggtcccagagagaaggctggacagacaccccaggactccaatgtctgctccccaggggcgccggctgctcacccagagggccagcctcccccagagccagagtgcccaggcccgcagctcaacacggggacacagctggtcctccagcatgtgcaggcgctgctggtcaagagattccaacacaccatccgcagccacaaggacttcctggcgcagatcgtgctcccggctacctttgtgtttttggctctgatgctttctattgttatccctccttttggcgaataccccgctttgacccttcacccctggatatatgggcagcagtacaccttcttcagcatggatgaaccaggcagtgagcagttcacggtacttgcagacgtcctcctgaataagccaggctttggcaaccgctgcctgaaggaagggtggcttccggagtacccctgtggcaactcaacaccctggaagactccttctgtgtccccaaacatcacccagctgttccagaagcagaaatggacacaggtcaacccttcaccatcctgcaggtgcagcaccagggagaagctcaccatgctgccagagtgccccgagggtgccgggggcctcccgcccccccagagaacacagcgcagcacggaaattctacaagacctgacggacaggaacatctccgacttcttggtaaaaacgtatcctgctcttataagaagcagcttaaagagcaaattctgggtcaatgaacagaggtatggaggaatttccattggaggaaagctcccagtcgtccccatcacgggggaagcacttgttgggtttttaagcgaccttggccggatcatgaatgtgagcgggggccctatcactagagaggcctctaaagaaatacctgatttccttaaacatctagaaactgaagacaacattaaggtgtggtttaataacaaaggctggcatgccctggtcagctttctcaatgtggcccacaacgccatcttacgggccagcctgcctaaggacaggagccccgaggagtatggaatcaccgtcattagccaacccctgaacctgaccaaggagcagctctcagagattacagtgctgaccacttcagtggatgctgtggttgccatctgcgtgattttctccatgtccttcgtcccagccagctttgtcctttatttgatccaggagcgggtgaacaaatccaagcacctccagtttatcagtggagtgagccccaccacctactgggtgaccaacttcctctgggacatcatgaattattccgtgagtgctgggctggtggtgggcatcttcatcgggtttcagaagaaagcctacacttctccagaaaaccttcctgcccttgtggcactgctcctgctgtatggatgggcggtcattcccatgatgtacccagcatccttcctgtttgatgtccccagcacagcctatgtggctttatcttgtgctaatctgttcatcggcatcaacagcagtgctattaccttcatcttggaattatttgagaataaccggacgctgctcaggttcaacgccgtgctgaggaagctgctcattgtcttcccccacttctgcctgggccggggcctcattgaccttgcactgagccaggctgtgacagatgtctatgcccggtttggtgaggagcactctgcaaatccgttccactgggacctgattgggaagaacctgtttgccatggtggtggaaggggtggtgtacttcctcctgaccctgctggtccagcgccacttcttcctctcccaatggattgccgagcccactaaggagcccattgttgatgaagatgatgatgtggctgaagaaagacaaagaattattactggtggaaataaaactgacatcttaaggctacatgaactaaccaagatttatccaggcacctccagcccagcagtggacaggctgtgtgtcggagttcgccctggagagtgctttggcctcctgggagtgaatggtgccggcaaaacaaccacattcaagatgctcactggggacaccacagtgacctcaggggatgccaccgtagcaggcaagagtattttaaccaatatttctgaagtccatcaaaatatgggctactgtcctcagtttgatgcaattgatgagctgctcacaggacgagaacatctttacctttatgcccggcttcgaggtgtaccagcagaagaaatcgaaaaggttgcaaactggagtattaagagcctgggcctgactgtctacgccgactgcctggctggcacgtacagtgggggcaacaagcggaaactctccacagccatcgcactcattggctgcccaccgctggtgctgctggatgagcccaccacagggatggacccccaggcacgccgcatgctgtggaacgtcatcgtgagcatcatcagagaagggagggctgtggtcctcacatcccacagcatggaagaatgtgaggcactgtgtacccggctggccatcatggtaaagggcgcctttcgatgtatgggcaccattcagcatctcaagtccaaatttggagatggctatatcgtcacaatgaagatcaaatccccgaaggacgacctgcttcctgacctgaaccctgtggagcagttcttccaggggaacttcccaggcagtgtgcagagggagaggcactacaacatgctccagttccaggtctcctcctcctccctggcgaggatcttccagctcctcctctcccacaaggacagcctgctcatcgaggagtactcagtcacacagaccacactggaccaggtgtttgtaaattttgctaaacagcagactgaaagtcatgacctccctctgcaccctcgagctgctggagccagtcgacaagcccaggactgatctttcacaccgctcgttcctgcagccagaaaggaactctgggcagctggaggcgcaggagcctgtgcccatatggtcatccaaatggactggccagcgtaaatgaccccactgcagcagaaaacaaacacacgaggagcatgcagcgaattcagaaagaggtctttcagaaggaaaccgaaactgacttgctcacctggaacacctgatggtgaaaccaaacaaatacaaaatccttctccagaccccagaactagaaaccccgggccatcccactagcagctttggcctccatattgctctcatttcaagcagatctgcttttctgcatgtttgtctgtgtgtctgcgttgtgtgtgattttcatggaaaaataaaatgcaaatgcactcatcacaaact

SEQ ID NO: 110052 - DNA, 8220 bp, Homo sapiens
  Payload ID: 1605
  Gene Symbol: ABCA5
  Gene Name: ATP-binding cassette, sub-family A (ABC1), member 5
  Uniprot ID: Q8WWZ7
  ENST ID: ENST00000392676
  CDS Start-End: 66-4994
aacagactgagcgcgtccaggcctgacagctctgcggctcgggccctgaggtttattcagaaaacatgtccactgcaattagggaggtaggagtttggagacagaccagaacacttctactgaagaattacttaattaaatgcagaaccaaaaagagtagtgttcaggaaattctttttccactattttttttattttggttaatattaattagcatgatgcatccaaataagaaatatgaagaagtgcctaatatagaactcaatcctatggacaagtttactctttctaatctaattcttggatatactccagtgactaatattacaagcagcatcatgcagaaagtgtctactgatcatctacctgatgtcataattactgaagaatatacaaatgaaaaagaaatgttaacatccagtctctctaagccgagcaactttgtaggtgtggttttcaaagactccatgtcctatgaacttcgtttttttcctgatatgattccagtatcttctatttatatggattcaagagctggctgttcaaaatcatgtgaggctgctcagtactggtcctcaggtttcacagttttacaagcatccatagatgctgccattatacagttgaagaccaatgtttctctttggaaggagctggagtcaactaaagctgttattatgggagaaactgctgttgtagaaatagatacctttccccgaggagtaattttaatatacctagttatagcattttcaccttttggatactttttggcaattcatatcgtagcagaaaaagaaaaaaaaataaaagaatttttaaagataatgggacttcatgatactgccttttggctttcctgggttcttctatatacaagtttaatttttcttatgtcccttcttatggcagtcattgcgacagcttctttgttatttcctcaaagtagcagcattgtgatatttctgctttttttcctttatggattatcatctgtattttttgctttaatgctgacacctctttttaaaaaatcaaaacatgtgggaatagttgaattttttgttactgtggcttttggatttattggccttatgataatcctcatagaaagttttcccaaatcgttagtgtggcttttcagtcctttctgtcactgtacttttgtgattggtattgcacaggtcatgcatttagaagattttaatgaaggtgcttcattttcaaatttgactgcaggcccatatcctctaattattacaattatcatgctcacacttaatagtatattctatgtcctcttggctgtctatcttgatcaagtcattccaggggaatttggcttacggagatcatctttatattttctgaagccttcatattggtcaaagagcaaaagaaattatgaggagttatcagagggcaatgttaatggaaatattagttttagtgaaattattgagccagtttcttcagaatttgtaggaaaagaagccataagaattagtggtattcagaagacatacagaaagaagggtgaaaatgtggaggctttgagaaatttgtcatttgacatatatgagggtcagattactgccttacttggccacagtggaacaggaaagagtacattgatgaatattctttgtggactctgcccaccttctgatgggtttgcatctatatatggacacagagtctcagaaatagatgaaatgtttgaagcaagaaaaatgattggcatttgtccacagttagatatacactttgatgttttgacagtagaagaaaatttatcaattttggcttcaatcaaagggataccagccaacaatataatacaagaagtgcagaaggttttactagatttagacatgcagactatcaaagataaccaagctaaaaaattaagtggtggtcaaaaaagaaagctgtcattaggaattgctgttcttgggaacccaaagatactgctgctagatgaaccaacagctggaatggacccctgttctcgacatattgtatggaatcttttaaaatacagaaaagccaatcgggtgacagtgttcagtactcatttcatggatgaagctgacattcttgcagataggaaagctgtgatatcacaaggaatgctgaaatgtgttggttcttcaatgttcctcaaaagtaaatgggggatcggctaccgcctgagcatgtacatagacaaatattgtgccacagaatctctttcttcactggttaaacaacatatacctggagctactttattacaacagaatgaccaacaacttgtgtatagcttgcctttcaaggacatggacaaattttcaggtttgttttctgccctagacagtcattcaaatttgggtgtcatttcttatggtgtttccatgacgactttggaagacgtatttttaaagctagaagttgaagcagaaattgaccaagcagattatagtgtatttactcagcagccactggaggaagaaatggattcaaaatcttttgatgaaatggaacagagcttacttattctttctgaaaccaaggctgctctagtgagcaccatgagcctttggaaacaacagatgtatacaatagcaaagtttcatttctttaccttgaaacgtgaaagtaaatcagtgagatcagtgttgcttctgcttttaatttttttcacagttcagatttttatgtttttggttcatcactcttttaaaaatgctgtggttcccatcaaacttgttccagacttatattttctaaaacctggagacaaaccacataaatacaaaacaagtctgcttcttcaaaattctgctgactcagatatcagtgatcttattagctttttcacaagccagaacataatggtgacgatgattaatgacagtgactatgtatccgtggctccccatagtgcggctttaaatgtgatgcattcagaaaaggactatgtttttgcagctgttttcaacagtactatggtttattctttacctatattagtgaatatcattagtaactactatctttatcatttaaatgtgactgaaaccatccagatctggagtaccccattctttcaagaaattactgatatagtttttaaaattgagctgtattttcaagcagctttgcttggaatcattgttactgcaatgccaccttactttgccatggaaaatgcagagaatcataagatcaaagcttatactcaacttaaactttcaggtcttttgccatctgcatattggattggacaagctgttgttgatatccccttattttttatcattcttattttgatgctaggaagcttattggcatttcattatggattatatttttatactgtaaagttccttgctgtggttttttgccttattggttatgttccatcagttattctgttcacttatattgcttctttcacctttaagaaaattttaaataccaaagaattttggtcatttatctattctgtggcagcgttggcttgtattgcaatcactgaaataactttctttatgggatacacaattgcaactattcttcattatgccttttgtatcatcattccaatctatccacttctaggttgcctgatttctttcataaagatttcttggaagaatgtacgaaaaaatgtggacacctataatccatgggataggctttcagtagctgttatatcgccttacctgcagtgtgtactgtggattttcctcttacaatactatgagaaaaaatatggaggcagatcaataagaaaagatccctttttcagaaacctttcaacgaagtctaaaaataggaagcttccagaaccaccagacaatgaggatgaagatgaagatgtcaaagctgaaagactaaaggtcaaagagctgatgggttgccagtgttgtgaggagaaaccatccattatggtcagcaatttgcataaagaatatgatgacaagaaagattttcttctttcaagaaaagtaaagaaagtggcaactaaatacatctctttctgtgtgaaaaaaggagagatcttaggactattgggtccaaatggtgctggcaaaagcacaattattaatattctggttggtgatattgaaccaacttcaggccaggtatttttaggagattattcttcagagacaagtgaagatgatgattcactgaagtgtatgggttactgtcctcagataaaccctttgtggccagatactacattgcaggaacattttgaaatttatggagctgtcaaaggaatgagtgcaagtgacatgaaagaagtcataagtcgaataacacatgcacttgatttaaaagaacatcttcagaagactgtaaagaaactacctgcaggaatcaaacgaaagttgtgttttgctctaagtatgctagggaatcctcagattactttgctagatgaaccatctacaggtatggatcccaaagccaaacagcacatgtggcgagcaattcgaactgcatttaaaaacagaaagcgggctgctattctgaccactcactatatggaggaggcagaggctgtctgtgatcgagtagctatcatggtgtctgggcagttaagatgtatcggaacagtacaacatctaaagagtaaatttggaaaaggctactttttggaaattaaattgaaggactggatagaaaacctagaagtagaccgccttcaaagagaaattcagtatattttcccaaatgcaagccgtcaggaaagtttttcttctattttggcttataaaattcctaaggaagatgttcagtccctttcacaatctttttttaagctggaagaagctaaacatgcttttgccattgaagaatatagcttttctcaagcaacattggaacaggtttttgtagaactcactaaagaacaagaggaggaagataatagttgtggaactttaaacagcacactttggtgggaacgaacacaagaagatagagtagtattttgaatttgtattgttcggtctgcttactgggacttctttctttttcacttaattttaactttggtttaaaaagttttttattggaatggtaactggagaaccaagaacgcacttgaaatttttctaagctccttaattgaaatgctgtggttgtgtgttttgcttttctttaaataaaacgtatgtataattaagtgaagctgcatgtttgtattgaagtatattgaactatatagtttgtatgtcatctttttcaccattcagaaacagtgcttctgaatttgtgatttaaaggaattgtaatagaatagttttatttttaagttatctttaagtttatgccatcttcttaaataagtacgtaatgttccaatctaaataaaaaactaattcataactaatgcatagaaaagatacataaagcaatgtgaaagtttcttgcttctcctttttaatttctaaaaaagccactttgaatggaagttgtcatccgtaaaagctgaagtgtaagcactaggaaatctcaatatagagatttgaggaaagttatatccactaggtggcagtcattgatcataataagtgaaatgagcccttgttctagtacatgattttaggcttaggtaattaggtatgtgaaattacatttctttaatttaaagtaaaattcagaaggttttagttattataattaaaggaagactgtgtgtagaatcttacgtaatagtctgattctttgactctgtggctagaatgacagttatctatggaggtggtagaattaagccataccttttccttcatcactcttggaacatataaattttttgtcatcttccttgcaaagggcacatttaattttgttcttgaataaaatattttattgggtatttgtttttattggtaaactttagtgaatctcttctataaaattgtaagtagatcagtgtgtagatttatttagtaacttacctcattgactttggaacatggtaggatatgaataaactctttcaagggttaaattaagaattgtaagtgcagtgcgcctatttctttttaataagaaccagaatttcatttttgatagagttaaaggcatggctaatattttcttagaaatacttccttgtacaacccatgtattggctcaaggtataaaatagtgtaaataatgctagttgacattacatttcaaccaaatgaaagtattaacttcataaaacaaatatattgagagtgtgattattgtattagacaacaacaacagcaatgacagaaggatttggtactgaattactttaaataagcaaaacctttcagtggcattattcattctttaatgtaggcaaaatttaatgaacttttagctttattgtgtaataagacatctgtgattttaggctctagcagtggatttaaaagtgttctttctcggtacaaagtacgtggctgatattttcccccattgctgggggcagttgctatacactttcctaaagtatatataatgttcacataaatacccagggacctcttttttgggatgtgcttttgtaattatgtgtaaccttgaatacttaagtttagtaaaagcaacaaaattatatctatagtttactaaggcagtcacgaaaaagcatagttttttttagaacctgaccatcctaagaaagttatgtcatctgaagatagagcatgactaatgaagaaaattacctgcttttgcacgtagatttggtaactttcactttacatttgtgaatgtgtaattggtgcaaagtaaattttttttcctgcaaagtgaaagttgagtagtcacaatcatgttatttattttgttcatttagttactttgcttttaatgtatatgaatacatgctcttgtaaacaattttaaaagacattcaaatttttttttagtttttatatactcagaatatattttggttgttaaattaaattatgttccctttttcacagtaacaaaatctgactcaggagaaatataacttaattcttaggaaaacaagggtaagtgagctggaaagcaaaggaggcaaaaagtgaaatatatttatttacagtgtacagttcatgtttatgaacatactaattttaaaatgtcttaaattactgatctcaaaacttttttctatgtcagtacagataaataaataaatatacatattaggcaaaagcaacatcaccaaccttatatttcccattcatggtcaaattttcaaaggaaagtaaaagctgagctttactgagtgagtgtttactgactaataaggcaagaaaaaacatgatgagtgtactttacatcttacttttgtgggctcttaatttttttttctagtttgttttcagtaaagacagtgggttttctttaaaataatttttttcttttaaatttgcacaaattatcttaggtcagtattttggttttaatcattaaaacatttttagagtaatgtaatttaacaaatattttaagtgattatgtttccagaaatggattctttggagagaactcggatgactatcagttttggccctgtaagatcgtggagatctgtaagatagatacttatataacttacataaaatatatataatatattacttatataacttatataactagctattattttatataactaactataatatgacaaatcctttgctagtagtactaacaacgttttataggagcacaattaattttacttaggataagtgttgttattattgtttttattgttgttctgttagttactcaaaacttcattctaattgtgccctgagtttgttaaaataccatactgtatttttgtgtaacatgtaaataggcattaatttttgagaaatagaaatgtttatccttaatgtatttttaatttgctaacattgattttttattttctttcctgaaatagcttatttcctaaaatgaaagaatttattctcagatgaataatttttatatcagctattcttatcaggtaaaagtttaattattttttatttataatatatgtaagcaattctcaatgctgctctttaagaaaaataaatatgattatattaataataagctttaagagttgaaaatttaagacaagtcattttgtatactgaagtgaattctttgttatttagtgctgataattgaataatgagtagctcatattaaaaatgatgcaaaaacctggcactaaaa

SEQ ID NO: 110053 - DNA, 1948 bp, Homo sapiens
  Payload ID: 1605
  Gene Symbol: ABCA5
  Gene Name: ATP-binding cassette, sub-family A (ABC1), member 5
  ENST ID: ENST00000586811
  CDS Start-End: 228-1948
aattgctaaataggaaaactcagaaggctaggtttcagcaagacagtgatgtactctgtctctatgtcatcccatggaggggtgtgccagtgcgagggtatctgctaggcactgcggattctattccagtgcagagtaccttctctgtcccacgggaaattactgatatagtttttaaaattgagctgtattttcaagcagctttgcttggaatcattgttactgcaatgccaccttactttgccatggaaaatgcagagaatcataagatcaaagcttatactcaacttaaactttcaggtcttttgccatctgcatattggattggacaagctgttgttgatatccccttattttttatcattcttattttgatgctaggaagcttattggcatttcattatggattatatttttatactgtaaagttccttgctgtggttttttgccttattggttatgttccatcagttattctgttcacttatattgcttctttcacctttaagaaaattttaaataccaaagaattttggtcatttatctattctgtggcagcgttggcttgtattgcaatcactgaaataactttctttatgggatacacaattgcaactattcttcattatgccttttgtatcatcattccaatctatccacttctaggttgcctgatttctttcataaagatttcttggaagaatgtacgaaaaaatgtggacacctataatccatgggataggctttcagtagctgttatatcgccttacctgcagtgtgtactgtggattttcctcttacaatactatgagaaaaaatatggaggcagatcaataagaaaagatccctttttcagaaacctttcaacgaagtctaaaaataggaagcttccagaaccaccagacaatgaggatgaagatgaagatgtcaaagctgaaagactaaaggtcaaagagctgatgggttgccagtgttgtgaggagaaaccatccattatggtcagcaatttgcataaagaatatgatgacaagaaagattttcttctttcaagaaaagtaaagaaagtggcaactaaatacatctctttctgtgtgaaaaaaggagagatcttaggactattgggtccaaatggtgctggcaaaagcacaattattaatattctggttggtgatattgaaccaacttcaggccaggtatttttaggagattattcttcagagacaagtgaagatgatgattcactgaagtgtatgggttactgtcctcagataaaccctttgtggccagatactacattgcaggaacattttgaaatttatggagctgtcaaaggaatgagtgcaagtgacatgaaagaagtcataagtcgaataacacatgcacttgatttaaaagaacatcttcagaagactgtaaagaaactacctgcaggaatcaaacgaaagttgtgttttgctctaagtatgctagggaatcctcagattactttgctagatgaaccatctacaggtatggatcccaaagccaaacagcacatgtggcgagcaattcgaactgcatttaaaaacagaaagcgggctgctattctgaccactcactatatggaggaggcagaggctgtctgtgatcgagtagctatcatggtgtctgggcagttaagatgtatcggaacagtacaacatctaaagagtaaatttggaaaaggctactttttggaaattaaattgaaggactggatagaaaacctagaagtagaccgccttcaaagagaaattcagtatattttcccaaatgcaagccgtcaggaaagtttttcttctattttggcttataaaattcctaaggaagatgttcagtccctttcacaatctttttttaagctggaagaagctaaacatgcttttgccattgaagaatatagcttttctcaagcaacattggaacaggt

SEQ ID NO: 110054 - DNA, 3263 bp, Homo sapiens
  Payload ID: 1605
  Gene Symbol: ABCA5
  Gene Name: ATP-binding cassette, sub-family A (ABC1), member 5
  ENST ID: ENST00000591234
  CDS Start-End: 1-192
atgttcctcaaaagtaaatgggggatcggctaccgcctgagcatgtacatagacaaatattgtgccacagaatctctttcttcactggttaaacaacatatacctggagctactttattacaacagaatgaccaacaacttgtgtatagcttgcctttcaaggacatggacaaattttcaggaattgcttgatagacaaaaggatgttattgatgtttgttttctgccctagacagtcattcaaatttgggtgtcatttcttatggtgtttccatgacgactttggaagacgtatttttaaagctagaagttgaagcagaaattgaccaagcagattatagtgtatttactcagcagccactggaggaagaaatggattcaaaatcttttgatgaaatggaacagagcttacttattctttctgaaaccaaggctgctctagtgagcaccatgagcctttggaaacaacagatgtatacaatagcaaagtttcatttctttaccttgaaacgtgaaagtaaatcagtgagatcagtgttgcttctgcttttaatttttttcacagttcagatttttatgtttttggttcatcactcttttaaaaatgctgtggttcccatcaaacttgttccagacttatattttctaaaacctggagacaaaccacataaatacaaaacaagtctgcttcttcaaaattctgctgactcagatatcagtgatcttattagctttttcacaagccagaacataatggtgacgatgattaatgacagtgactatgtatccgtggctccccatagtgcggctttaaatgtgatgcattcagaaaaggactatgtttttgcagctgttttcaacagtactatggtttattctttacctatattagtgaatatcattagtaactactatctttatcatttaaatgtgactgaaaccatccagatctggagtaccccattctttcaagaaattactgatatagtttttaaaattgagctgtattttcaagcagctttgcttggaatcattgttactgcaatgccaccttactttgccatggaaaatgcagagaatcataagatcaaagcttatactcaacttaaactttcaggtcttttgccatctgcatattggattggacaagctgttgttgatatccccttattttttatcattcttattttgatgctaggaagcttattggcatttcattatggattatatttttatactgtaaagttccttgctgtggttttttgccttattggttatgttccatcagttattctgttcacttatattgcttctttcacctttaagaaaattttaaataccaaagaattttggtcatttatctattctgtggcagcgttggcttgtattgcaatcactgaaataactttctttatgggatacacaattgcaactattcttcattatgccttttgtatcatcattccaatctatccacttctaggttgcctgatttctttcataaagatttcttggaagaatgtacgaaaaaatgtggacacctataatccatgggataggctttcagtagctgttatatcgccttacctgcagtgtgtactgtggattttcctcttacaatactatgagaaaaaatatggaggcagatcaataagaaaagatccctttttcagaaacctttcaacgaagtctaaaaataggaagcttccagaaccaccagacaatgaggatgaagatgaagatgtcaaagctgaaagactaaaggtcaaagagctgatgggttgccagtgttgtgaggagaaaccatccattatggtcagcaatttgcataaagaatatgatgacaagaaagattttcttctttcaagaaaagtaaagaaagtggcaactaaatacatctctttctgtgtgaaaaaaggagagatcttaggactattgggtccaaatggtgctggcaaaagcacaattattaatattctggttggtgatattgaaccaacttcaggccaggtatttttaggagattattcttcagagacaagtgaagatgatgattcactgaagtgtatgggttactgtcctcagataaaccctttgtggccagatactacattgcaggaacattttgaaatttatggagctgtcaaaggaatgagtgcaagtgacatgaaagaagtcataagtcgaataacacatgcacttgatttaaaagaacatcttcagaagactgtaaagaaactacctgcaggaatcaaacgaaagttgtgttttgctctaagtatgctagggaatcctcagattactttgctagatgaaccatctacaggtatggatcccaaagccaaacagcacatgtggcgagcaattcgaactgcatttaaaaacagaaagcgggctgctattctgaccactcactatatggaggaggcagaggctgtctgtgatcgagtagctatcatggtgtctgggcagttaagatgtatcggaacagtacaacatctaaagagtaaatttggaaaaggctactttttggaaattaaattgaaggactggatagaaaacctagaagtagaccgccttcaaagagaaattcagtatattttcccaaatgcaagccgtcaggaaagtttttcttctattttggcttataaaattcctaaggaagatgttcagtccctttcacaatctttttttaagctggaagaagctaaacatgcttttgccattgaagaatatagcttttctcaagcaacattggaacaggtttttgtagaactcactaaagaacaagaggaggaagataatagttgtggaactttaaacagcacactttggtgggaacgaacacaagaagatagagtagtattttgaatttgtattgttcggtctgcttactgggacttctttctttttcacttaattttaactttggtttaaaaagttttttattggaatggtaactggagaaccaagaacgcacttgaaatttttctaagctccttaattgaaatgctgtggttgtgtgttttgcttttctttaaataaaacgtatgtataattaagtgaagctgcatgtttgtattgaagtatattgaactatatagtttgtatgtcatctttttcaccattcagaaacagtgcttctgaatttgtgatttaaaggaattgtaatagaatagttttatttttaagttatctttaagtttatgccatcttcttaaataagtacgtaatgttccaatctaaataaaaaactaattcat

SEQ ID NO: 110055 - DNA, 616 bp, Homo sapiens
  Payload ID: 1605
  Gene Symbol: ABCA5
  Gene Name: ATP-binding cassette, sub-family A (ABC1), member 5
  ENST ID: ENST00000592568
  CDS Start-End: 235-616
gactgagcgcgtccaggcctgacagctctgcggctcgggccctgagagctgacagattgctgctccatgcattctgtccagtttcctaagagagacagcttggagtatgcttaatccatcttacctgggactgaaacagctgcttattttgccgttaaaaattacatgcagtttactgcgtggctccgggtttgtttgtttgtttttcctctttaataggtttattcagaaaacatgtccactgcaattagggaggtaggagtttggagacagaccagaacacttctactgaagaattacttaattaaatgcagaaccaaaaagagtagtgttcaggaaattctttttccactattttttttattttggttaatattaattagcatgatgcatccaaataagaaatatgaagaagtgcctaatatagaactcaatcctatggacaagtttactctttctaatctaattcttggatatactccagtgactaatattacaagcagcatcatgcagaaagtgtctactgatcatctacctgatgtcataattactgaagaatatacaaatgaaaaagaaatgttaacatccagtctctctaagccgagcaactttgtag

SEQ ID NO: 110056 - DNA, 1095 bp, Homo sapiens
  Payload ID: 1605
  Gene Symbol: ABCA5
  Gene Name: ATP-binding cassette, sub-family A (ABC1), member 5
  ENST ID: ENST00000589975
  CDS Start-End: 1-577
tgaacttcgtttttttcctgatatgattccagtatcttctatttatatggattcaagagctggctgttcaaaatcatgtgaggctgctcagtactggtcctcaggtttcacagttttacaagcatccatagatgctgccattatacagttgaagaccaatgtttctctttggaaggagctggagtcaactaaagctgttattatgggagaaactgctgttgtagaaatagatacctttccccgaggagtaattttaatatacctagttatagcattttcaccttttggatactttttggcaattcatatcgtagcagaaaaagaaaaaaaaataaaagaatttttaaagataatgggacttcatgatactgccttttggctttcctgggttcttctatatacaagtttaatttttcttatgtcccttcttatggcagtcattgcgacagcttctttgttatttcctcaaagtagcagcattgtgatatttctgctttttttcctttatggattatcatctgtaagtattttaacttgtgataggaataaagaactgtcaaaatgtttgataacatagcaaagtctttttcttcagtttacttatagtcaatttgccatgaaagacagattttactaattgataagtgacttaataaataaatgatgtggcatcactgtattcctgtatttttagtaatgttacaaaatagttttagatttagatttagcttttgtcatatgatgtatttcacatacaactcctctatctgttgtctttatataatgatgtatataattaagactgtcaagtattggactatttttgtttgtcttcatggaatccttactctttcaagttaatttatgctccaggatgatgatttttaaagatacatctttgcaaatgtaactctttagcagtcttgatattcatttgatatattggctgaatgagaggttttaatgaccagcctttgttttaagtggttccatcttccattctgattggtttatgtgcccaccctgtatcagttgttaaatgttttggctatcatttctgctctttaaaataataaattgcaaataactaacata

SEQ ID NO: 110057 - DNA, 4062 bp, Homo sapiens
  Payload ID: 1605
  Gene Symbol: ABCA5
  Gene Name: ATP-binding cassette, sub-family A (ABC1), member 5
  ENST ID: ENST00000586995
  CDS Start-End: 1-1296
gttgaattttttgttactgtggcttttggatttattggccttatgataatcctcatagaaagttttcccaaatcgttagtgtggcttttcagtcctttctgtcactgtacttttgtgattggtattgcacaggtcatgcatttagaagattttaatgaaggtgcttcattttcaaatttgactgcaggcccatatcctctaattattacaattatcatgctcacacttaatagtatattctatgtcctcttggctgtctatcttgatcaagtcattccaggggaatttggcttacggagatcatctttatattttctgaagccttcatattggtcaaagagcaaaagaaattatgaggagttatcagagggcaatgttaatggaaatattagttttagtgaaattattgagccagtttcttcagaatttgtaggaaaagaagccataagaattagtggtattcagaagacatacagaaagaagggtgaaaatgtggaggctttgagaaatttgtcatttgacatatatgagggtcagattactgccttacttggccacagtggaacaggaaagagtacattgatgaatattctttgtggactctgcccaccttctgatgggtttgcatctatatatggacacagagtctcagaaatagatgaaatgtttgaagcaagaaaaatgattggcatttgtccacagttagatatacactttgatgttttgacagtagaagaaaatttatcaattttggcttcaatcaaagggataccagccaacaatataatacaagaagtgcagaaggttttactagatttagacatgcagactatcaaagataaccaagctaaaaaattaagtggtggtcaaaaaagaaagctgtcattaggaattgctgttcttgggaacccaaagatactgctgctagatgaaccaacagctggaatggacccctgttctcgacatattgtatggaatcttttaaaatacagaaaagccaatcgggtgacagtgttcagtactcatttcatggatgaagctgacattcttgcagataggaaagctgtgatatcacaaggaatgctgaaatgtgttggttcttcaatgttcctcaaaagtaaatgggggatcggctaccgcctgagcatgtacatagacaaatattgtgccacagaatctctttcttcactggttaaacaacatatacctggagctactttattacaacagaatgaccaacaacttgtgtatagcttgcctttcaaggacatggacaaattttcaggaattgcttgatagacaaaaggatgttattgatgtttgttttctgccctagacagtcattcaaatttgggtgtcatttcttatggtgtttccatgacgactttggaagacgtatttttaaagctagaagttgaagcagaaattgaccaagcagattatagtgtatttactcagcagccactggaggaagaaatggattcaaaatcttttgatgaaatggaacagagcttacttattctttctgaaaccaaggctgctctagtgagcaccatgagcctttggaaacaacagatgtatacaatagcaaagtttcatttctttaccttgaaacgtgaaagtaaatcagtgagatcagtgttgcttctgcttttaatttttttcacagttcagatttttatgtttttggttcatcactcttttaaaaatgctgtggttcccatcaaacttgttccagacttatattttctaaaacctggagacaaaccacataaatacaaaacaagtctgcttcttcaaaattctgctggtgagagtgtgtgaagactcagatatcagtgatcttattagctttttcacaagccagaacataatggtgacgatgattaatgacagtgactatgtatccgtggctccccatagtgcggctttaaatgtgatgcattcagaaaaggactatgtttttgcagctgttttcaacagtactatggtttattctttacctatattagtgaatatcattagtaactactatctttatcatttaaatgtgactgaaaccatccagatctggagtaccccattctttcaagaaattactgatatagtttttaaaattgagctgtattttcaagcagctttgcttggaatcattgttactgcaatgccaccttactttgccatggaaaatgcagagaatcataagatcaaagcttatactcaacttaaactttcaggtcttttgccatctgcatattggattggacaagctgttgttgatatccccttattttttatcattcttattttgatgctaggaagcttattggcatttcattatggattatatttttatactgtaaagttccttgctgtggttttttgccttattggttatgttccatcagttattctgttcacttatattgcttctttcacctttaagaaaattttaaataccaaagaattttggtcatttatctattctgtggcagcgttggcttgtattgcaatcactgaaataactttctttatgggatacacaattgcaactattcttcattatgccttttgtatcatcattccaatctatccacttctaggttgcctgatttctttcataaagatttcttggaagaatgtacgaaaaaatgtggacacctataatccatgggataggctttcagtagctgttatatcgccttacctgcagtgtgtactgtggattttcctcttacaatactatgagaaaaaatatggaggcagatcaataagaaaagatccctttttcagaaacctttcaacgaagtctaaaaataggaagcttccagaaccaccagacaatgaggatgaagatgaagatgtcaaagctgaaagactaaaggtcaaagagctgatgggttgccagtgttgtgaggagaaaccatccattatggtcagcaatttgcataaagaatatgatgacaagaaagattttcttctttcaagaaaagtaaagaaagtggcaactaaatacatctctttctgtgtgaaaaaaggagagatcttaggactattgggtccaaatggtgctggcaaaagcacaattattaatattctggttggtgatattgaaccaacttcaggccaggtatttttaggagattattcttcagagacaagtgaagatgatgattcactgaagtgtatgggttactgtcctcagataaaccctttgtggccagatactacattgcaggaacattttgaaatttatggagctgtcaaaggaatgagtgcaagtgacatgaaagaagtcataagtcgaataacacatgcacttgatttaaaagaacatcttcagaagactgtaaagaaactacctgcaggaatcaaacgaaagttgtgttttgctctaagtatgctagggaatcctcagattactttgctagatgaaccatctacaggtatggatcccaaagccaaacagcacatgtgatgtatcggaacagtacaacatctaaagagtaaatttggaaaaggctactttttggaaattaaattgaaggactggatagaaaacctagaagtagaccgccttcaaagagaaattcagtatattttcccaaatgcaagccgtcaggaaagtttttcttctattttggcttataaaattcctaaggaagatgttcagtccctttcacaatctttttttaagctggaagaagctaaacatgcttttgccattgaagaatatagcttttctcaagcaacattggaacaggtttttgtagaactcactaaagaacaagaggaggaagataatagttgtggaactttaaacagcacactttggtgggaacgaacacaagaagatagagtagtattttgaatttgtattgttcggtctgcttactgggacttctttctttttcacttaattttaactttggtttaaaaagttttttattggaatggtaactggagaaccaagaacgcacttgaaatttttctaagctccttaattgaaatgctgtggttgtgtgttttgcttttctttaaataaaacgtatgtataattaa

SEQ ID NO: 110058 - DNA, 3017 bp, Homo sapiens
  Payload ID: 1605
  Gene Symbol: ABCA5
  Gene Name: ATP-binding cassette, sub-family A (ABC1), member 5
  ENST ID: ENST00000593153
  CDS Start-End: 266-3017
agctctgcctgcgccaggagcgcgcgggtgcgcgcggccgcgccctcgcacagatcccagctgggtcacccgcactgagtcaacagactgagcgcgtccaggcctgacagctctgcggctcgggccctgagagacagcgtctcgggctagagtgcagtggtgcgatcaaagttcactgcagccttgaacgtctggactctagggaccctgctgaatagctggggctacaggcgtgtgtcactgcgcccaggtttattcagaaaacatgtccactgcaattagggaggtaggagtttggagacagaccagaacacttctactgaagaattacttaattaaatgcagaaccaaaaagagtagtgttcaggaaattctttttccactattttttttattttggttaatattaattagcatgatgcatccaaataagaaatatgaagaagtgcctaatatagaactcaatcctatggacaagtttactctttctaatctaattcttggatatactccagtgactaatattacaagcagcatcatgcagaaagtgtctactgatcatctacctgatgtcataattactgaagaatatacaaatgaaaaagaaatgttaacatccagtctctctaagccgagcaactttgtaggtgtggttttcaaagactccatgtcctatgaacttcgtttttttcctgatatgattccagtatcttctatttatatggattcaagagctggctgttcaaaatcatgtgaggctgctcagtactggtcctcaggtttcacagttttacaagcatccatagatgctgccattatacagttgaagaccaatgtttctctttggaaggagctggagtcaactaaagctgttattatgggagaaactgctgttgtagaaatagatacctttccccgaggagtaattttaatatacctagttatagcattttcaccttttggatactttttggcaattcatatcgtagcagaaaaagaaaaaaaaataaaagaatttttaaagataatgggacttcatgatactgccttttggctttcctgggttcttctatatacaagtttaatttttcttatgtcccttcttatggcagtcattgcgacagcttctttgttatttcctcaaagtagcagcattgtgatatttctgctttttttcctttatggattatcatctgtattttttgctttaatgctgacacctctttttaaaaaatcaaaacatgtgggaatagttgaattttttgttactgtggcttttggatttattggccttatgataatcctcatagaaagttttcccaaatcgttagtgtggcttttcagtcctttctgtcactgtacttttgtgattggtattgcacaggtcatgcatttagaagattttaatgaaggtgcttcattttcaaatttgactgcaggcccatatcctctaattattacaattatcatgctcacacttaatagtatattctatgtcctcttggctgtctatcttgatcaagtcattccaggggaatttggcttacggagatcatctttatattttctgaagccttcatattggtcaaagagcaaaagaaattatgaggagttatcagagggcaatgttaatggaaatattagttttagtgaaattattgagccagtttcttcagaatttgtaggaaaagaagccataagaattagtggtattcagaagacatacagaaagaagggtgaaaatgtggaggctttgagaaatttgtcatttgacatatatgagggtcagattactgccttacttggccacagtggaacaggaaagagtacattgatgaatattctttgtggactctgcccaccttctgatgggtttgcatctatatatggacacagagtctcagaaatagatgaaatgtttgaagcaagaaaaatgattggcatttgtccacagttagatatacactttgatgttttgacagtagaagaaaatttatcaattttggcttcaatcaaagggataccagccaacaatataatacaagaagtgcagaaggttttactagatttagacatgcagactatcaaagataaccaagctaaaaaattaagtggtggtcaaaaaagaaagctgtcattaggaattgctgttcttgggaacccaaagatactgctgctagatgaaccaacagctggaatggacccctgttctcgacatattgtatggaatcttttaaaatacagaaaagccaatcgggtgacagtgttcagtactcatttcatggatgaagctgacattcttgcagataggaaagctgtgatatcacaaggaatgctgaaatgtgttggttcttcaatgttcctcaaaagtaaatgggggatcggctaccgcctgagcatgtacatagacaaatattgtgccacagaatctctttcttcactggttaaacaacatatacctggagctactttattacaacagaatgaccaacaacttgtgtatagcttgcctttcaaggacatggacaaattttcaggtttgttttctgccctagacagtcattcaaatttgggtgtcatttcttatggtgtttccatgacgactttggaagacgtatttttaaagctagaagttgaagcagaaattgaccaagcagattatagtgtatttactcagcagccactggaggaagaaatggattcaaaatcttttgatgaaatggaacagagcttacttattctttctgaaaccaaggctgctctagtgagcaccatgagcctttggaaacaacagatgtatacaatagcaaagtttcatttctttaccttgaaacgtgaaagtaaatcagtgagatcagtgttgcttctgcttttaatttttttcacagttcagatttttatgtttttggttcatcactcttttaaaaatgctgtggttcccatcaaacttgttccagacttatattttctaaaacctggagacaaaccacataaatacaaaacaagtctgcttcttc

SEQ ID NO: 110059 - DNA, 1695 bp, Homo sapiens
  Payload ID: 1605
  Gene Symbol: ABCA5
  Gene Name: ATP-binding cassette, sub-family A (ABC1), member 5
  ENST ID: ENST00000593253
  CDS Start-End: 946-1695
cacattctttgaactgtagttgtcattttagtttatttttcaaaaacttttgcagtacctttttggtctgtcttgtgtgtgccttgcagtgaacagtctggatttggacagtggtctgtctgttagttcagtttctcaagcctttgtcacactaataggattggatttatgtatgtccagcttgggaattattacaggaattaaaaacaactttttagagtgctttcctgagctctctttctatttgttcccccttctactttttgcttccctgtggctgctgtttctatcctccagccagagagctagtgtttattttctccattgtgttacacacttgtgcagctgcaaccaccatatccagggcccaatggtaggaggtagagaagaaaagcaaaagggattggcctcatcctcttacaacgatagttccattgaatagagagaaaggttttcctgcctcagagtgttggctgcactaggcttttgttactgtagtctggccctgttaccatgggattgcttgcatgtggggatacaggagaattcagaaaagaaaaaaagatttgctatttctacattctccctgagcattaagacttcccttgcccattcctcaattcaaagctaaggcttcttctggagctgcctctgtgggcggttcgggagataccaaaggagaaaaagtaccactgttgatatggtggtatttcaaattctggtctaccctatttcacatgccttgtttacttttcagagctgacagattgctgctccatgcattctgtccagtttcctaagagagacagcttggagtatgcttaatccatcttacctgggactgaaacagctgcttattttgccgttaaaaattacatgcagtttactgcgtggctccgggtttgtttgtttgtttttcctctttaataggtttattcagaaaacatgtccactgcaattagggaggtaggagtttggagacagaccagaacacttctactgaagaattacttaattaaatgcagaaccaaaaagagtagtgttcaggaaattctttttccactattttttttattttggttaatattaattagcatgatgcatccaaataagaaatatgaagaagtgcctaatatagaactcaatcctatggacaagtttactctttctaatctaattcttggatatactccagtgactaatattacaagcagcatcatgcagaaagtgtctactgatcatctacctgatgtcataattactgaagaatatacaaatgaaaaagaaatgttaacatccagtctctctaagccgagcaactttgtaggtgtggttttcaaagactccatgtcctatgaacttcgtttttttcctgatatgattccagtatcttctatttatatggattcaagagctggctgttcaaaatcatgtgaggctgctcagtactggtcctcaggtttcacagttttacaagcatccatagatgctgccattatacagttgaagaccaatgtttctctttggaaggagctggagtcaactaaagctgttattatgggagaaactgctgttgtagaaatagatacctttccccgaggagtaattttaatatacctagttatagcattttcaccttttggatactttttggcaattcatatcgtagcagaaaaagaaaaaaaaataaaagaa

SEQ ID NO: 110060 - DNA, 560 bp, Homo sapiens
  Payload ID: 1605
  Gene Symbol: ABCA5
  Gene Name: ATP-binding cassette, sub-family A (ABC1), member 5
  ENST ID: ENST00000588665
  CDS Start-End: 447-560
tttctaggagccccgccctcaggtgcgctctgcaggaggcggggcgcgacttcggcgccgccagctctgcctgcgccaggagcgcgcgggtgcgcgcggccgcgccctcgcacagatcccagctgggtcacccgcactgagtcaacagactgagcgcgtccaggcctgacagctctgcggctcgggccctgagagacagcgtctcgggctagagtgcagtggtgcgatcaaagttcactgcagccttgaacgtctggactctagggaccctgctgaatagctggggctacaggcgtgtgtcactgcgcccagctggaatgaaacctctgaagaatcgagatagctccaatagaggtccacaggcagaaaggatttcaaggatcttcaaagggtaaatgtaccctggaagagggatactggacctgtgataggtttattcagaaaacatgtccactgcaattagggaggtaggagtttggagacagaccagaacacttctactgaagaattacttaattaaatgcagaaccaaaaagagtagtgttcaggaaattcttttt

SEQ ID NO: 110061 - DNA, 804 bp, Homo sapiens
  Payload ID: 1605
  Gene Symbol: ABCA5
  Gene Name: ATP-binding cassette, sub-family A (ABC1), member 5
  ENST ID: ENST00000587607
  CDS Start-End: 55-804
cgcgtccaggcctgacagctctgcggctcgggccctgaggtttattcagaaaacatgtccactgcaattagggaggtaggagtttggagacagaccagaacacttctactgaagaattacttaattaaatgcagaaccaaaaagagtagtgttcaggaaattctttttccactattttttttattttggttaatattaattagcatgatgcatccaaataagaaatatgaagaagtgcctaatatagaactcaatcctatggacaagtttactctttctaatctaattcttggatatactccagtgactaatattacaagcagcatcatgcagaaagtgtctactgatcatctacctgatgtcataattactgaagaatatacaaatgaaaaagaaatgttaacatccagtctctctaagccgagcaactttgtaggtgtggttttcaaagactccatgtcctatgaacttcgtttttttcctgatatgattccagtatcttctatttatatggattcaagagctggctgttcaaaatcatgtgaggctgctcagtactggtcctcaggtttcacagttttacaagcatccatagatgctgccattatacagttgaagaccaatgtttctctttggaaggagctggagtcaactaaagctgttattatgggagaaactgctgttgtagaaatagatacctttccccgaggagtaattttaatatacctagttatagcattttcaccttttggatactttttggcaattcatatcgtagcagaaaaagaaaaaaaaataaaagaa

SEQ ID NO: 110062 - DNA, 6525 bp, Homo sapiens
  Payload ID: 1605
  Gene Symbol: ABCA5
  Gene Name: ATP-binding cassette, sub-family A (ABC1), member 5
  Uniprot ID: Q8WWZ7
  ENST ID: ENST00000588877
  CDS Start-End: 1011-5939
aaaatgttgatattttctcttagcaggctgtcaaccaggttaggttcaggtcataagtttctacccacattctttgaactgtagttgtcattttagtttatttttcaaaaacttttgcagtacctttttggtctgtcttgtgtgtgccttgcagtgaacagtctggatttggacagtggtctgtctgttagttcagtttctcaagcctttgtcacactaataggattggatttatgtatgtccagcttgggaattattacaggaattaaaaacaactttttagagtgctttcctgagctctctttctatttgttcccccttctactttttgcttccctgtggctgctgtttctatcctccagccagagagctagtgtttattttctccattgtgttacacacttgtgcagctgcaaccaccatatccagggcccaatggtaggaggtagagaagaaaagcaaaagggattggcctcatcctcttacaacgatagttccattgaatagagagaaaggttttcctgcctcagagtgttggctgcactaggcttttgttactgtagtctggccctgttaccatgggattgcttgcatgtggggatacaggagaattcagaaaagaaaaaaagatttgctatttctacattctccctgagcattaagacttcccttgcccattcctcaattcaaagctaaggcttcttctggagctgcctctgtgggcggttcgggagataccaaaggagaaaaagtaccactgttgatatggtggtatttcaaattctggtctaccctatttcacatgccttgtttacttttcagagctgacagattgctgctccatgcattctgtccagtttcctaagagagacagcttggagtatgcttaatccatcttacctgggactgaaacagctgcttattttgccgttaaaaattacatgcagtttactgcgtggctccgggtttgtttgtttgtttttcctctttaataggtttattcagaaaacatgtccactgcaattagggaggtaggagtttggagacagaccagaacacttctactgaagaattacttaattaaatgcagaaccaaaaagagtagtgttcaggaaattctttttccactattttttttattttggttaatattaattagcatgatgcatccaaataagaaatatgaagaagtgcctaatatagaactcaatcctatggacaagtttactctttctaatctaattcttggatatactccagtgactaatattacaagcagcatcatgcagaaagtgtctactgatcatctacctgatgtcataattactgaagaatatacaaatgaaaaagaaatgttaacatccagtctctctaagccgagcaactttgtaggtgtggttttcaaagactccatgtcctatgaacttcgtttttttcctgatatgattccagtatcttctatttatatggattcaagagctggctgttcaaaatcatgtgaggctgctcagtactggtcctcaggtttcacagttttacaagcatccatagatgctgccattatacagttgaagaccaatgtttctctttggaaggagctggagtcaactaaagctgttattatgggagaaactgctgttgtagaaatagatacctttccccgaggagtaattttaatatacctagttatagcattttcaccttttggatactttttggcaattcatatcgtagcagaaaaagaaaaaaaaataaaagaatttttaaagataatgggacttcatgatactgccttttggctttcctgggttcttctatatacaagtttaatttttcttatgtcccttcttatggcagtcattgcgacagcttctttgttatttcctcaaagtagcagcattgtgatatttctgctttttttcctttatggattatcatctgtattttttgctttaatgctgacacctctttttaaaaaatcaaaacatgtgggaatagttgaattttttgttactgtggcttttggatttattggccttatgataatcctcatagaaagttttcccaaatcgttagtgtggcttttcagtcctttctgtcactgtacttttgtgattggtattgcacaggtcatgcatttagaagattttaatgaaggtgcttcattttcaaatttgactgcaggcccatatcctctaattattacaattatcatgctcacacttaatagtatattctatgtcctcttggctgtctatcttgatcaagtcattccaggggaatttggcttacggagatcatctttatattttctgaagccttcatattggtcaaagagcaaaagaaattatgaggagttatcagagggcaatgttaatggaaatattagttttagtgaaattattgagccagtttcttcagaatttgtaggaaaagaagccataagaattagtggtattcagaagacatacagaaagaagggtgaaaatgtggaggctttgagaaatttgtcatttgacatatatgagggtcagattactgccttacttggccacagtggaacaggaaagagtacattgatgaatattctttgtggactctgcccaccttctgatgggtttgcatctatatatggacacagagtctcagaaatagatgaaatgtttgaagcaagaaaaatgattggcatttgtccacagttagatatacactttgatgttttgacagtagaagaaaatttatcaattttggcttcaatcaaagggataccagccaacaatataatacaagaagtgcagaaggttttactagatttagacatgcagactatcaaagataaccaagctaaaaaattaagtggtggtcaaaaaagaaagctgtcattaggaattgctgttcttgggaacccaaagatactgctgctagatgaaccaacagctggaatggacccctgttctcgacatattgtatggaatcttttaaaatacagaaaagccaatcgggtgacagtgttcagtactcatttcatggatgaagctgacattcttgcagataggaaagctgtgatatcacaaggaatgctgaaatgtgttggttcttcaatgttcctcaaaagtaaatgggggatcggctaccgcctgagcatgtacatagacaaatattgtgccacagaatctctttcttcactggttaaacaacatatacctggagctactttattacaacagaatgaccaacaacttgtgtatagcttgcctttcaaggacatggacaaattttcaggtttgttttctgccctagacagtcattcaaatttgggtgtcatttcttatggtgtttccatgacgactttggaagacgtatttttaaagctagaagttgaagcagaaattgaccaagcagattatagtgtatttactcagcagccactggaggaagaaatggattcaaaatcttttgatgaaatggaacagagcttacttattctttctgaaaccaaggctgctctagtgagcaccatgagcctttggaaacaacagatgtatacaatagcaaagtttcatttctttaccttgaaacgtgaaagtaaatcagtgagatcagtgttgcttctgcttttaatttttttcacagttcagatttttatgtttttggttcatcactcttttaaaaatgctgtggttcccatcaaacttgttccagacttatattttctaaaacctggagacaaaccacataaatacaaaacaagtctgcttcttcaaaattctgctgactcagatatcagtgatcttattagctttttcacaagccagaacataatggtgacgatgattaatgacagtgactatgtatccgtggctccccatagtgcggctttaaatgtgatgcattcagaaaaggactatgtttttgcagctgttttcaacagtactatggtttattctttacctatattagtgaatatcattagtaactactatctttatcatttaaatgtgactgaaaccatccagatctggagtaccccattctttcaagaaattactgatatagtttttaaaattgagctgtattttcaagcagctttgcttggaatcattgttactgcaatgccaccttactttgccatggaaaatgcagagaatcataagatcaaagcttatactcaacttaaactttcaggtcttttgccatctgcatattggattggacaagctgttgttgatatccccttattttttatcattcttattttgatgctaggaagcttattggcatttcattatggattatatttttatactgtaaagttccttgctgtggttttttgccttattggttatgttccatcagttattctgttcacttatattgcttctttcacctttaagaaaattttaaataccaaagaattttggtcatttatctattctgtggcagcgttggcttgtattgcaatcactgaaataactttctttatgggatacacaattgcaactattcttcattatgccttttgtatcatcattccaatctatccacttctaggttgcctgatttctttcataaagatttcttggaagaatgtacgaaaaaatgtggacacctataatccatgggataggctttcagtagctgttatatcgccttacctgcagtgtgtactgtggattttcctcttacaatactatgagaaaaaatatggaggcagatcaataagaaaagatccctttttcagaaacctttcaacgaagtctaaaaataggaagcttccagaaccaccagacaatgaggatgaagatgaagatgtcaaagctgaaagactaaaggtcaaagagctgatgggttgccagtgttgtgaggagaaaccatccattatggtcagcaatttgcataaagaatatgatgacaagaaagattttcttctttcaagaaaagtaaagaaagtggcaactaaatacatctctttctgtgtgaaaaaaggagagatcttaggactattgggtccaaatggtgctggcaaaagcacaattattaatattctggttggtgatattgaaccaacttcaggccaggtatttttaggagattattcttcagagacaagtgaagatgatgattcactgaagtgtatgggttactgtcctcagataaaccctttgtggccagatactacattgcaggaacattttgaaatttatggagctgtcaaaggaatgagtgcaagtgacatgaaagaagtcataagtcgaataacacatgcacttgatttaaaagaacatcttcagaagactgtaaagaaactacctgcaggaatcaaacgaaagttgtgttttgctctaagtatgctagggaatcctcagattactttgctagatgaaccatctacaggtatggatcccaaagccaaacagcacatgtggcgagcaattcgaactgcatttaaaaacagaaagcgggctgctattctgaccactcactatatggaggaggcagaggctgtctgtgatcgagtagctatcatggtgtctgggcagttaagatgtatcggaacagtacaacatctaaagagtaaatttggaaaaggctactttttggaaattaaattgaaggactggatagaaaacctagaagtagaccgccttcaaagagaaattcagtatattttcccaaatgcaagccgtcaggaaagtttttcttctattttggcttataaaattcctaaggaagatgttcagtccctttcacaatctttttttaagctggaagaagctaaacatgcttttgccattgaagaatatagcttttctcaagcaacattggaacaggtttttgtagaactcactaaagaacaagaggaggaagataatagttgtggaactttaaacagcacactttggtgggaacgaacacaagaagatagagtagtattttgaatttgtattgttcggtctgcttactgggacttctttctttttcacttaattttaactttggtttaaaaagttttttattggaatggtaactggagaaccaagaacgcacttgaaatttttctaagctccttaattgaaatgctgtggttgtgtgttttgcttttctttaaataaaacgtatgtataattaagtgaagctgcatgtttgtattgaagtatattgaactatatagtttgtatgtcatctttttcaccattcagaaacagtgcttctgaatttgtgatttaaaggaattgtaatagaatagttttatttttaagttatctttaagtttatgccatcttcttaaataagtacgtaatgttccaatctaaataaaaaactaattcataactaatgcatagaaaagatacataaagcaatgtgaaagtttcttgcttctcctttttaatttctaaaaaagccactttgaatggaagttgtcatccgtaaaagctgaagtgtaagcactaggaaatctcaatatagagatttgaggaaagttatatccactaggtggcagtcattgatcataataagtgaaat

SEQ ID NO: 110063 - DNA, 5300 bp, Homo sapiens
  Payload ID: 1606
  Gene Symbol: ABCA6
  Gene Name: ATP-binding cassette, sub-family A (ABC1), member 6
  Uniprot ID: Q8N139
  ENST ID: ENST00000284425
  CDS Start-End: 176-5029
ctgctggagtaggcacccatttaaagaaaaaatgaagaagcagcaataaagaagttgtaatcgttacctagacaaacagagaactggttttgacagtgtttctagagtgctttttattattttcctgacagttgtgttccaccatgattactttctccttcagcgaataggctaaatgaatatgaaacagaaaagcgtgtatcagcaaaccaaagcacttctgtgcaagaattttcttaagaaatggaggatgaaaagagagagcttattggaatggggcctctcaatacttctaggactgtgtattgctctgttttccagttccatgagaaatgtccagtttcctggaatggctcctcagaatctgggaagggtagataaatttaatagctcttctttaatggttgtgtatacaccaatatctaatttaacccagcagataatgaataaaacagcacttgctcctcttttgaaaggaacaagtgtcattggggcaccaaataaaacacacatggacgaaatacttctggaaaatttaccatatgctatgggaatcatctttaatgaaactttctcttataagttaatatttttccagggatataacagtccactttggaaagaagatttctcagctcattgctgggatggatatggtgagttttcatgtacattgaccaaatactggaatagaggatttgtggctttacaaacagctattaatactgccattatagaaatcacaaccaatcaccctgtgatggaggagttgatgtcagttactgctataactatgaagacattacctttcataactaaaaatcttcttcacaatgagatgtttattttattcttcttgcttcatttctccccacttgtatattttatatcactcaatgtaacaaaagagagaaaaaagtctaagaatttgatgaaaatgatgggtctccaagattcagcattctggctctcctggggtctaatctatgctggcttcatctttattatttccatattcgttacaattatcataacattcacccaaattatagtcatgactggcttcatggtcatatttatactcttttttttatatggcttatctttggtagctttggtgttcctgatgagtgtgctgttaaagaaagctgtcctcaccaatttggttgtgtttctccttaccctcttttggggatgtctgggattcactgtattttatgaacaacttccttcatctctggagtggattttgaatatttgtagcccttttgcctttactactggaatgattcagattatcaaactggattataacttgaatggtgtaatttttcctgacccttcaggagactcatatacaatgatagcaactttttctatgttgcttttggatggtctcatctacttgctattggcattatactttgacaaaattttaccctatggagatgagcgccattattctcctttatttttcttgaattcatcatcttgtttccaacaccaaaggactaatgctaaggttattgagaaagaaatcgatgctgagcatccctctgatgattattttgaaccagtagctcctgaattccaaggaaaagaagccatcagaatcagaaatgttaagaaggaatataaaggaaaatctggaaaagtggaagcattgaaaggcttgctctttgacatatatgaaggtcaaatcacggcaatcctgggtcacagtggagctggcaaatcttcactgctaaatattcttaatggattgtctgttccaacagaaggatcagttaccatctataataaaaatctctctgaaatgcaagacttggaggaaatcagaaagataactggcgtctgtcctcaattcaatgttcaatttgacatactcaccgtgaaggaaaacctcagcctgtttgctaaaataaaagggattcatctaaaggaagtggaacaagaggtacaacgaatattattggaattggacatgcaaaacattcaagataaccttgctaaacatttaagtgaaggacagaaaagaaagctgacttttgggattaccattttaggagatcctcaaattttgcttttagatgaaccaactactggattggatcccttttccagagatcaagtgtggagcctcctgagagagcgtagagcagatcatgtgatccttttcagtacccagtccatggatgaggctgacatcctggctgatagaaaagtgatcatgtccaatgggagactgaagtgtgcaggttcttctatgtttttgaaaagaaggtggggtcttggatatcacctaagtttacataggaatgaaatatgtaacccagaacaaataacatccttcattactcatcacatccccgatgctaaattaaaaacagaaaacaaagaaaagcttgtatatactttgccactggaaaggacaaatacatttccagatcttttcagtgatctggataagtgttctgaccagggagtgacaggttatgacatttccatgtcaactctaaatgaagtctttatgaaactggaaggacagtcaactatcgaacaagatttcgaacaagtggagatgataagagactcagaaagcctcaatgaaatggagctggctcactcttccttctctgaaatgcagacagctgtgagtgacatgggcctctggagaatgcaagtctttgccatggcacggctccgtttcttaaagttaaaacgtcaaactaaagtgttattgaccctattattggtatttggaatcgcaatattccctttgattgttgaaaatataatgtatgctatgttaaatgaaaagatcgattgggaatttaaaaacgaattgtattttctctctcctggacaacttccccaggaaccccgtaccagcctgttgatcatcaataacacagaatcaaatattgaagattttataaaatcactgaagcatcaaaatatacttttggaagtagatgactttgaaaacagaaatggtactgatggcctctcatacaatggagctatcatagtttctggtaaacaaaaggattatagattttcagttgtgtgtaataccaagagattgcactgttttccaattcttatgaatattatcagcaatgggctacttcaaatgtttaatcacacacaacatattcgaattgagtcaagcccatttcctcttagccacataggactctggactgggttgccggatggttcctttttcttatttttggttctatgtagcatttctccttatatcaccatgggcagcatcagtgattacaagaaaaatgctaagtcccagctatggatttcaggcctctacacttctgcttactggtgtgggcaggcactagtggacgtcagcttcttcattttaattctccttttaatgtatttaattttctacatagaaaacatgcagtaccttcttattacaagccaaattgtgtttgctttggttatagttactcctggttatgcagcttctcttgtcttcttcatatatatgatatcatttatttttcgcaaaaggagaaaaaacagtggcctttggtcattttacttcttttttgcctccaccatcatgttttccatcactttaatcaatcattttgacctaagtatattgattaccaccatggtattggttccttcatataccttgcttggatttaaaacttttttggaagtgagagaccaggagcactacagagaatttccagaggcaaattttgaattgagtgccactgattttctagtctgcttcataccctactttcagactttgctattcgtttttgttctaagatgcatggaactaaaatgtggaaagaaaagaatgcgaaaagatcctgttttcagaatttccccccaaagtagagatgctaagccaaatccagaagaacccatagatgaagatgaagatattcaaacagaaagaataagaacagccactgctctgaccacttcaatcttagatgagaaacctgttataattgccagctgtctacacaaagaatatgcaggccagaagaaaagttgcttttcaaagaggaagaagaaaatagcagcaagaaatatctctttctgtgttcaagaaggtgaaattttgggattgctaggacccaatggtgctggaaaaagttcatctattagaatgatatctgggatcacaaagccaactgctggagaggtggaactgaaaggctgcagttcagttttgggccacctggggtactgccctcaagagaacgtgctgtggcccatgctgacgttgagggaacacctggaggtgtatgctgccgtcaaggggctcaggaaagcggacgcgaggctcgccatcgcaagattagtgagtgctttcaaactgcatgagcagctgaatgttcctgtgcagaaattaacagcaggaatcacgagaaagttgtgttttgtgctgagcctcctgggaaactcacctgtcttgctcctggatgaaccatctacgggcatagaccccacagggcagcagcaaatgtggcaggcaatccaggcagtcgttaaaaacacagagagaggtgtcctcctgaccacccataacctggctgaggcggaagccttgtgtgaccgtgtggccatcatggtgtctggaaggcttagatgcattggctccatccaacacctgaaaaacaaacttggcaaggattacattctagagctaaaagtgaaggaaacgtctcaagtgactttggtccacactgagattctgaagcttttcccacaggctgcagggcaggaaaggtattcctctttgttaacctataagctgcccgtggcagacgtttaccctctatcacagacctttcacaaattagaagcagtgaagcataactttaacctggaagaatacagcctttctcagtgcacactggagaaggtattcttagagctttctaaagaacaggaagtaggaaattttgatgaagaaattgatacaacaatgagatggaaactcctccctcattcagatgaaccttaaaacctcaaacctagtaattttttgttgatctcctataaactcatgttttatgtaataattaatagtatgtttaattttaaagatcatttaaaattaacatcaggtatattttgtaaatttagttaacaaatacataaattttaaaattattcttcctctcaaacataggggtgatagcaaacctgtgataaaggcaatacaaaatattagtaaagtcacccaaagagtcaggcactgggtattgtggaaataaaactatataaacttagaa

SEQ ID NO: 110064 - DNA, 1511 bp, Homo sapiens
  Payload ID: 1606
  Gene Symbol: ABCA6
  Gene Name: ATP-binding cassette, sub-family A (ABC1), member 6
  Uniprot ID: Q8N139
  ENST ID: ENST00000590645
  CDS Start-End: 190-747
aggctgtgtaagagctgctggagtaggcacccatttaaagaaaaaatgaagaagcagcaataaagaagttgtaatcgttacctagacaaacagagaactggttttgacagtgtttctagagtgctttttattattttcctgacagttgtgttccaccatgattactttctccttcagcgaataggctaaatgaatatgaaacagaaaagcgtgtatcagcaaaccaaagcacttctgtgcaagaattttcttaagaaatggaggatgaaaagagagagcttattggaatggggcctctcaatacttctaggactgtgtattgctctgttttccagttccatgagaaatgtccagtttcctggaatggctcctcagaatctgggaagggtagataaatttaatagctcttctttaatggttgtgtatacaccaatatctaatttaacccagcagataatgaataaaacagcacttgctcctcttttgaaaggaacaagtgtcattggggcaccaaataaaacacacatggacgaaatacttctggaaaatttaccatatgctatgggaatcatctttaatgaaactttctcttataagttaatatttttccagggatataacagtccactttggaaagaagatttctcaggtgactttccatatcaaatatcattatggaatttttcatgttttcaacataaagaacagaggaggttgggcaacagagatgctttcaatgacacatgagaaaacagggaaagcccatttcattgctgaacttatttcaaggtcaatcgtatgttcctactacaggatgactgcaaaaattgtagagtcatccaacatatatgtgttgagcatgcagatgcatgtgtcaaaggacacatgagtaaccaagactgacaggccccagcctcaggtgagattccaggttagcagcaaagacagacattgaacaattaatgacaagtacaagaaaaagtgtttcatgggcacttagaccaggggttcctaatagtgggattagagaagtcctacctggggaaatgatgtttaaagggagaccagaatgaatagcaggtgtgaggtgctagaagcattgtgtttcagatagaagaaaggtaattgtgaagaccctgaggtgagaaaggacatctgttcctagatctggaagaagagcagtatagctgaacaaggaacatgaaaaggaatgtaatgggagagtgaagctgaagtcactcaagtgctacctcctgtggcatcttgtaaacctaggcaaggaatagccactgagtcactttaatcacggcaaaagtgtaattcggtttccaaaattaggggaacactccagatatagcccggggaatagattgccaagaggctatggagaatgtcaagaaacaaggagtccattatggctggagcagagtgtttgctttcatctcctttttattttctaagactttctaagcatgctgtggtctgcaagaataaaattgctttattaaaaa

SEQ ID NO: 110065 - DNA, 6816 bp, Homo sapiens
  Payload ID: 1607
  Gene Symbol: ABCA7
  Gene Name: ATP-binding cassette, sub-family A (ABC1), member 7
  Uniprot ID: Q8IZY2
  ENST ID: ENST00000263094
  CDS Start-End: 232-6672
gggcaagctcagcgcacttggcttaaggggcggcgcgctccctgcctgctgctgggcggagggaaggcggcaagagctgcggagcccctggaagagcttccaggaaccctgcgctgtgggataaaggaatgaggttcagaaaggggcagggagttgcccgcagccgcaccgcacgtcttcagcccgaccgttgtcctgacctctctgtcccgtcccctgcccagtctcaccatggccttctggacacagctgatgctgctgctctggaagaatttcatgtatcgccggagacagccggtccagctcctggtcgaattgctgtggcctctcttcctcttcttcatcctggtggctgttcgccactcccacccgcccctggagcaccatgaatgccacttcccaaacaagccactgccatcggcgggcaccgtgccctggctccagggtctcatctgtaatgtgaacaacacctgctttccgcagctgacaccgggcgaggagcccgggcgcctgagcaacttcaacgactccctggtctcccggctgctagccgatgcccgcactgtgctgggaggggccagtgcccacaggacgctggctggcctagggaagctgatcgccacgctgagggctgcacgcagcacggcccagcctcaaccaaccaagcagtctccactggaaccacccatgctggatgtcgcggagctgctgacgtcactgctgcgcacggaatccctggggttggcactgggccaagcccaggagcccttgcacagcttgttggaggccgctgaggacctggcccaggagctcctggcgctgcgcagcctggtggagcttcgggcactgctgcagagaccccgagggaccagcggccccctggagttgctgtcagaggccctctgcagtgtcaggggacctagcagcacagtgggcccctccctcaactggtacgaggctagtgacctgatggagctggtggggcaggagccagaatccgccctgccagacagcagcctgagccccgcctgctcggagctgattggagccctggacagccacccgctgtcccgcctgctctggagacgcctgaagcctctgatcctcgggaagctactctttgcaccagatacaccttttacccggaagctcatggcccaggtgaaccggaccttcgaggagctcaccctgctgagggatgtccgggaggtgtgggagatgctgggaccccggatcttcaccttcatgaacgacagttccaatgtggccatgctgcagcggctcctgcagatgcaggatgaaggaagaaggcagcccagacctggaggccgggaccacatggaggccctgcgatcctttctggaccctgggagcggtggctacagctggcaggacgcacacgctgatgtggggcacctggtgggcacgctgggccgagtgacggagtgcctgtccttggacaagctggaggcggcaccctcagaggcagccctggtgtcgcgggccctgcaactgctcgcggaacatcgattctgggccggcgtcgtcttcttgggacctgaggactcttcagaccccacagagcacccaaccccagacctgggccccggccacgtgcgcatcaaaatccgcatggacattgacgtggtcacgaggaccaataagatcagggacaggttttgggaccctggcccagccgcggaccccctgaccgacctgcgctacgtgtggggcggcttcgtgtacctgcaagacctggtggagcgtgcagccgtccgcgtgctcagcggcgccaacccccgggccggcctctacctgcagcagatgccctatccgtgctatgtggacgacgtgttcctgcgtgtgctgagccggtcgctgccgctcttcctgacgctggcctggatctactccgtgacactgacagtgaaggccgtggtgcgggagaaggagacgcggctgcgggacaccatgcgcgccatggggctcagccgcgcggtgctctggctaggctggttcctcagctgcctcgggcccttcctgctcagcgccgcactgctggttctggtgctcaagctgggagacatcctcccctacagccacccgggcgtggtcttcctgttcttggcagccttcgcggtggccacggtgacccagagcttcctgctcagcgccttcttctcccgcgccaacctggctgcggcctgcggcggcctggcctacttctccctctacctgccctacgtgctgtgtgtggcttggcgggaccggctgcccgcgggtggccgcgtggccgcgagcctgctgtcgcccgtggccttcggcttcggctgcgagagcctggctctgctggaggagcagggcgagggcgcgcagtggcacaacgtgggcacccggcctacggcagacgtcttcagcctggcccaggtctctggccttctgctgctggacgcggcgctctacggcctcgccacctggtacctggaagctgtgtgcccaggccagtacgggatccctgaaccatggaattttccttttcggaggagctactggtgcggacctcggccccccaagagtccagccccttgccccaccccgctggacccaaaggtgctggtagaagaggcaccgcccggcctgagtcctggcgtctccgttcgcagcctggagaagcgctttcctggaagcccgcagccagccctgcgggggctcagcctggacttctaccagggccacatcaccgccttcctgggccacaacggggccggcaagaccaccaccctgtccatcttgagtggcctcttcccacccagtggtggctctgccttcatcctgggccacgacgtccgctccagcatggccgccatccggccccacctgggcgtctgtcctcagtacaacgtgctgtttgacatgctgaccgtggacgagcacgtctggttctatgggcggctgaagggtctgagtgccgctgtagtgggccccgagcaggaccgtctgctgcaggatgtggggctggtctccaagcagagtgtgcagactcgccacctctctggtgggatgcaacggaagctgtccgtggccattgcctttgtgggcggctcccaagttgttatcctggacgagcctacggctggcgtggatcctgcttcccgccgcggtatttgggagctgctgctcaaataccgagaaggtcgcacgctgatcctctccacccaccacctggatgaggcagagctgctgggagaccgtgtggccgtggtggcaggtggccgcttgtgctgctgtggctccccactcttcctgcgccgtcacctgggctccggctactacctgacgctggtgaaggcccgcctgcccctgaccaccaatgagaaggctgacactgacatggagggcagtgtggacaccaggcaggaaaagaagaatggcagccagggcagcagagtcggcactcctcagctgctggccctggtacagcactgggtgcccggggcacggctggtggaggagctgccacacgagctggtgctggtgctgccctacacgggtgcccatgacggcagcttcgccacactcttccgagagctagacacgcggctggcggagctgaggctcactggctacgggatctccgacaccagcctcgaggagatcttcctgaaggtggtggaggagtgtgctgcggacacagatatggaggatggcagctgcgggcagcacctatgcacaggcattgctggcctagacgtaaccctacggctcaagatgccgccacaggagacagcgctggagaacggggaaccagctgggtcagccccagagactgaccagggctctgggccagacgccgtgggccgggtacagggctgggcactgacccgccagcagctccaggccctgcttctcaagcgctttctgcttgcccgccgcagccgccgcggcctgttcgcccagatcgtgctgcctgccctctttgtgggcctggccctcgtgttcagcctcatcgtgcctcctttcgggcactacccggctctgcggctcagtcccaccatgtacggtgctcaggtgtccttcttcagtgaggacgccccaggggaccctggacgtgcccggctgctcgaggcgctgctgcaggaggcaggactggaggagcccccagtgcagcatagctcccacaggttctcggcaccagaagttcctgctgaagtggccaaggtcttggccagtggcaactggaccccagagtctccatccccagcctgccagtgtagccggcccggtgcccggcgcctgctgcccgactgcccggctgcagctggtggtccccctccgccccaggcagtgaccggctctggggaagtggttcagaacctgacaggccggaacctgtctgacttcctggtcaagacctacccgcgcctggtgcgccagggcctgaagactaagaagtgggtgaatgaggtcagatacggaggcttctcgctggggggccgagacccaggcctgccctcgggccaagagttgggccgctcagtggaggagttgtgggcgctgctgagtcccctgcctggcggggccctcgaccgtgtcctgaaaaacctcacagcctgggctcacagcctggatgctcaggacagtctcaagatctggttcaacaacaaaggctggcactccatggtggcctttgtcaaccgagccagcaacgcaatcctccgtgctcacctgcccccaggcccggcccgccacgcccacagcatcaccacactcaaccaccccttgaacctcaccaaggagcagctgtctgagggtgcactgatggcctcctcggtggacgtcctcgtctccatctgtgtggtctttgccatgtcctttgtcccggccagcttcactcttgtcctcattgaggagcgagtcacccgagccaagcacctgcagctcatggggggcctgtcccccaccctctactggcttggcaactttctctgggacatgtgtaactacttggtgccagcatgcatcgtggtgctcatctttctggccttccagcagagggcatatgtggcccctgccaacctgcctgctctcctgctgttgctactactgtatggctggtcgatcacaccgctcatgtacccagcctccttcttcttctccgtgcccagcacagcctatgtggtgctcacctgcataaacctctttattggcatcaatggaagcatggccacctttgtgcttgagctcttctctgatcagaagctgcaggaggtgagccggatcttgaaacaggtcttccttatcttcccccacttctgcttgggccgggggctcattgacatggtgcggaaccaggccatggctgatgcctttgagcgcttgggagacaggcagttccagtcacccctgcgctgggaggtggtcggcaagaacctcttggccatggtgatacaggggcccctcttccttctcttcacactactgctgcagcaccgaagccaactcctgccacagcccagggtgaggtctctgccactcctgggagaggaggacgaggatgtagcccgtgaacgggagcgggtggtccaaggagccacccagggggatgtgttggtgctgaggaacttgaccaaggtataccgtgggcagaggatgccagctgttgaccgcttgtgcctggggattccccctggtgagtgttttgggctgctgggtgtgaatggagcagggaagacgtccacgtttcgcatggtgacgggggacacattggccagcaggggcgaggctgtgctggcaggccacagcgtggcccgggaacccagtgctgcgcacctcagcatgggatactgccctcaatccgatgccatctttgagctgctgacgggccgcgagcacctggagctgcttgcgcgcctgcgcggtgtcccggaggcccaggttgcccagaccgctggctcgggcctggcgcgtctgggactctcatggtacgcagaccggcctgcaggcacctacagcggagggaacaaacgcaagctggcgacggccctggcgctggttggggacccagccgtggtgtttctggacgagccgaccacaggcatggaccccagcgcgcggcgcttcctttggaacagccttttggccgtggtgcgggagggccgttcagtgatgctcacctcccatagcatggaggagtgtgaagcgctctgctcgcgcctggccatcatggtgaatgggcggttccgctgcctgggcagcccgcaacatctcaagggcagattcgcggcgggtcacacactgaccctgcgggtgcccgccgcaaggtcccagccggcagcggccttcgtggcggccgagttccctggggcggagctgcgcgaggcacatggaggccgcctgcgcttccagctgccgccgggagggcgctgcgccctggcgcgcgtctttggagagctggcggtgcacggcgcagagcacggcgtggaggacttttccgtgagccagacgatgctggaggaggtattcttgtacttctccaaggaccaggggaaggacgaggacaccgaagagcagaaggaggcaggagtgggagtggaccccgcgccaggcctgcagcaccccaaacgcgtcagccagttcctcgatgaccctagcactgccgagactgtgctctgagcctccctcccctgcggggccgcggggaggccctgggaatggcaagggcaaggtagagtgcctaggagccctggactcaggctggcagaggggctggtgccctggagaaaataaagagaaggctggagagaagccgtggtggtg

SEQ ID NO: 110066 - DNA, 6704 bp, Homo sapiens
  Payload ID: 1607
  Gene Symbol: ABCA7
  Gene Name: ATP-binding cassette, sub-family A (ABC1), member 7
  Uniprot ID: Q8IZY2
  ENST ID: ENST00000433129
  CDS Start-End: 117-6557
gtgggataaaggaatgaggttcagaaaggggcagggagttgcccgcagccgcaccgcacgtcttcagcccgaccgttgtcctgacctctctgtcccgtcccctgcccagtctcaccatggccttctggacacagctgatgctgctgctctggaagaatttcatgtatcgccggagacagccggtccagctcctggtcgaattgctgtggcctctcttcctcttcttcatcctggtggctgttcgccactcccacccgcccctggagcaccatgaatgccacttcccaaacaagccactgccatcggcgggcaccgtgccctggctccagggtctcatctgtaatgtgaacaacacctgctttccgcagctgacaccgggcgaggagcccgggcgcctgagcaacttcaacgactccctggtctcccggctgctagccgatgcccgcactgtgctgggaggggccagtgcccacaggacgctggctggcctagggaagctgatcgccacgctgagggctgcacgcagcacggcccagcctcaaccaaccaagcagtctccactggaaccacccatgctggatgtcgcggagctgctgacgtcactgctgcgcacggaatccctggggttggcactgggccaagcccaggagcccttgcacagcttgttggaggccgctgaggacctggcccaggagctcctggcgctgcgcagcctggtggagcttcgggcactgctgcagagaccccgagggaccagcggccccctggagttgctgtcagaggccctctgcagtgtcaggggacctagcagcacagtgggcccctccctcaactggtacgaggctagtgacctgatggagctggtggggcaggagccagaatccgccctgccagacagcagcctgagccccgcctgctcggagctgattggagccctggacagccacccgctgtcccgcctgctctggagacgcctgaagcctctgatcctcgggaagctactctttgcaccagatacaccttttacccggaagctcatggcccaggtgaaccggaccttcgaggagctcaccctgctgagggatgtccgggaggtgtgggagatgctgggaccccggatcttcaccttcatgaacgacagttccaatgtggccatgctgcagcggctcctgcagatgcaggatgaaggaagaaggcagcccagacctggaggccgggaccacatggaggccctgcgatcctttctggaccctgggagcggtggctacagctggcaggacgcacacgctgatgtggggcacctggtgggcacgctgggccgagtgacggagtgcctgtccttggacaagctggaggcggcaccctcagaggcagccctggtgtcgcgggccctgcaactgctcgcggaacatcgattctgggccggcgtcgtcttcttgggacctgaggactcttcagaccccacagagcacccaaccccagacctgggccccggccacgtgcgcatcaaaatccgcatggacattgacgtggtcacgaggaccaataagatcagggacaggttttgggaccctggcccagccgcggaccccctgaccgacctgcgctacgtgtggggcggcttcgtgtacctgcaagacctggtggagcgtgcagccgtccgcgtgctcagcggcgccaacccccgggccggcctctacctgcagcagatgccctatccgtgctatgtggacgacgtgttcctgcgtgtgctgagccggtcgctgccgctcttcctgacgctggcctggatctactccgtgacactgacagtgaaggccgtggtgcgggagaaggagacgcggctgcgggacaccatgcgcgccatggggctcagccgcgcggtgctctggctaggctggttcctcagctgcctcgggcccttcctgctcagcgccgcactgctggttctggtgctcaagctgggagacatcctcccctacagccacccgggcgtggtcttcctgttcttggcagccttcgcggtggccacggtgacccagagcttcctgctcagcgccttcttctcccgcgccaacctggctgcggcctgcggcggcctggcctacttctccctctacctgccctacgtgctgtgtgtggcttggcgggaccggctgcccgcgggtggccgcgtggccgcgagcctgctgtcgcccgtggccttcggcttcggctgcgagagcctggctctgctggaggagcagggcgagggcgcgcagtggcacaacgtgggcacccggcctacggcagacgtcttcagcctggcccaggtctctggccttctgctgctggacgcggcgctctacggcctcgccacctggtacctggaagctgtgtgcccaggccagtacgggatccctgaaccatggaattttccttttcggaggagctactggtgcggacctcggccccccaagagtccagccccttgccccaccccgctggacccaaaggtgctggtagaagaggcaccgcccggcctgagtcctggcgtctccgttcgcagcctggagaagcgctttcctggaagcccgcagccagccctgcgggggctcagcctggacttctaccagggccacatcaccgccttcctgggccacaacggggccggcaagaccaccaccctgtccatcttgagtggcctcttcccacccagtggtggctctgccttcatcctgggccacgacgtccgctccagcatggccgccatccggccccacctgggcgtctgtcctcagtacaacgtgctgtttgacatgctgaccgtggacgagcacgtctggttctatgggcggctgaagggtctgagtgccgctgtagtgggccccgagcaggaccgtctgctgcaggatgtggggctggtctccaagcagagtgtgcagactcgccacctctctggtgggatgcaacggaagctgtccgtggccattgcctttgtgggcggctcccaagttgttatcctggacgagcctacggctggcgtggatcctgcttcccgccgcggtatttgggagctgctgctcaaataccgagaaggtcgcacgctgatcctctccacccaccacctggatgaggcagagctgctgggagaccgtgtggccgtggtggcaggtggccgcttgtgctgctgtggctccccactcttcctgcgccgtcacctgggctccggctactacctgacgctggtgaaggcccgcctgcccctgaccaccaatgagaaggctgacactgacatggagggcagtgtggacaccaggcaggaaaagaagaatggcagccagggcagcagagtcggcactcctcagctgctggccctggtacagcactgggtgcccggggcacggctggtggaggagctgccacacgagctggtgctggtgctgccctacacgggtgcccatgacggcagcttcgccacactcttccgagagctagacacgcggctggcggagctgaggctcactggctacgggatctccgacaccagcctcgaggagatcttcctgaaggtggtggaggagtgtgctgcggacacagatatggaggatggcagctgcgggcagcacctatgcacaggcattgctggcctagacgtaaccctacggctcaagatgccgccacaggagacagcgctggagaacggggaaccagctgggtcagccccagagactgaccagggctctgggccagacgccgtgggccgggtacagggctgggcactgacccgccagcagctccaggccctgcttctcaagcgctttctgcttgcccgccgcagccgccgcggcctgttcgcccagatcgtgctgcctgccctctttgtgggcctggccctcgtgttcagcctcatcgtgcctcctttcgggcactacccggctctgcggctcagtcccaccatgtacggtgctcaggtgtccttcttcagtgaggacgccccaggggaccctggacgtgcccggctgctcgaggcgctgctgcaggaggcaggactggaggagcccccagtgcagcatagctcccacaggttctcggcaccagaagttcctgctgaagtggccaaggtcttggccagtggcaactggaccccagagtctccatccccagcctgccagtgtagccggcccggtgcccggcgcctgctgcccgactgcccggctgcagctggtggtccccctccgccccaggcagtgaccggctctggggaagtggttcagaacctgacaggccggaacctgtctgacttcctggtcaagacctacccgcgcctggtgcgccagggcctgaagactaagaagtgggtgaatgaggtcagatacggaggcttctcgctggggggccgagacccaggcctgccctcgggccaagagttgggccgctcagtggaggagttgtgggcgctgctgagtcccctgcctggcggggccctcgaccgtgtcctgaaaaacctcacagcctgggctcacagcctggatgctcaggacagtctcaagatctggttcaacaacaaaggctggcactccatggtggcctttgtcaaccgagccagcaacgcaatcctccgtgctcacctgcccccaggcccggcccgccacgcccacagcatcaccacactcaaccaccccttgaacctcaccaaggagcagctgtctgagggtgcactgatggcctcctcggtggacgtcctcgtctccatctgtgtggtctttgccatgtcctttgtcccggccagcttcactcttgtcctcattgaggagcgagtcacccgagccaagcacctgcagctcatggggggcctgtcccccaccctctactggcttggcaactttctctgggacatgtgtaactacttggtgccagcatgcatcgtggtgctcatctttctggccttccagcagagggcatatgtggcccctgccaacctgcctgctctcctgctgttgctactactgtatggctggtcgatcacaccgctcatgtacccagcctccttcttcttctccgtgcccagcacagcctatgtggtgctcacctgcataaacctctttattggcatcaatggaagcatggccacctttgtgcttgagctcttctctgatcagaagctgcaggaggtgagccggatcttgaaacaggtcttccttatcttcccccacttctgcttgggccgggggctcattgacatggtgcggaaccaggccatggctgatgcctttgagcgcttgggagacaggcagttccagtcacccctgcgctgggaggtggtcggcaagaacctcttggccatggtgatacaggggcccctcttccttctcttcacactactgctgcagcaccgaagccaactcctgccacagcccagggtgaggtctctgccactcctgggagaggaggacgaggatgtagcccgtgaacgggagcgggtggtccaaggagccacccagggggatgtgttggtgctgaggaacttgaccaaggtataccgtgggcagaggatgccagctgttgaccgcttgtgcctggggattccccctggtgagtgttttgggctgctgggtgtgaatggagcagggaagacgtccacgtttcgcatggtgacgggggacacattggccagcaggggcgaggctgtgctggcaggccacagcgtggcccgggaacccagtgctgcgcacctcagcatgggatactgccctcaatccgatgccatctttgagctgctgacgggccgcgagcacctggagctgcttgcgcgcctgcgcggtgtcccggaggcccaggttgcccagaccgctggctcgggcctggcgcgtctgggactctcatggtacgcagaccggcctgcaggcacctacagcggagggaacaaacgcaagctggcgacggccctggcgctggttggggacccagccgtggtgtttctggacgagccgaccacaggcatggaccccagcgcgcggcgcttcctttggaacagccttttggccgtggtgcgggagggccgttcagtgatgctcacctcccatagcatggaggagtgtgaagcgctctgctcgcgcctggccatcatggtgaatgggcggttccgctgcctgggcagcccgcaacatctcaagggcagattcgcggcgggtcacacactgaccctgcgggtgcccgccgcaaggtcccagccggcagcggccttcgtggcggccgagttccctggggcggagctgcgcgaggcacatggaggccgcctgcgcttccagctgccgccgggagggcgctgcgccctggcgcgcgtctttggagagctggcggtgcacggcgcagagcacggcgtggaggacttttccgtgagccagacgatgctggaggaggtattcttgtacttctccaaggaccaggggaaggacgaggacaccgaagagcagaaggaggcaggagtgggagtggaccccgcgccaggcctgcagcaccccaaacgcgtcagccagttcctcgatgaccctagcactgccgagactgtgctctgagcctccctcccctgcggggccgcggggaggccctgggaatggcaagggcaaggtagagtgcctaggagccctggactcaggctggcagaggggctggtgccctggagaaaataaagagaaggctggagagaagccgtggtggtgaaa

SEQ ID NO: 110067 - DNA, 576 bp, Homo sapiens
  Payload ID: 1607
  Gene Symbol: ABCA7
  Gene Name: ATP-binding cassette, sub-family A (ABC1), member 7
  ENST ID: ENST00000524850
  CDS Start-End: 85-576
ttggcttaaggggcggcgcgctccctgcctgctgctgggcggagggaaggcggcaagagctgcggagcccctggaagtctcaccatggccttctggacacagctgatgctgctgctctggaagaatttcatgtatcgccggagacagccggtccagctcctggtcgaattgctgtggcctctcttcctcttcttcatcctggtggctgttcgccactcccacccgcccctggagcaccatgaatgccacttcccaaacaagccactgccatcggcgggcaccgtgccctggctccagggtctcatctgtaatgtgaacaacacctgctttccgcagctgacaccgggcgaggagcccgggcgcctgagcaacttcaacgactccctggtctcccggctgctagccgatgcccgcactgtgctgggaggggccagtgcccacaggacgctggctggcctagggaagctgatcgccacgctgagggctgcacgcagcacggcccagcctcaaccaaccaagcagtctccactggaaccacccatgctggatgtcgcggagctgctgacgtcactgctg

SEQ ID NO: 110068 - DNA, 1918 bp, Homo sapiens
  Payload ID: 1607
  Gene Symbol: ABCA7
  Gene Name: ATP-binding cassette, sub-family A (ABC1), member 7
  ENST ID: ENST00000525073
  CDS Start-End: 1-1774
ctccatctgtgtggtctttgccatgtcctttgtcccggccagcttcactcttgtcctcattgaggagcgagtcacccgagccaagcacctgcagctcatggggggcctgtcccccaccctctactggcttggcaactttctctgggacatgtgtaactacttggtgccagcatgcatcgtggtgctcatctttctggccttccagcagagggcatatgtggcccctgccaacctgcctgctctcctgctgttgctactactgtatggcacagcctatgtggtgctcacctgcataaacctctttattggcatcaatggaagcatggccacctttgtgcttgagctcttctctgatcagaagctgcaggaggtgagccggatcttgaaacaggtcttccttatcttcccccacttctgcttgggccgggggctcattgacatggtgcggaaccaggccatggctgatgcctttgagcgcttgggagacaggcagttccagtcacccctgcgctgggaggtggtcggcaagaacctcttggccatggtgatacaggggcccctcttccttctcttcacactactgctgcagcaccgaagccaactcctgccacagcccagggtgaggtctctgccactcctgggagaggaggacgaggatgtagcccgtgaacgggagcgggtggtccaaggagccacccagggggatgtgttggtgctgaggaacttgaccaaggtataccgtgggcagaggatgccagctgttgaccgcttgtgcctggggattccccctggtgagtgttttgggctgctgggtgtgaatggagcagggaagacgtccacgtttcgcatggtgacgggggacacattggccagcaggggcgaggctgtgctggcaggccacagcgtggcccgggaacccagtgctgcgcacctcagcatgggatactgccctcaatccgatgccatctttgagctgctgacgggccgcgagcacctggagctgcttgcgcgcctgcgcggtgtcccggaggcccaggttgcccagaccgctggctcgggcctggcgcgtctgggactctcatggtacgcagaccggcctgcaggcacctacagcggagggaacaaacgcaagctggcgacggccctggcgctggttggggacccagccgtggtgtttctggacgagccgaccacaggcatggaccccagcgcgcggcgcttcctttggaacagccttttggccgtggtgcgggagggccgttcagtgatgctcacctcccatagcatggaggagtgtgaagcgctctgctcgcgcctggccatcatggtgaatgggcggttccgctgcctgggcagcccgcaacatctcaagggcagattcgcggcgggtcacacactgaccctgcgggtgcccgccgcaaggtcccagccggcagcggccttcgtggcggccgagttccctggggcggagctgcgcgaggcacatggaggccgcctgcgcttccagctgccgccgggagggcgctgcgccctggcgcgcgtctttggagagctggcggtgcacggcgcagagcacggcgtggaggacttttccgtgagccagacgatgctggaggaggtattcttgtacttctccaaggaccaggggaaggacgaggacaccgaagagcagaaggaggcaggagtgggagtggaccccgcgccaggcctgcagcaccccaaacgcgtcagccagttcctcgatgaccctagcactgccgagactgtgctctgagcctccctcccctgcggggccgcggggaggccctgggaatggcaagggcaaggtagagtgcctaggagccctggactcaggctggcagaggggctggtgccctggagaaaataaagagaaggctggagagaagccgtggtggtg

SEQ ID NO: 110069 - DNA, 569 bp, Homo sapiens
  Payload ID: 1607
  Gene Symbol: ABCA7
  Gene Name: ATP-binding cassette, sub-family A (ABC1), member 7
  ENST ID: ENST00000531467
  CDS Start-End: 161-569
actgtttgcctcgctctaatcagagcttccaggaaccctgcgctgtgggataaaggaatgaggttcagaaaggggcagggagttgcccgcagccgcaccgcacgtcttcagcccgaccgttgtcctgacctctctgtcccgtcccctgcccagtctcaccatggccttctggacacagctgatgctgctgctctggaagaatttcatgtatcgccggagacagccgctcctggtcgaattgctgtggcctctcttcctcttcttcatcctggtggctgttcgccactcccacccgcccctggagcaccatgaatgccacttcccaaacaagccactgccatcggcgggcaccgtgccctggctccagggtctcatctgtaatgtgaacaacacctgctttccgcagctgacaccgggcgaggagcccgggcgcctgagcaacttcaacgactccctggtctcccggctgctagccgatgcccgcactgtgctgggaggggccagtgcccacaggacgctggctggcctagggaagctgatcgccacgctgagggctgcacgcagcacgg

SEQ ID NO: 110070 - DNA, 571 bp, Homo sapiens
  Payload ID: 1607
  Gene Symbol: ABCA7
  Gene Name: ATP-binding cassette, sub-family A (ABC1), member 7
  ENST ID: ENST00000530092
  CDS Start-End: 1-187
gccacaggagacagcgctggagaacggggaaccagctgggtcagccccagagactgaccagggctctgggccagacgccgtgggccgggtacagggctgggcactgacccgccagcagctccaggccctgcttctcaagcgctttctgcttgcccgccgcagccgccgcggcctgttcgcccagtgaggacgccccaggggaccctggacgtgcccggctgctcgaggcgctgctgcaggaggcaggactggaggagcccccagtgcagcatagctcccacaggttctcggcaccagaagttcctgctgaagtggccaaggtcttggccagtggcaactggaccccagagtctccatccccagcctgccagtgtagccggcccggtgcccggcgcctgctgcccgactgcccggctgcagctggtggtccccctccgccccaggcagtgaccggctctggggaagtggttcagaacctgacaggccggaacctgtctgacttcctggtcaagacctacccgcgcctggtgcgccagggcctgaagactaagaagtgggtgaatgaggtcag

SEQ ID NO: 110071 - DNA, 6211 bp, Homo sapiens
  Payload ID: 1607
  Gene Symbol: ABCA7
  Gene Name: ATP-binding cassette, sub-family A (ABC1), member 7
  Uniprot ID: Q8IZY2
  ENST ID: ENST00000435683
  CDS Start-End: 38-6064
tcagtttccctatttgtaaagtgggggctatgatagtatggtctgcctgggaactggccagagcgctggacccctagtgagtgttcaaaatcattgtcccccttgtggtctttctccccaggaatccctggggttggcactgggccaagcccaggagcccttgcacagcttgttggaggccgctgaggacctggcccaggagctcctggcgctgcgcagcctggtggagcttcgggcactgctgcagagaccccgagggaccagcggccccctggagttgctgtcagaggccctctgcagtgtcaggggacctagcagcacagtgggcccctccctcaactggtacgaggctagtgacctgatggagctggtggggcaggagccagaatccgccctgccagacagcagcctgagccccgcctgctcggagctgattggagccctggacagccacccgctgtcccgcctgctctggagacgcctgaagcctctgatcctcgggaagctactctttgcaccagatacaccttttacccggaagctcatggcccaggtgaaccggaccttcgaggagctcaccctgctgagggatgtccgggaggtgtgggagatgctgggaccccggatcttcaccttcatgaacgacagttccaatgtggccatgctgcagcggctcctgcagatgcaggatgaaggaagaaggcagcccagacctggaggccgggaccacatggaggccctgcgatcctttctggaccctgggagcggtggctacagctggcaggacgcacacgctgatgtggggcacctggtgggcacgctgggccgagtgacggagtgcctgtccttggacaagctggaggcggcaccctcagaggcagccctggtgtcgcgggccctgcaactgctcgcggaacatcgattctgggccggcgtcgtcttcttgggacctgaggactcttcagaccccacagagcacccaaccccagacctgggccccggccacgtgcgcatcaaaatccgcatggacattgacgtggtcacgaggaccaataagatcagggacaggttttgggaccctggcccagccgcggaccccctgaccgacctgcgctacgtgtggggcggcttcgtgtacctgcaagacctggtggagcgtgcagccgtccgcgtgctcagcggcgccaacccccgggccggcctctacctgcagcagatgccctatccgtgctatgtggacgacgtgttcctgcgtgtgctgagccggtcgctgccgctcttcctgacgctggcctggatctactccgtgacactgacagtgaaggccgtggtgcgggagaaggagacgcggctgcgggacaccatgcgcgccatggggctcagccgcgcggtgctctggctaggctggttcctcagctgcctcgggcccttcctgctcagcgccgcactgctggttctggtgctcaagctgggagacatcctcccctacagccacccgggcgtggtcttcctgttcttggcagccttcgcggtggccacggtgacccagagcttcctgctcagcgccttcttctcccgcgccaacctggctgcggcctgcggcggcctggcctacttctccctctacctgccctacgtgctgtgtgtggcttggcgggaccggctgcccgcgggtggccgcgtggccgcgagcctgctgtcgcccgtggccttcggcttcggctgcgagagcctggctctgctggaggagcagggcgagggcgcgcagtggcacaacgtgggcacccggcctacggcagacgtcttcagcctggcccaggtctctggccttctgctgctggacgcggcgctctacggcctcgccacctggtacctggaagctgtgtgcccaggccagtacgggatccctgaaccatggaattttccttttcggaggagctactggtgcggacctcggccccccaagagtccagccccttgccccaccccgctggacccaaaggtgctggtagaagaggcaccgcccggcctgagtcctggcgtctccgttcgcagcctggagaagcgctttcctggaagcccgcagccagccctgcgggggctcagcctggacttctaccagggccacatcaccgccttcctgggccacaacggggccggcaagaccaccaccctgtccatcttgagtggcctcttcccacccagtggtggctctgccttcatcctgggccacgacgtccgctccagcatggccgccatccggccccacctgggcgtctgtcctcagtacaacgtgctgtttgacatgctgaccgtggacgagcacgtctggttctatgggcggctgaagggtctgagtgccgctgtagtgggccccgagcaggaccgtctgctgcaggatgtggggctggtctccaagcagagtgtgcagactcgccacctctctggtgggatgcaacggaagctgtccgtggccattgcctttgtgggcggctcccaagttgttatcctggacgagcctacggctggcgtggatcctgcttcccgccgcggtatttgggagctgctgctcaaataccgagaaggtcgcacgctgatcctctccacccaccacctggatgaggcagagctgctgggagaccgtgtggccgtggtggcaggtggccgcttgtgctgctgtggctccccactcttcctgcgccgtcacctgggctccggctactacctgacgctggtgaaggcccgcctgcccctgaccaccaatgagaaggctgacactgacatggagggcagtgtggacaccaggcaggaaaagaagaatggcagccagggcagcagagtcggcactcctcagctgctggccctggtacagcactgggtgcccggggcacggctggtggaggagctgccacacgagctggtgctggtgctgccctacacgggtgcccatgacggcagcttcgccacactcttccgagagctagacacgcggctggcggagctgaggctcactggctacgggatctccgacaccagcctcgaggagatcttcctgaaggtggtggaggagtgtgctgcggacacagatatggaggatggcagctgcgggcagcacctatgcacaggcattgctggcctagacgtaaccctacggctcaagatgccgccacaggagacagcgctggagaacggggaaccagctgggtcagccccagagactgaccagggctctgggccagacgccgtgggccgggtacagggctgggcactgacccgccagcagctccaggccctgcttctcaagcgctttctgcttgcccgccgcagccgccgcggcctgttcgcccagatcgtgctgcctgccctctttgtgggcctggccctcgtgttcagcctcatcgtgcctcctttcgggcactacccggctctgcggctcagtcccaccatgtacggtgctcaggtgtccttcttcagtgaggacgccccaggggaccctggacgtgcccggctgctcgaggcgctgctgcaggaggcaggactggaggagcccccagtgcagcatagctcccacaggttctcggcaccagaagttcctgctgaagtggccaaggtcttggccagtggcaactggaccccagagtctccatccccagcctgccagtgtagccggcccggtgcccggcgcctgctgcccgactgcccggctgcagctggtggtccccctccgccccaggcagtgaccggctctggggaagtggttcagaacctgacaggccggaacctgtctgacttcctggtcaagacctacccgcgcctggtgcgccagggcctgaagactaagaagtgggtgaatgaggtcagatacggaggcttctcgctggggggccgagacccaggcctgccctcgggccaagagttgggccgctcagtggaggagttgtgggcgctgctgagtcccctgcctggcggggccctcgaccgtgtcctgaaaaacctcacagcctgggctcacagcctggatgctcaggacagtctcaagatctggttcaacaacaaaggctggcactccatggtggcctttgtcaaccgagccagcaacgcaatcctccgtgctcacctgcccccaggcccggcccgccacgcccacagcatcaccacactcaaccaccccttgaacctcaccaaggagcagctgtctgagggtgcactgatggcctcctcggtggacgtcctcgtctccatctgtgtggtctttgccatgtcctttgtcccggccagcttcactcttgtcctcattgaggagcgagtcacccgagccaagcacctgcagctcatggggggcctgtcccccaccctctactggcttggcaactttctctgggacatgtgtaactacttggtgccagcatgcatcgtggtgctcatctttctggccttccagcagagggcatatgtggcccctgccaacctgcctgctctcctgctgttgctactactgtatggctggtcgatcacaccgctcatgtacccagcctccttcttcttctccgtgcccagcacagcctatgtggtgctcacctgcataaacctctttattggcatcaatggaagcatggccacctttgtgcttgagctcttctctgatcagaagctgcaggaggtgagccggatcttgaaacaggtcttccttatcttcccccacttctgcttgggccgggggctcattgacatggtgcggaaccaggccatggctgatgcctttgagcgcttgggagacaggcagttccagtcacccctgcgctgggaggtggtcggcaagaacctcttggccatggtgatacaggggcccctcttccttctcttcacactactgctgcagcaccgaagccaactcctgccacagcccagggtgaggtctctgccactcctgggagaggaggacgaggatgtagcccgtgaacgggagcgggtggtccaaggagccacccagggggatgtgttggtgctgaggaacttgaccaaggtataccgtgggcagaggatgccagctgttgaccgcttgtgcctggggattccccctggtgagtgttttgggctgctgggtgtgaatggagcagggaagacgtccacgtttcgcatggtgacgggggacacattggccagcaggggcgaggctgtgctggcaggccacagcgtggcccgggaacccagtgctgcgcacctcagcatgggatactgccctcaatccgatgccatctttgagctgctgacgggccgcgagcacctggagctgcttgcgcgcctgcgcggtgtcccggaggcccaggttgcccagaccgctggctcgggcctggcgcgtctgggactctcatggtacgcagaccggcctgcaggcacctacagcggagggaacaaacgcaagctggcgacggccctggcgctggttggggacccagccgtggtgtttctggacgagccgaccacaggcatggaccccagcgcgcggcgcttcctttggaacagccttttggccgtggtgcgggagggccgttcagtgatgctcacctcccatagcatggaggagtgtgaagcgctctgctcgcgcctggccatcatggtgaatgggcggttccgctgcctgggcagcccgcaacatctcaagggcagattcgcggcgggtcacacactgaccctgcgggtgcccgccgcaaggtcccagccggcagcggccttcgtggcggccgagttccctggggcggagctgcgcgaggcacatggaggccgcctgcgcttccagctgccgccgggagggcgctgcgccctggcgcgcgtctttggagagctggcggtgcacggcgcagagcacggcgtggaggacttttccgtgagccagacgatgctggaggaggtattcttgtacttctccaaggaccaggggaaggacgaggacaccgaagagcagaaggaggcaggagtgggagtggaccccgcgccaggcctgcagcaccccaaacgcgtcagccagttcctcgatgaccctagcactgccgagactgtgctctgagcctccctcccctgcggggccgcggggaggccctgggaatggcaagggcaaggtagagtgcctaggagccctggactcaggctggcagaggggctggtgccctggagaaaataaagagaaggctggagagaagccgtggtggtgaaa

SEQ ID NO: 110072 - DNA, 343 bp, Homo sapiens
  Payload ID: 1607
  Gene Symbol: ABCA7
  Gene Name: ATP-binding cassette, sub-family A (ABC1), member 7
  ENST ID: ENST00000611490
  CDS Start-End: 234-343
gcgggcaagctcagcgcacttggcttaaggggcggcgcgctccctgcctgctgctgggcggagggaaggcggcaagagctgcggagcccctggaagagcttccaggaaccctgcgctgtgggataaaggaatgaggttcagaaaggggcagggagttgcccgcagccgcaccgcacgtcttcagcccgaccgttgtcctgacctctctgtcccgtcccctgcccagtctcaccatggccttctggacacagctgatgctgctgctctggaagaatttcatgtatcgccggagacagccggtccagctcctggtcgaattgctgtggcctctcttcctcttctt

SEQ ID NO: 110073 - DNA, 520 bp, Homo sapiens
  Payload ID: 1607
  Gene Symbol: ABCA7
  Gene Name: ATP-binding cassette, sub-family A (ABC1), member 7
  ENST ID: ENST00000529442
  CDS Start-End: 1-289
cctcgtctccatctgtgtggtctttgccatgtcctttgtcccggccagcttcactcttgtcctcattgaggagcgagtcacccgagccaagcacctgcagctcatggggggcctgtcccccaccctctactggcttggcaactttctctgggacatgtgtaactacttggtgccagcatgcatcgtggtgctcatctttctggccttccagcagagggcatatgtggcccctgccaacctgcctgctctcctgctgttgctactactgtatggaagctgcaggaggtgagccggatcttgaaacaggtcttccttatcttcccccacttctgcttgggccgggggctcattgacatggtgcggaaccaggccatggctgatgcctttgagcgcttgggagacaggcagttccagtcacccctgcgctgggaggtggtcggcaagaacctcttggccatggtgatacaggggcccctcttccttctcttcacactactgctgcagcaccgaagccaactcc

SEQ ID NO: 110074 - DNA, 876 bp, Homo sapiens
  Payload ID: 1607
  Gene Symbol: ABCA7
  Gene Name: ATP-binding cassette, sub-family A (ABC1), member 7
  ENST ID: ENST00000612569
  CDS Start-End: 1-843
cgggaacccagtgctgcgcacctcagcatgggatactgccctcaatccgatgccatctttgagctgctgacgggccgcgagcacctggagctgcttgcgcgcctgcgcggtgtcccggaggcccaggttgcccagaccgctggctcgggcctggcgcgtctgggactctcatggtacgcagaccggcctgcaggcacctacagcggagggaacaaacgcaagctggcgacggccctggcgctggttggggacccagccgtggtgtttctggacgagccgaccacaggcatggaccccagcgcgcggcgcttcctttggaacagccttttggccgtggtgcgggagggccgttcagtgatgctcacctcccatagcatggaggagtgtgaagcgctctgctcgcgcctggccatcatggtgaatgggcggttccgctgcctgggcagcccgcaacatctcaagggcagattcgcggcgggtcacacactgaccctgcgggtgcccgccgcaaggtcccagccggcagcggccttcgtggcggccgagttccctggggcggagctgcgcgaggcacatggaggccgcctgcgcttccagctgccgccgggagggcgctgcgccctggcgcgcgtctttggagagctggcggtgcacggcgcagagcacggcgtggaggacttttccgtgagccagacgatgctggaggaggaccaggggaaggacgaggacaccgaagagcagaaggaggcaggagtgggagtggaccccgcgccaggcctgcagcaccccaaacgcgtcagccagttcctcgatgaccctagcactgccgagactgtgctctgagcctccctcccctgcggggccgcggggaggccc

SEQ ID NO: 110075 - DNA, 5677 bp, Homo sapiens
  Payload ID: 1608
  Gene Symbol: ABCA8
  Gene Name: ATP-binding cassette, sub-family A (ABC1), member 8
  Uniprot ID: O94911
  ENST ID: ENST00000269080
  CDS Start-End: 139-4884
cagaagtcaaatagttaaagcaaattctagatacatggtagagaccaggagaaaatatgaataactttcttctaaacaaggagctcagtggataaaccatacctctagattccttgcttccattttcccagaaacaagatgaggaagagaaagatcagtgtgtgtcaacaaacttgggccttattatgcaagaactttcttaaaaaatggagaatgaaaagagagtccttaatggaatggctgaattcattgctcctactactttgtttgtatatatatcctcatagtcatcaagtaaatgatttttcttcactgcttaccatggacctgggacgggtagatacatttaatgaatccagattttctgttgtatacacacctgtcaccaacacgacccaacagataatgaataaagtagcctctactcccttcctggcaggtaaagaggtcttgggactgccagatgaggaaagtattaaagaattcacagcaaattatcctgaagaaatagtaagagtcacctttactaatacatactcatatcatttgaagttcttgctaggacatggaatgccagcaaagaaggagcacaaggaccatacagctcattgttatgaaacaaatgaagatgtttactgtgaagtttcagtattttggaaggaaggttttgtggctcttcaagctgccattaatgctgctattatagaaatcacaacaaatcactcagtgatggaggagctgatgtcagttactggaaaaaatatgaagatgcattccttcattggtcaatcaggagttataactgatttgtaccttttttcctgcattatttcattttcctcattcatttactatgcatctgttaatgtcacaagagagaggaaaaggatgaaggccttgatgacaatgatgggtcttcgggattcagcgttctggctctcctggggtttgctctatgctggtttcatcttcattatggcccttttcttggcacttgttataagatctacccagtttatcattttgtctggcttcatggtagtcttcagcctctttctcctgtatggattatctttggtagctttggctttcttaatgagcatcttggtaaagaaatctttcctcaccggcctggtcgtgttcctcctcactgtcttttgggggtgtctggggttcacatcactgtacagacaccttcctgcatccttggagtggattttaagcttgcttagtccctttgccttcatgcttggaatggcccagcttttacacttggactatgatttgaattctaatgcatttcctcatccatcggacggctcaaatctcattgtagcaacaaatttcatgttggcatttgacacttgcctctatctggcattggcgatttactttgaaaaaattttgccaaatgaatatggacatcgacgtccacctttgtttttcctgaagtcctcattttggtctcaaacacaaaagactgatcacgtggcccttgaagatgaaatggatgccgatccttcatttcatgactcttttgaacaagcgcctccagaattccaagggaaagaagccatcagaatcagaaatgttacaaaagaatataaaggaaagcctgataaaatagaagccttgaaagatctggtatttgacatttacgaaggccaaatcactgcaatacttggtcacagtggagctggaaagtcaacactgctaaacattcttagtgggttgtctgttcccaccaaaggttcagtcaccatctataacaataagctttcagaaatggctgacctagaaaatctcagcaagctgaccggagtttgtccacaatccaatgtgcaatttgacttcctcactgtaagagaaaacctcagactctttgctaaaataaaagggattctgccacaagaagtggataaagagattttcctgttggatgaaccaactgctggattggatcccttttcaagacaccaagtatggaaccttctgaaagaacgcaaaacagaccgcgtgatcctcttcagtacccagttcatggatgaggccgacatcctggcggacaggaaagtatttctctcccaagggaagctaaagtgcgcgggctcttctttgtttctaaagaagaaatgggggattggatatcacttaagcttgcagttaaatgaaatatgtgttgaggaaaacataacatcacttgttaaacagcacatccctgatgccaaattatcagccaaaagcgaaggaaaacttatttatacattacccttagaaagaacaaataaatttccagaactttacaaggatcttgatagctatcctgacctaggaattgagaattatggtgtttccatgacaactttgaatgaagtattcctgaagctagaaggaaaatctacaattaatgaatcggacattgctattttgggagaagtacaagcggaaaaagctgacgacactgaaaggcttgttgagatggaacaagtcctctcttcacttaacaagatgagaaagacaataggtggtgtggctctctggcgacagcaaatctgcgcaattgcaagggttcgcttgttaaagttaaagcatgaaagaaaagctcttttagcactgctattaattctaatggctggattttgccctcttcttgtggagtataccatggtgaaaatatatcaaaacagttacacctgggaactttctcctcatttgtatttccttgctcctggacaacaaccacatgaccctctcactcaactactgatcatcaataaaacaggggcaagcattgatgactttatacagtctgtggagcaccagaacatagctttagaagtggatgcatttggaactagaaatggcacagatgacccatcttataatggagccatcacagtgtgttgtaatgaaaagaattacagcttttcgttagcatgcaatgccaaaagattgaattgcttcccagttcttatggacattgttagtaatgggctacttggaatggttaaaccatcagtacatatccgaactgaaagaagtacatttttggagaatggacaggacaatccaatcggattcctggcatatatcatgttctggctggttttaacatcgagttgcccaccttacattgccatgagcagcatcgatgattataagaacagagctcggtcccagctacggatttccggactctccccttctgcttactggtttgggcaggcgctggtggatgtttccctgtacttcttggtcttcgtttttatatatttaatgagctacatttcaaacttcgaagacatgctacttacaataattcatattattcaaatcccatgtgctgttggttattccttttccctcatcttcatgacatacgtgatttccttcatctttcgcaaggggagaaaaaatagtggcatttggtcattttgtttctatgttgtcactgtattctctgtggctggatttgcgttcagtatcttcgaaagtgatattccatttatcttcacttttttaataccacctgccacaatgattggctgtttgttcttatcttctcatcttctcttttcttctctcttttctgaagaacgaatggatgtacagccatttctggtattcctaattcctttccttcattttatcatttttctttttactcttcgatgtctggaatggaagtttggaaagaaatcaatgagaaaggatcctttctttagaatttctccaagaagtagtgatgtgtgtcaaaatccagaagaaccagaaggagaggatgaagatgttcagatggaaagagtgagaacagcaaatgccttgaattctactaattttgatgagaagccagtcatcattgccagctgtctacgcaaggagtatgcagggaagaggaaaggctgtttttccaagaggaagaataagatagccacgagaaatgtctccttctgtgttagaaaaggtgaagttttaggattattaggacacaatggagctggtaaaagcacatccattaaggtgataactggagacacaaaaccaactgctggacaagtgctactgaaagggagcggtggaggggatgccctggagttcctggggtactgccctcaggagaacgcgctgtggcccaacctgacagtgaggcagcacctggaggtgtacgccgccgtgaaagggctgaggaaaggggatgctgaggttgccatcacacggttagtggatgcgctcaagctgcaggaccagctgaagtctcccgtgaagaccttgtcagagggaataaagagaaagctgtgctttgtcctgagcatactggggaacccgtcagtggtgcttctggatgagccgtcgaccgggatggaccccgaggggcagcagcaaatgtggcaggccatccgggccacctttagaaacacggaaaggggtgccctcctaaccacccactacatggcagaggctgaggccgtgtgtgaccgagtggccatcatggtatctgggaggttgagatgtatcggttccatccaacacctgaaaagcaaatttggcaaagattacctgctggagatgaaggtgaagaacctggcacaagtggagcccctccatgcagagatcctgaggcttttcccccaggctgctcggcaggaaaggtactcctctctgatggtttataagttgccagtggaagatgtgcaacctttagcccaagctttcttcaaattagagaaggttaaacagagctttgacctagaggagtacagcctctcacagtctaccctggagcaggttttcctggagctctccaaggagcaggagctgggtgattttgaggaggattttgatccctcagtgaagtggaagctcctcccccaggaagagccttaaaaccccaaattctgtgttcctgtttaaacccgtggttttttttaaatacatttatttttatagcagcaatgttctatttttagaaactatattataagtacagaaatggttctccgtgtggtgggaggaggaggttcgggtgctgggtaagtgccatgtcagtgtggacagaggcatttgactaagccaacctcctctcacagcctctgtatctctgcaggccatactggttccattgttctgtataatactgaataaataaatttacttttacatgatcgtataagtttctagataagataaacaaattttgtttaaatttttttaataaaaatcttaaaacactttttttctaacctagactgagaaattcatgtttacttttctaggtgtatgatactttgtaaagttgatactttcctaagaatttaacatgtcatatttttgaaatagatttaagtgtgcttcttattgctaaaaatactaaatgtcatgggtcatagtatctgatatcaatatcgttgataacatatccacaggtaacaccatgatgtaggcataaatggaaaacaaaaaccctactatttcaaatatattgtacttttttatttctgtaagccaactgtgtgccattttcactggacttttaaatctagactttagtgatgtctacattgtaaatgatcttttgtggatatttgtcacttggtttcagaaagttcacaaatgtagcaacagctcacatgactgagtaggtagaaaatgtgaaataaatctcatatatatagttttg

SEQ ID NO: 110076 - DNA, 5823 bp, Homo sapiens
  Payload ID: 1608
  Gene Symbol: ABCA8
  Gene Name: ATP-binding cassette, sub-family A (ABC1), member 8
  ENST ID: ENST00000430352
  CDS Start-End: 180-5030
ataacctccactctgaaagcagtcttcacagaaacttttcacagaagtcaaatagttaaagcaaattctagatacatggtagagaccaggagaaaatatgaataactttcttctaaacaaggagctcagtggataaaccatacctctagattccttgcttccattttcccagaaacaagatgaggaagagaaagatcagtgtgtgtcaacaaacttgggccttattatgcaagaactttcttaaaaaatggagaatgaaaagagagtccttaatggaatggctgaattcattgctcctactactttgtttgtatatatatcctcatagtcatcaagtaaatgatttttcttcactgcttaccatggacctgggacgggtagatacatttaatgaatccagattttctgttgtatacacacctgtcaccaacacgacccaacagataatgaataaagtagcctctactcccttcctggcaggtaaagaggtcttgggactgccagatgaggaaagtattaaagaattcacagcaaattatcctgaagaaatagtaagagtcacctttactaatacatactcatatcatttgaagttcttgctaggacatggaatgccagcaaagaaggagcacaaggaccatacagctcattgttatgaaacaaatgaagatgtttactgtgaagtttcagtattttggaaggaaggttttgtggctcttcaagctgccattaatgctgctattatagaaatcacaacaaatcactcagtgatggaggagctgatgtcagttactggaaaaaatatgaagatgcattccttcattggtcaatcaggagttataactgatttgtaccttttttcctgcattatttcattttcctcattcatttactatgcatctgttaatgtcacaagagagaggaaaaggatgaaggccttgatgacaatgatgggtcttcgggattcagcgttctggctctcctggggtttgctctatgctggtttcatcttcattatggcccttttcttggcacttgttataagatctacccagtttatcattttgtctggcttcatggtagtcttcagcctctttctcctgtatggattatctttggtagctttggctttcttaatgagcatcttggtaaagaaatctttcctcaccggcctggtcgtgttcctcctcactgtcttttgggggtgtctggggttcacatcactgtacagacaccttcctgcatccttggagtggattttaagcttgcttagtccctttgccttcatgcttggaatggcccagcttttacacttggactatgatttgaattctaatgcatttcctcatccatcggacggctcaaatctcattgtagcaacaaatttcatgttggcatttgacacttgcctctatctggcattggcgatttactttgaaaaaattttgccaaatgaatatggacatcgacgtccacctttgtttttcctgaagtcctcattttggtctcaaacacaaaagactgatcacgtggcccttgaagatgaaatggatgccgatccttcatttcatgactcttttgaacaagcgcctccagaattccaagggaaagaagccatcagaatcagaaatgttacaaaagaatataaaggaaagcctgataaaatagaagccttgaaagatctggtatttgacatttacgaaggccaaatcactgcaatacttggtcacagtggagctggaaagtcaacactgctaaacattcttagtgggttgtctgttcccaccaaaggttcagtcaccatctataacaataagctttcagaaatggctgacctagaaaatctcagcaagctgaccggagtttgtccacaatccaatgtgcaatttgacttcctcactgtaagagaaaacctcagactctttgctaaaataaaagggattctgccacaagaagtggataaagagatacaaagggttctgctggaattggaaatgaaaaatattcaggatgttcttgctcaaaacttaagtggtggacagaaaagaaagctaacctttgggattgccattttaggagatcctcagattttcctgttggatgaaccaactgctggattggatcccttttcaagacaccaagtatggaaccttctgaaagaacgcaaaacagaccgcgtgatcctcttcagtacccagttcatggatgaggccgacatcctggcggacaggaaagtatttctctcccaagggaagctaaagtgcgcgggctcttctttgtttctaaagaagaaatgggggattggatatcacttaagcttgcagttaaatgaaatatgtgttgaggaaaacataacatcacttgttaaacagcacatccctgatgccaaattatcagccaaaagcgaaggaaaacttatttatacattacccttagaaagaacaaataaatttccagaactttacaaggatcttgatagctatcctgacctaggaattgagaattatggtgtttccatgacaactttgaatgaagtattcctgaagctagaaggaaaatctacaattaatgaatcggacattgctattttgggagaagtacaagcggaaaaagctgacgacactgaaaggcttgttgagatggaacaagtcctctcttcacttaacaagatgagaaagacaataggtggtgtggctctctggcgacagcaaatctgcgcaattgcaagggttcgcttgttaaagttaaagcatgaaagaaaagctcttttagcactgctattaattctaatggctggattttgccctcttcttgtggagtataccatggtgaaaatatatcaaaacagttacacctgggaactttctcctcatttgtatttccttgctcctggacaacaaccacatgaccctctcactcaactactgatcatcaataaaacaggggcaagcattgatgactttatacagtctgtggagcaccagaacatagctttagaagtggatgcatttggaactagaaatggcacagatgacccatcttataatggagccatcacagtgtgttgtaatgaaaagaattacagcttttcgttagcatgcaatgccaaaagattgaattgcttcccagttcttatggacattgttagtaatgggctacttggaatggttaaaccatcagtacatatccgaactgaaagaagtacatttttggagaatggacaggacaatccaatcggattcctggcatatatcatgttctggctggttttaacatcgagttgcccaccttacattgccatgagcagcatcgatgattataagaacagagctcggtcccagctacggatttccggactctccccttctgcttactggtttgggcaggcgctggtggatgtttccctgtacttcttggtcttcgtttttatatatttaatgagctacatttcaaacttcgaagacatgctacttacaataattcatattattcaaatcccatgtgctgttggttattccttttccctcatcttcatgacatacgtgatttccttcatctttcgcaaggggagaaaaaatagtggcatttggtcattttgtttctatgttgtcactgtattctctgtggctggatttgcgttcagtatcttcgaaagtgatattccatttatcttcacttttttaataccacctgccacaatgattggctgtttgttcttatcttctcatcttctcttttcttctctcttttctgaagaacgaatggatgtacagccatttctggtattcctaattcctttccttcattttatcatttttctttttactcttcgatgtctggaatggaagtttggaaagaaatcaatgagaaaggatcctttctttagtagtgatgtgtgtcaaaatccagaagaaccagaaggagaggatgaagatgttcagatggaaagagtgagaacagcaaatgccttgaattctactaattttgatgagaagccagtcatcattgccagctgtctacgcaaggagtatgcagggaagaggaaaggctgtttttccaagaggaagaataagatagccacgagaaatgtctccttctgtgttagaaaaggtgaagttttaggattattaggacacaatggagctggtaaaagcacatccattaaggtgataactggagacacaaaaccaactgctggacaagtgctactgaaagggagcggtggaggggatgccctggagttcctggggtactgccctcaggagaacgcgctgtggcccaacctgacagtgaggcagcacctggaggtgtacgccgccgtgaaagggctgaggaaaggggatgctgaggttgccatcacacggttagtggatgcgctcaagctgcaggaccagctgaagtctcccgtgaagaccttgtcagagggaataaagagaaagctgtgctttgtcctgagcatactggggaacccgtcagtggtgcttctggatgagccgtcgaccgggatggaccccgaggggcagcagcaaatgtggcaggccatccgggccacctttagaaacacggaaaggggtgccctcctaaccacccactacatggcagaggctgaggccgtgtgtgaccgagtggccatcatggtatctgggaggttgagatgtatcggttccatccaacacctgaaaagcaaatttggcaaagattacctgctggagatgaaggtgaagaacctggcacaagtggagcccctccatgcagagatcctgaggcttttcccccaggctgctcggcaggaaaggtactcctctctgatggtttataagttgccagtggaagatgtgcaacctttagcccaagctttcttcaaattagagaaggttaaacagagctttgacctagaggagtacagcctctcacagtctaccctggagcaggttttcctggagctctccaaggagcaggagctgggtgattttgaggaggattttgatccctcagtgaagtggaagctcctcccccaggaagagccttaaaaccccaaattctgtgttcctgtttaaacccgtggttttttttaaatacatttatttttatagcagcaatgttctatttttagaaactatattataagtacagaaatggttctccgtgtggtgggaggaggaggttcgggtgctgggtaagtgccatgtcagtgtggacagaggcatttgactaagccaacctcctctcacagcctctgtatctctgcaggccatactggttccattgttctgtataatactgaataaataaatttacttttacatgatcgtataagtttctagataagataaacaaattttgtttaaatttttttaataaaaatcttaaaacactttttttctaacctagactgagaaattcatgtttacttttctaggtgtatgatactttgtaaagttgatactttcctaagaatttaacatgtcatatttttgaaatagatttaagtgtgcttcttattgctaaaaatactaaatgtcatgggtcatagtatctgatatcaatatcgttgataacatatccacaggtaacaccatgatgtaggcataaatggaaaacaaaaaccctactatttcaaatatattgtacttttttatttctgtaagccaactgtgtgccattttcactggacttttaaatctagactttagtgatgtctacattgtaaatgatcttttgtggatatttgtcacttggtttcagaaagttcacaaatgtagcaacagctcacatgactgagtaggtagaaaatgtgaaataaatctcatatatatagttttg

SEQ ID NO: 110077 - DNA, 509 bp, Homo sapiens
  Payload ID: 1608
  Gene Symbol: ABCA8
  Gene Name: ATP-binding cassette, sub-family A (ABC1), member 8
  ENST ID: ENST00000585531
  CDS Start-End: 164-509
agcgtcctctcccccgccgtggtgagagcctgtctctgctttgtatccgtgctgggtccttgttgcaaatctcagctgcaaattatctttgcttgggaatgggaactggaagcttcctgccccacctgcagtggtagcaggctgttgctttttaccagacaagatgaggaagagaaagatcagtgtgtgtcaacaaacttgggccttattatgcaagaactttcttaaaaaatggagaatgaaaagagagtccttaatggaatggctgaattcattgctcctactactttgtttgtatatatatcctcatagtcatcaagtaaatgatttttcttcactgcttaccatggacctgggacgggtagatacatttaatgaatccagattttctgttgtatacacacctgtcaccaacacgacccaacagataatgaataaagtagcctctactcccttcctggcaggtaaagaggtcttgggactgccagatgaggaaagtattaaagaat

SEQ ID NO: 110078 - DNA, 2106 bp, Homo sapiens
  Payload ID: 1608
  Gene Symbol: ABCA8
  Gene Name: ATP-binding cassette, sub-family A (ABC1), member 8
  ENST ID: ENST00000589533
  CDS Start-End: 1-2106
tcctgcatccttggagtggattttaagcttgcttagtccctttgccttcatgcttggaatggcccagcttttacacttggactatgatttgaattctaatgcatttcctcatccatcggacggctcaaatctcattgtagcaacaaatttcatgttggcatttgacacttgcctctatctggcattggcgatttactttgaaaaaattttgccaaatgaatatggacatcgacgtccacctttgtttttcctgaagtcctcattttggtctcaaacacaaaagactgatcacgtggcccttgaagatgaaatggatgccgatccttcatttcatgactcttttgaacaagcgcctccagaattccaagggaaagaagccatcagaatcagaaatgttacaaaagaatataaaggaaagcctgataaaatagaagccttgaaagatctggtatttgacatttacgaaggccaaatcactgcaatacttggtcacagtggagctggaaagtcaacactgctaaacattcttagtgggttgtctgttcccaccaaaggttcagtcaccatctataacaataagctttcagaaatggctgacctagaaaatctcagcaagctgaccggagtttgtccacaatccaatgtgcaatttgacttcctcactgtaagagaaaacctcagactctttgctaaaataaaagggattctgccacaagaagtggataaagagatacaaagggttctgctggaattggaaatgaaaaatattcaggatgttcttgctcaaaacttaagtggtggacagaaaagaaagctaacctttgggattgccattttaggagatcctcagattttcctgttggatgaaccaactgctggattggatcccttttcaagacaccaagtatggaaccttctgaaagaacgcaaaacagaccgcgtgatcctcttcagtacccagttcatggatgaggccgacatcctggcggacaggaaagtatttctctcccaagggaagctaaagtgcgcgggctcttctttgtttctaaagaagaaatgggggattggatatcacttaagcttgcagttaaatgaaatatgtgttgaggaaaacataacatcacttgttaaacagcacatccctgatgccaaattatcagccaaaagcgaaggaaaacttatttatacattacccttagaaagaacaaataaatttccagaactttacaaggatcttgatagctatcctgacctaggaattgagaattatggtgtttccatgacaactttgaatgaagtattcctgaagctagaaggaaaatctacaattaatgaatcggacattgctattttgggagaagtacaagcggaaaaagctgacgacactgaaaggcttgttgagatggaacaagtcctctcttcacttaacaagatgagaaagacaataggtggtgtggctctctggcgacagcaaatctgcgcaattgcaagggttcgcttgttaaagttaaagcatgaaagaaaagctcttttagcactgctattaattctaatggctggattttgccctcttcttgtggagtataccatggtgaaaatatatcaaaacagttacacctgggaactttctcctcatttgtatttccttgctcctggacaacaaccacatgaccctctcactcaactactgatcatcaataaaacaggggcaagcattgatgactttatacagtctgtggagcaccagaacatagctttagaagtggatgcatttggaactagaaatggcacagatgacccatcttataatggagccatcacagtgtgttgtaatgaaaagaattacagcttttcgttagcatgcaatgccaaaagattgaattgcttcccagttcttatggacattgttagtaatgggctacttggaatggttaaaccatcagtacatatccgaactgaaagaagtacatttttggaggtaaatatatataatcttacaattcctgactctcctctatcaggaatctcccagatcacccttttaagtgctggaatcttgtttttattgagtaaaccactgcataataaattaacatttggactcat

SEQ ID NO: 110079 - DNA, 5088 bp, Homo sapiens
  Payload ID: 1608
  Gene Symbol: ABCA8
  Gene Name: ATP-binding cassette, sub-family A (ABC1), member 8
  Uniprot ID: O94911
  ENST ID: ENST00000586539
  CDS Start-End: 190-5055
tccttgcttccattttcccagaagttttggtagcaggatgatgttggcctcataatgtgagttagagaggagtccctctttttcgactgtttggaattgtttcagaaggaatgctaccagctcctcttgtaccactggtagaattcagctgtgaatctgtctggtcctgggctttttttgattgacaagatgaggaagagaaagatcagtgtgtgtcaacaaacttgggccttattatgcaagaactttcttaaaaaatggagaatgaaaagagagtccttaatggaatggctgaattcattgctcctactactttgtttgtatatatatcctcatagtcatcaagtaaatgatttttcttcactgcttaccatggacctgggacgggtagatacatttaatgaatccagattttctgttgtatacacacctgtcaccaacacgacccaacagataatgaataaagtagcctctactcccttcctggcaggtaaagaggtcttgggactgccagatgaggaaagtattaaagaattcacagcaaattatcctgaagaaatagtaagagtcacctttactaatacatactcatatcatttgaagttcttgctaggacatggaatgccagcaaagaaggagcacaaggaccatacagctcattgttatgaaacaaatgaagatgtttactgtgaagtttcagtattttggaaggaaggttttgtggctcttcaagctgccattaatgctgctattatagaaatcacaacaaatcactcagtgatggaggagctgatgtcagttactggaaaaaatatgaagatgcattccttcattggtcaatcaggagttataactgatttgtaccttttttcctgcattatttcattttcctcattcatttactatgcatctgttaatgtcacaagagagaggaaaaggatgaaggccttgatgacaatgatgggtcttcgggattcagcgttctggctctcctggggtttgctctatgctggtttcatcttcattatggcccttttcttggcacttgttataagatctacccagtttatcattttgtctggcttcatggtagtcttcagcctctttctcctgtatggattatctttggtagctttggctttcttaatgagcatcttggtaaagaaatctttcctcaccggcctggtcgtgttcctcctcactgtcttttgggggtgtctggggttcacatcactgtacagacaccttcctgcatccttggagtggattttaagcttgcttagtccctttgccttcatgcttggaatggcccagcttttacacttggactatgatttgaattctaatgcatttcctcatccatcggacggctcaaatctcattgtagcaacaaatttcatgttggcatttgacacttgcctctatctggcattggcgatttactttgaaaaaattttgccaaatgaatatggacatcgacgtccacctttgtttttcctgaagtcctcattttggtctcaaacacaaaagactgatcacgtggcccttgaagatgaaatggatgccgatccttcatttcatgactcttttgaacaagcgcctccagaattccaagggaaagaagccatcagaatcagaaatgttacaaaagaatataaaggaaagcctgataaaatagaagccttgaaagatctggtatttgacatttacgaaggccaaatcactgcaatacttggtcacagtggagctggaaagtcaacactgctaaacattcttagtgggttgtctgttcccaccaaaggttcagtcaccatctataacaataagctttcagaaatggctgacctagaaaatctcagcaagctgaccggagtttgtccacaatccaatgtgcaatttgacttcctcactgtaagagaaaacctcagactctttgctaaaataaaagggattctgccacaagaagtggataaagagatacaaagggttctgctggaattggaaatgaaaaatattcaggatgttcttgctcaaaacttaagtggtggacagaaaagaaagctaacctttgggattgccattttaggagatcctcagattttcctgttggatgaaccaactgctggattggatcccttttcaagacaccaagtatggaaccttctgaaagaacgcaaaacagaccgcgtgatcctcttcagtacccagttcatggatgaggccgacatcctggcggacaggaaagtatttctctcccaagggaagctaaagtgcgcgggctcttctttgtttctaaagaagaaatgggggattggatatcacttaagcttgcagttaaatgaaatatgtgttgaggaaaacataacatcacttgttaaacagcacatccctgatgccaaattatcagccaaaagcgaaggaaaacttatttatacattacccttagaaagaacaaataaatttccagaactttacaaggatcttgatagctatcctgacctaggaattgagaattatggtgtttccatgacaactttgaatgaagtattcctgaagctagaaggaaaatctacaattaatgaatcggacattgctattttgggagaagtacaagcggaaaaagctgacgacactgaaaggcttgttgagatggaacaagtcctctcttcacttaacaagatgagaaagacaataggtggtgtggctctctggcgacagcaaatctgcgcaattgcaagggttcgcttgttaaagttaaagcatgaaagaaaagctcttttagcactgctattaattctaatggctggattttgccctcttcttgtggagtataccatggtgaaaatatatcaaaacagttacacctgggaactttctcctcatttgtatttccttgctcctggacaacaaccacatgaccctctcactcaactactgatcatcaataaaacaggggcaagcattgatgactttatacagtctgtggagcaccagaacatagctttagaagtggatgcatttggaactagaaatggcacagatgacccatcttataatggagccatcacagtgtgttgtaatgaaaagaattacagcttttcgttagcatgcaatgccaaaagattgaattgcttcccagttcttatggacattgttagtaatgggctacttggaatggttaaaccatcagtacatatccgaactgaaagaagtacatttttggagaatggacaggacaatccaatcggattcctggcatatatcatgttctggctggttttaacatcgagttgcccaccttacattgccatgagcagcatcgatgattataagaacagagctcggtcccagctacggatttccggactctccccttctgcttactggtttgggcaggcgctggtggatgtttccctgtacttcttggtcttcgtttttatatatttaatgagctacatttcaaacttcgaagacatgctacttacaataattcatattattcaaatcccatgtgctgttggttattccttttccctcatcttcatgacatacgtgatttccttcatctttcgcaaggggagaaaaaatagtggcatttggtcattttgtttctatgttgtcactgtattctctgtggctggatttgcgttcagtatcttcgaaagtgatattccatttatcttcacttttttaataccacctgccacaatgattggctgtttgttcttatcttctcatcttctcttttcttctctcttttctgaagaacgaatggatgtacagccatttctggtattcctaattcctttccttcattttatcatttttctttttactcttcgatgtctggaatggaagtttggaaagaaatcaatgagaaaggatcctttctttagaatttctccaagaagtagtgatgtgtgtcaaaatccagaagaaccagaaggagaggatgaagatgttcagatggaaagagtgagaacagcaaatgccttgaattctactaattttgatgagaagccagtcatcattgccagctgtctacgcaaggagtatgcagggaagaggaaaggctgtttttccaagaggaagaataagatagccacgagaaatgtctccttctgtgttagaaaaggtgaagttttaggattattaggacacaatggagctggtaaaagcacatccattaaggtgataactggagacacaaaaccaactgctggacaagtgctactgaaagggagcggtggaggggatgccctggagttcctggggtactgccctcaggagaacgcgctgtggcccaacctgacagtgaggcagcacctggaggtgtacgccgccgtgaaagggctgaggaaaggggatgctgaggttgccatcacacggttagtggatgcgctcaagctgcaggaccagctgaagtctcccgtgaagaccttgtcagagggaataaagagaaagctgtgctttgtcctgagcatactggggaacccgtcagtggtgcttctggatgagccgtcgaccgggatggaccccgaggggcagcagcaaatgtggcaggccatccgggccacctttagaaacacggaaaggggtgccctcctaaccacccactacatggcagaggctgaggccgtgtgtgaccgagtggccatcatggtatctgggaggttgagatgtatcggttccatccaacacctgaaaagcaaatttggcaaagattacctgctggagatgaaggtgaagaacctggcacaagtggagcccctccatgcagagatcctgaggcttttcccccaggctgctcggcaggaaaggtactcctctctgatggtttataagttgccagtggaagatgtgcaacctttagcccaagctttcttcaaattagagaaggttaaacagagctttgacctagaggagtacagcctctcacagtctaccctggagcaggttttcctggagctctccaaggagcaggagctgggtgattttgaggaggattttgatccctcagtgaagtggaagctcctcccccaggaagagccttaaaaccccaaattctgtgttcctgtttaaacccgt

SEQ ID NO: 110080 - DNA, 3264 bp, Homo sapiens
  Payload ID: 1608
  Gene Symbol: ABCA8
  Gene Name: ATP-binding cassette, sub-family A (ABC1), member 8
  ENST ID: ENST00000615593
  CDS Start-End: 1211-1681
actctgaaagcagtcttcacagaaacttttcacagaagtcaaatagttaaagcaaattctagatacatggtagagaccaggagaaaatatgaataactttcttctaaacaaggagctcagtggataaaccatacctctagattccttgcttccattttcccagaaacaagatgaggaagagaaagatcagtgtgtgtcaacaaacttgggccttattatgcaagaactttcttaaaaaatggagaatgaaaagagagtccttaatggaatggctgaattcattgctcctactactttgtttgtatatatatcctcatagtcatcaagtaaatgatttttcttcactgcttaccatggacctgggacgggtagatacatttaatgaatccagattttctgttgtatacacacctgtcaccaacacgacccaacagataatgaataaagtagcctctactcccttcctggcaggtaaagaggtcttgggactgccagatgaggaaagtattaaagaattcacagcaaattatcctgaagaaatagtaagagtcacctttactaatacatactcatatcatttgaagttcttgctaggacatggaatgccagcaaagaaggagcacaaggaccatacagctcattgttatgaaacaaatgaagatgtttactgtgaagtttcagtattttggaaggaaggttttgtggctcttcaagctgccattaatgctgctattatagaaatcacaacaaatcactcagtgatggaggagctgatgtcagttactggaaaaaatatgaagatgcattccttcattggtcaatcaggagttataactgatttgtaccttttttcctgcattatttcattttcctcattcatttactatgcatctgttaatgtcacaagagagaggaaaaggatgaaggccttgatgacaatgatgggtcttcgggattcagcgttctggctctcctggggtttgctctatgctggtttcatcttcattatggcccttttcttggcacttgttataagatctacccagtttatcattttgtctggcttcatggtagtcttcagcctctttctcctgtatggattatctttggtagctttggctttcttaatgagcatcttggtaaagaaatctttcctcaccggcctgcatccttggagtggattttaagcttgcttagtccctttgccttcatgcttggaatggcccagcttttacacttggactatgatttgaattctaatgcatttcctcatccatcggacggctcaaatctcattgtagcaacaaatttcatgttggcatttgacacttgcctctatctggcattggcgatttactttgaaaaaattttgccaaatgaatatggacatcgacgtccacctttgtttttcctgaagtcctcattttggtctcaaacacaaaagactgatcacgtggcccttgaagatgaaatggatgccgatccttcatttcatgactcttttgaacaagcgcctccagaattccaagggaaagaagccatcagaatcagaaatgttacaaaagaatataaaggaaagcctgataaaatagaagccttgaaagatctggtatttgacatttacgaaggccaaatcactgcaatattggtcacagtggagctggaaagtcaacactgctaaacattcttagtgggttgtctgttcccaccaaaggttcagtcaccatctataacaataagctttcagaaatggctgacctagaaaatctcagcaagctgaccggagtttgtccacaatccaatgtgcaatttgacttcctcactgtaagagaaaacctcagactctttgctaaaataaaagggattctgccacaagaagtggataaagagatacaaagggttctgctggaattggaaatgaaaaatattcaggatgttcttgctcaaaacttaagtggtggacagaaaagaaagctaacctttgggattgccattttaggagatcctcagattttcctgttggatgaaccaactgctggattggatcccttttcaagacaccaagtatggaaccttctgaaagaacgcaaaacagaccgcgtgatcctcttcagtacccagttcatggatgaggccgacatcctggcggacaggaaagtatttctctcccaagggaagctaaagtgcgcgggctcttctttgtttctaaagaagaaatgggggattggatatcacttaagcttgcagttaaatgaaatatgtgttgaggaaaacataacatcacttgttaaacagcacatccctgatgccaaattatcagccaaaagcgaaggaaaacttatttatacattacccttagaaagaacaaataaatttccagaactttacaaggatcttgatagctatcctgacctaggaattgagaattatggtgtttccatgacaactttgaatgaagtattcctgaagctagaaggaaaatctacaattaatgaatcggacattgctattttgggagaagtacaagcggaaaaagctgacgacactgaaaggcttgttgagatggaacaagtcctctcttcacttaacaagatgagaaagacaataggtggtgtggctctctggcgacagcaaatctgcgcaattgcaagggttcgcttgttaaagttaaagcatgaaagaaaagctcttttagcactgctattaattctaatggctggattttgccctcttcttgtggagtataccatggtgaaaatatatcaaaacagttacacctgggaactttctcctcatttgtatttccttgctcctggacaacaaccacatgaccctctcactcaactactgatcatcaataaaacaggggcaagcattgatgactttatacagtctgtggagcaccagaacatagctttagaagtggatgcatttggaactagaaatggcacagatgacccatcttataatggagccatcacagtgtgttgtaatgaaaagaattacagcttttcgttagcatgcaatgccaaaagattgaattgcttcccagttcttatggacattgttagtaatgggctacttggaatggttaaaccatcagtacatatccgaactgaaagaagtacatttttggaggtaaatatatataatcttacaattcctgactctcctctatcaggaatctcccagatcacccttttaagtgctggaatcttgtttttattgagtaaaccactgcataataaattaacatttggactc

SEQ ID NO: 110081 - DNA, 6514 bp, Homo sapiens
  Payload ID: 1609
  Gene Symbol: ABCA9
  Gene Name: ATP-binding cassette, sub-family A (ABC1), member 9
  Uniprot ID: Q8IUA7
  ENST ID: ENST00000340001
  CDS Start-End: 213-5087
agaagatattttggcaggctagctgaactgagaccagattctcctgggaaatttgtataaaacagaactattcacaatgaatgtgaaattaaaagcatgatgtagtagtgacccaaaaggaatgtgaattctcctccagaacatgcagagacccatggatgaactgtgtttctagatttttcctccagctttcctgagagaaacaggtcaaaatgagcaagagacgcatgagcgtgggtcagcaaacatgggctcttctctgcaagaactgtctcaaaaaatggagaatgaaaagacagaccttgttggaatggctcttttcatttcttctggtactgtttctgtacctatttttctccaatttacatcaagttcatgacactcctcaaatgtcttcaatggatctgggacgtgtagatagttttaatgatactaattatgttattgcatttgcacctgaatccaaaactacccaagagataatgaacaaagtggcttcagccccattcctaaaaggaagaacaatcatggggtggcctgatgaaaaaagcatggatgaattggatttgaactattcaatagacgcagtgagagtcatctttactgataccttctcctaccatttgaagttttcttggggacatagaatccccatgatgaaagagcacagagaccattcagctcactgtcaagcagtgaatgaaaaaatgaagtgtgaaggttcagagttctgggagaaaggctttgtagcttttcaagctgccattaatgctgctatcatagaaatcgcaacaaatcattcagtgatggaacagctgatgtcagttactggtgtacatatgaagatattaccttttgttgcccaaggaggagttgcaactgattttttcattttcttttgcattatttctttttctacatttatatactatgtatcagtcaatgttacacaagaaagacaatacattacgtcattgatgacaatgatgggactccgagagtcagcattctggctttcctggggtttgatgtatgctggcttcatccttatcatggccactttaatggctcttattgtaaaatctgcacaaattgtcgtcctgactggttttgtgatggtcttcaccctctttctcctctatggcctgtctttgataactttagctttcctgatgagtgtgttgataaagaaacctttccttacgggcttggttgtgtttctccttattgtcttttgggggatcctgggattcccagcattgtatacacgtcttcctgcatttttggaatggactttgtgtcttcttagcccctttgccttcactgttgggatggcccagcttatacatttggactatgatgtgaattctaatgcccacttggattcttcacaaaatccatacctcataatagctactcttttcatgttggtttttgacacccttctgtatttggtattgacattatattttgacaaaattttgcccgctgaatatggacatcgatgttctcccttgtttttcctgaaatcctgtttttggtttcaacacggaagggctaatcatgtggtccttgagaatgaaacagattctgatcctacacctaatgactgttttgaaccagtgtctccagaattctgtgggaaagaagccatcagaatcaaaaatcttaaaaaagaatatgcagggaagtgtgagagagtagaagctttgaaaggtgtggtgtttgacatatatgaaggccagatcactgccctccttggtcacagtggagctggaaaaactaccctgttaaacatacttagtgggttgtcagttccaacatcaggttcagtcactgtctataatcacacactttcaagaatggctgatatagaaaatatcagcaagttcactggattttgtccacaatccaatgtgcaatttggatttctcactgtgaaagaaaacctcaggctgtttgctaaaataaaagggattttgccacatgaagtggagaaagaggtacaacgagttgtacaggaattagaaatggaaaatattcaagacatccttgctcaaaacttaagtggtggacaaaataggaaactaacttttgggattgccattttaggagatcctcaagttttgctattggatgaaccgactgctggattggatcctctttcaaggcaccgaatatggaatctcctgaaagaggggaaatcagacagagtaattctcttcagcacccagtttatagatgaggctgacattctggcggacaggaaggtgttcatatccaatgggaagctgaagtgtgcaggctcttctctgttccttaagaagaaatggggcataggctaccatttaagtttgcatctgaatgaaaggtgtgatccagagagtataacatcactggttaagcagcacatctctgatgccaaattgacagcacaaagtgaagaaaaacttgtatatattttgcctttggaaaggacaaacaaatttccagaactttacagggatcttgatagatgttctaaccaaggcattgaggattatggtgtttccataacaactttgaatgaggtgtttctgaaattagaaggaaaatcaactattgatgaatcagatattggaatttggggacaattacaaactgatggggcaaaagatataggaagccttgttgagctggaacaagttttgtcttccttccacgaaacaaggaaaacaatcagtggcgtggcgctctggaggcagcaggtctgtgcaatagcaaaagttcgcttcctaaagttaaagaaagaaagaaaaagcctgtggactatattattgctttttggtattagctttatccctcaacttttggaacatctattctacgagtcatatcagaaaagttacccgtgggaactgtctccaaatacatacttcctctcaccaggacaacaaccacaggatcctctgacccatttactggtcatcaataagacagggtcaaccattgataactttttacattcactgaggcgacagaacatagctatagaagtggatgcctttggaactagaaatggcacagatgacccatcttacaatggtgctatcattgtgtcaggtgatgaaaaggatcacagattttcaatagcatgtaatacaaaacggctgaattgctttcctgtcctcctggatgtcattagcaatggactacttggaatttttaattcgtcagaacacattcagactgacagaagcacattttttgaagagcatatggattatgagtatgggtaccgaagtaacaccttcttctggataccgatggcagcctctttcactccatacattgcaatgagcagcattggtgactacaaaaaaaaagctcattcccagctacggatttcaggcctctacccttctgcatactggtttggccaagcactggtggatgtttccctgtactttttgatcctcctgctaatgcaaataatggattatatttttagcccagaggagattatatttataattcaaaacctgttaattcaaatcctgtgtagtattggctatgtctcatctcttgttttcttgacatatgtgatttcattcatttttcgcaatgggagaaaaaatagtggcatttggtcatttttcttcttaattgtggtcatcttctcgatagttgctactgatctaaatgaatatggatttctagggctattttttggcaccatgttaatacctcccttcacattgattggctctctattcattttttctgagatttctcctgattccatggattacttaggagcttcagaatctgaaattgtatacctggcactgctaataccttaccttcattttctcatttttcttttcattctgcgatgcctagaaatgaactgcaggaagaaactaatgagaaaggatcctgtgttcagaatttctccaagaagcaacgctatttttccaaacccagaagagcctgaaggagaggaggaagatatccagatggaaagaatgagaacagtgaatgctatggctgtgcgagactttgatgagacacccgtcatcattgccagctgtctacggaaggaatatgcaggcaaaaagaaaaattgcttttctaaaaggaagaaaaaaattgccacaagaaatgtctctttttgtgttaaaaaaggtgaagttataggactgttaggacacaatggagctggtaaaagtacaactattaagatgataactggagacacaaaaccaactgcaggacaggtgattttgaaagggagcggtggaggggaacccctgggcttcctggggtactgccctcaggagaatgcgctgtggcccaacctgacagtgaggcagcacctggaggtgtacgctgccgtgaaaggtctcaggaaaggggacgcaatgatcgccatcacacggttagtggatgcgctcaagctgcaggaccagctgaaggctcccgtgaagaccttgtcagagggaataaagcgaaagctgtgctttgtgctgagcatcctggggaacccgtcagtggtgcttctggatgagccgtcgaccgggatggaccccgaggggcagcagcaaatgtggcaggtgattcgggccacctttagaaacacggagaggggcgccctcctgaccacccactacatggcagaggctgaggcggtgtgtgaccgagtggccatcatggtgtcaggaaggctgagatgtattggttccatccaacacctgaaaagcaaatttggcaaagactacctgctggagatgaagctgaagaacctggcacaaatggagcccctccatgcagagatcctgaggcttttcccccaggctgctcagcaggaaaggttctcctccctgatggtctataagttgcctgttgaggatgtgcgacctttatcacaggctttcttcaaattagagatagttaaacagagtttcgacctggaggagtacagcctctcacagtctaccctggagcaggttttcctggagctctccaaggagcaggagctgggtgatcttgaagaggactttgatccctcggtgaagtggaaactcctcctgcaggaagagccttaaagctccaaataccctatatctttctttaatcctgtgactcttttaaagataatattttatagccttaatatgccttatatcagaggtggtacaaaatgcatttgaaactcatgcaataattatcctcagtagtatttcttacagtgagacaacaggcgatgtcagtgagggcgatcatagggcataagcctaagccataccatgcagcctttgtgccagcaaccaaatcccatgtttcctactgtgttaagtttaaaaatgcatttattatagaattgtctacatttctgaggatgtcatggagaatgcttaattttctttctctgaacttcaaaatattaaatattttcttatttatttttttgattaaagtataaattaagacaccctattgacttccgggtaaggggagtcaattgattacccagcagcacagtatttgctttttataattccctttttaaatacttgttcttaattcactggttttccttttctgtcatttttcagagtttagattgtgagtccatgttttgtctgttgtgcctataaaggaaatttgaaatctgtatcattctactataaagacacatgcacacgtatgtttattgcagcactgtttacaatagcaaagacttggaaccaaccaaaatacccacaaatgatagaccggataaagaaaacgtgacacatatacaccatggaatactatgcagccatagaaaaggatgagttcatattcttcacagggacatggatgaagctggaaaccatcatcctcagcaaactaacacaggaacagaaaaccaaacaccgcatgttctcactcataagtgggaattgaacaatgagaatacatggacacagggaggggaacaccacaccctggggcctgttggggggatgggggctaggggagggatagcattaggagaaatacctgatgtagatgatgggttgatgggtgcagcaaagtaccatggcacatgtatacctgtgtaacaaacctgcacattcagcacatgtatcccagaacttaaagtataataaaaataaataaataatttcagtaagaacctgatcaagttgaacatgtatatatatgttatacacaagtttgaaacatatttctgtttttatatgttttcttatgatgcaagggcatactcttatgcaaataattaaaacttcataggtcttaatttcccatatctctatatattattatgacctatccaactggtaaccctatgaacaccttaaaataaacttgtatactcttatttaggtgagtttttcttgttaatactattattattgctatctaattgaatacttgaaggaagttgtgtgaaagaccttggctttgattttagttcttatattcttctagtttttgaaaataaaacacttccatcaacccgtaa

SEQ ID NO: 110082 - DNA, 6116 bp, Homo sapiens
  Payload ID: 1609
  Gene Symbol: ABCA9
  Gene Name: ATP-binding cassette, sub-family A (ABC1), member 9
  ENST ID: ENST00000453985
  CDS Start-End: 73-4833
acatgcagagacccatggatgaactgtgtttctagatttttcctccagctttcctgagagaaacaggtcaaaatgagcaagagacgcatgagcgtgggtcagcaaacatgggctcttctctgcaagaactgtctcaaaaaatggagaatgaaaagacagaccttgttggaatggctcttttcatttcttctggtactgtttctgtacctatttttctccaatttacatcaagttcatgacactcctcaaatgtcttcaatggatctgggacgtgtagatagttttaatgatactaattatgttattgcatttgcacctgaatccaaaactacccaagagataatgaacaaagtggcttcagccccattcctaaaaggaagaacaatcatggggtggcctgatgaaaaaagcatggatgaattggatttgaactattcaatagacgcagtgagagtcatctttactgataccttctcctaccatttgaagttttcttggggacatagaatccccatgatgaaagagcacagagaccattcagctcactgtcaagcagtgaatgaaaaaatgaagtgtgaaggttcagagttctgggagaaaggctttgtagcttttcaagctgccattaatgctgctatcatagaaatcgcaacaaatcattcagtgatggaacagctgatgtcagttactggtgtacatatgaagatattaccttttgttgcccaaggaggagttgcaactgattttttcattttcttttgcattatttctttttctacatttatatactatgtatcagtcaatgttacacaagaaagacaatacattacgtcattgatgacaatgatgggactccgagagtcagcattctggctttcctggggtttgatgtatgctggcttcatccttatcatggccactttaatggctcttattgtaaaatctgcacaaattgtcgtcctgactggttttgtgatggtcttcaccctctttctcctctatggcctgtctttgataactttagctttcctgatgagtgtgttgataaagaaacctttccttacgggcttggttgtgtttctccttattgtcttttgggggatcctgggattcccagcattgtatacacgtcttcctgcatttttggaatggactttgtgtcttcttagcccctttgccttcactgttgggatggcccagcttatacatttggactatgatgtgaattctaatgcccacttggattcttcacaaaatccatacctcataatagctactcttttcatgttggtttttgacacccttctgtatttggtattgacattatattttgacaaaattttgcccgctgaatatggacatcgatgttctcccttgtttttcctgaaatcctgtttttggtttcaacacggaagggctaatcatgtggtccttgagaatgaaacagattctgatcctacacctaatgactgttttgaaccagtgtctccagaattctgtgggaaagaagccatcagaatcaaaaatcttaaaaaagaatatgcagggaagtgtgagagagtagaagctttgaaaggtgtggtgtttgacatatatgaaggccagatcactgccctccttggtcacagtggagctggaaaaactaccctgttaaacatacttagtgggttgtcagttccaacatcaggttcagtcactgtctataatcacacactttcaagaatggctgatatagaaaatatcagcaagttcactggattttgtccacaatccaatgtgcaatttggatttctcactgtgaaagaaaacctcaggctgtttgctaaaataaaagggattttgccacatgaagtggagaaagaggtacaacgagttgtacaggaattagaaatggaaaatattcaagacatccttgctcaaaacttaagtggtggacaaaataggaaactaacttttgggattgccattttaggagatcctcaagttttgctattggatgaaccgactgctggattggatcctctttcaaggcaccgaatatggaatctcctgaaagaggggaaatcagacagagtaattctcttcagcacccagtttatagatgaggctgacattctggcggacaggaaggtgttcatatccaatgggaagctgaagtgtgcaggctcttctctgttccttaagaagaaatggggcataggctaccatttaagtttgcatctgaatgaaaggtgtgatccagagagtataacatcactggttaagcagcacatctctgatgccaaattgacagcacaaagtgaagaaaaacttgtatatattttgcctttggaaaggacaaacaaatttccagaactttacagggatcttgatagatgttctaaccaaggcattgaggattatggtgtttccataacaactttgaatgaggtgtttctgaaattagaaggaaaatcaactattgatgaatcagatattggaatttggggacaattacaaactgatggggcaaaagatataggaagccttgttgagctggaacaagttttgtcttccttccacgaaacaaggaaaacaatcagtggcgtggcgctctggaggcagcaggtctgtgcaatagcaaaagttcgcttcctaaagttaaagaaagaaagaaaaagcctgtggactatattattgctttttggtattagctttatccctcaacttttggaacatctattctacgagtcatatcagaaaagttacccgtgggaactgtctccaaatacatacttcctctcaccaggacaacaaccacaggatcctctgacccatttactggtcatcaataagacagggtcaaccattgataactttttacattcactgaggcgacagaacatagctatagaagtggatgcctttggaactagaaatggcacagatgacccatcttacaatggtgctatcattgtgtcaggtgatgaaaaggatcacagattttcaatagcatgtaatacaaaacggctgaattgctttcctgtcctcctggatgtcattagcaatggactacttggaatttttaattcgtcagaacacattcagactgacagaagcacattttttgaagagcatatggattatgagtatgggtaccgaagtaacaccttcttctggataccgatggcagcctctttcactccatacattgcaatgagcagcattggtgactacaaaaaaaaagctcattcccagctacggatttcaggcctctacccttctgcatactggtttggccaagcactggtggatgtttccctgtactttttgatcctcctgctaatgcaaataatggattatatttttagcccagaggagattatatttataattcaaaacctgttaattcaagtggtcatcttctcgatagttgctactgatctaaatgaatatggatttctagggctattttttggcaccatgttaatacctcccttcacattgattggctctctattcattttttctgagatttctcctgattccatggattacttaggagcttcagaatctgaaattgtatacctggcactgctaataccttaccttcattttctcatttttcttttcattctgcgatgcctagaaatgaactgcaggaagaaactaatgagaaaggatcctgtgttcagaatttctccaagaagcaacgctatttttccaaacccagaagagcctgaaggagaggaggaagatatccagatggaaagaatgagaacagtgaatgctatggctgtgcgagactttgatgagacacccgtcatcattgccagctgtctacggaaggaatatgcaggcaaaaagaaaaattgcttttctaaaaggaagaaaaaaattgccacaagaaatgtctctttttgtgttaaaaaaggtgaagttataggactgttaggacacaatggagctggtaaaagtacaactattaagatgataactggagacacaaaaccaactgcaggacaggtgattttgaaagggagcggtggaggggaacccctgggcttcctggggtactgccctcaggagaatgcgctgtggcccaacctgacagtgaggcagcacctggaggtgtacgctgccgtgaaaggtctcaggaaaggggacgcaatgatcgccatcacacggttagtggatgcgctcaagctgcaggaccagctgaaggctcccgtgaagaccttgtcagagggaataaagcgaaagctgtgctttgtgctgagcatcctggggaacccgtcagtggtgcttctggatgagccgtcgaccgggatggaccccgaggggcagcagcaaatgtggcaggtgattcgggccacctttagaaacacggagaggggcgccctcctgaccacccactacatggcagaggctgaggcggtgtgtgaccgagtggccatcatggtgtcaggaaggctgagatgtattggttccatccaacacctgaaaagcaaatttggcaaagactacctgctggagatgaagctgaagaacctggcacaaatggagcccctccatgcagagatcctgaggcttttcccccaggctgctcagcaggaaaggttctcctccctgatggtctataagttgcctgttgaggatgtgcgacctttatcacaggctttcttcaaattagagatagttaaacagagtttcgacctggaggagtacagcctctcacagtctaccctggagcaggttttcctggagctctccaaggagcaggagctgggtgatcttgaagaggactttgatccctcggtgaagtggaaactcctcctgcaggaagagccttaaagctccaaataccctatatctttctttaatcctgtgactcttttaaagataatattttatagccttaatatgccttatatcagaggtggtacaaaatgcatttgaaactcatgcaataattatcctcagtagtatttcttacagtgagacaacaggcgatgtcagtgagggcgatcatagggcataagcctaagccataccatgcagcctttgtgccagcaaccaaatcccatgtttcctactgtgttaagtttaaaaatgcatttattatagaattgtctacatttctgaggatgtcatggagaatgcttaattttctttctctgaacttcaaaatattaaatattttcttatttatttttttgattaaagtataaattaagacaccctattgacttccgggtaaggggagtcaattgattacccagcagcacagtatttgctttttataattccctttttaaatacttgttcttaattcactggttttccttttctgtcatttttcagagtttagattgtgagtccatgttttgtctgttgtgcctataaaggaaatttgaaatctgtatcattctactataaagacacatgcacacgtatgtttattgcagcactgtttacaatagcaaagacttggaaccaaccaaaatacccacaaatgatagaccggataaagaaaacgtgacacatatacaccatggaatactatgcagccatagaaaaggatgagttcatattcttcacagggacatggatgaagctggaaaccatcatcctcagcaaactaacacaggaacagaaaaccaaacaccgcatgttctcactcataagtgggaattgaacaatgagaatacatggacacagggaggggaacaccacaccctggggcctgttggggggatgggggctaggggagggatagcattaggagaaatacctgatgtagatgatgggttgatgggtgcagcaaagtaccatggcacatgtatacctgtgtaacaaacctgcacattcagcacatgtatcccagaacttaaagtataataaaaataaataaataatttcagtaagaacctgatcaagttgaacatgtatatatatgttatacacaagtttgaaacatatttctgtttttatatgttttcttatgatgcaagggcatactcttatgcaaataattaaaacttcataggtcttaatttcccatatctctatatattattatgacctatccaactggtaaccctatgaacaccttaaaataaacttgtatactctta

SEQ ID NO: 110083 - DNA, 582 bp, Homo sapiens
  Payload ID: 1609
  Gene Symbol: ABCA9
  Gene Name: ATP-binding cassette, sub-family A (ABC1), member 9
  ENST ID: ENST00000585714
  CDS Start-End: 314-582
aaaggaatgtgaattctcctccagaacatgcagagacccatggatgaactgtgtttctagatttttcctccagctttcctgagactatatttttaagatgtcttcatgtggatgggtgtgtgccaatccagtgctcctgaatcctacatagtaatctttggactgtatccatcaaaatttgttttattaacaccatgccacaataatctacattataaagaacatccttgcactggtcccctcatgaccccatgtgagaatctccatgggctgcatatccaggagcagaactgattgatggaaacaggtcaaaatgagcaagagacgcatgagcgtgggtcagcaaacatgggctcttctctgcaagaactgtctcaaaaaatggagaatgaaaagacagaccttgttggaatggctcttttcatttcttctggtactgtttctgtacctatttttctccaatttacatcaagttcatgacactcctcaaatgtcttcaatggatctgggacgtgtagatagttttaatgatactaattatgttattgcatttgcacctgaatccaaaactacccaagagat

SEQ ID NO: 110084 - DNA, 1428 bp, Homo sapiens
  Payload ID: 1609
  Gene Symbol: ABCA9
  Gene Name: ATP-binding cassette, sub-family A (ABC1), member 9
  Uniprot ID: Q8IUA7
  ENST ID: ENST00000495634
  CDS Start-End: 55-858
atgaactgtgtttctagatttttcctccagctttcctgagagaaacaggtcaaaatgagcaagagacgcatgagcgtgggtcagcaaacatgggctcttctctgcaagaactgtctcaaaaaatggagaatgaaaagacagaccttgttggaatggctcttttcatttcttctggtactgtttctgtacctatttttctccaatttacatcaagttcatgacactcctcaaatgtcttcaatggatctgggacgtgtagatagttttaatgatactaattatgttattgcatttgcacctgaatccaaaactacccaagagataatgaacaaagtggcttcagccccattcctaaaaggaagaacaatcatggggtggcctgatgaaaaaagcatggatgaattggatttgaactattcaatagacgcagtgagagtcatctttactgataccttctcctaccatttgaagttttcttggggacatagaatccccatgatgaaagagcacagagaccattcagctcactgtcaagcagtgaatgaaaaaatgaagtgtgaaggttcagagttctgggagaaaggctttgtagcttttcaagctgccattaatgctgctatcatagaaatcgcaacaaatcattcagtgatggaacagctgatgtcagttactggtgtacatatgaagatattaccttttgttgcccaaggaggagttgcaactgattttttcattttcttttgcattatttctttttctacatttatatactatgtatcagtcaatgttacacaagaaagacaatacattacgtcattgatgacaatgatgggactccgagagtcagcattctggtaaatcatatgactccaatccattatacagcataaacaaacagaacaacttagctggttgactccttagaccaggggtccccaagccccaggccacagactgctactggtccatggccagttaggtaccaggccacatagcaggaggtgagtggcaggcaagtgagcaaagcttcatgtatatttacagccactccctattgctcacattaccacctgagctccacctcctgtcagaatagccacgttattagagtatcacagaagctcaaactctattgtgaactgtgtatgtgagagatctaggttgcgggctccttatgagtatccaatgcctgatgatctgtcactcaagagatctaggttgcgggctctttatgagtatccaatgcctgatgatctgtcactgtctcccatcacccccagatgggatctagttgcaggaaaacaagctcagggttcctactgattctacattatggtaagttgtataattatttcattatatattacaatgtaataataatagaaataaagtgcacaataaatgtaatccacatgcatcatcccaaaa

SEQ ID NO: 110085 - DNA, 4645 bp, Homo sapiens
  Payload ID: 1610
  Gene Symbol: ABCB1
  Gene Name: ATP-binding cassette, sub-family B (MDR/TAP), member 1
  Uniprot ID: P08183
  ENST ID: ENST00000265724
  CDS Start-End: 419-4261
tattcagatattctccagattcctaaagattagagatcatttctcattctcctaggagtactcacttcaggaagcaaccagataaaagagaggtgcaacggaagccagaacattcctcctggaaattcaacctgtttcgcagtttctcgaggaatcagcattcagtcaatccgggccgggagcagtcatctgtggtgaggctgattggctgggcaggaacagcgccggggcgtgggctgagcacagccgcttcgctctctttgccacaggaagcctgagctcattcgagtagcggctcttccaagctcaaagaagcagaggccgctgttcgtttcctttaggtctttccactaaagtcggagtatcttcttccaaaatttcacgtcttggtggccgttccaaggagcgcgaggtcggaatggatcttgaaggggaccgcaatggaggagcaaagaagaagaacttttttaaactgaacaataaaagtgaaaaagataagaaggaaaagaaaccaactgtcagtgtattttcaatgtttcgctattcaaattggcttgacaagttgtatatggtggtgggaactttggctgccatcatccatggggctggacttcctctcatgatgctggtgtttggagaaatgacagatatctttgcaaatgcaggaaatttagaagatctgatgtcaaacatcactaatagaagtgatatcaatgatacagggttcttcatgaatctggaggaagacatgaccaggtatgcctattattacagtggaattggtgctggggtgctggttgctgcttacattcaggtttcattttggtgcctggcagctggaagacaaatacacaaaattagaaaacagttttttcatgctataatgcgacaggagataggctggtttgatgtgcacgatgttggggagcttaacacccgacttacagatgatgtctccaagattaatgaaggaattggtgacaaaattggaatgttctttcagtcaatggcaacatttttcactgggtttatagtaggatttacacgtggttggaagctaacccttgtgattttggccatcagtcctgttcttggactgtcagctgctgtctgggcaaagatactatcttcatttactgataaagaactcttagcgtatgcaaaagctggagcagtagctgaagaggtcttggcagcaattagaactgtgattgcatttggaggacaaaagaaagaacttgaaaggtacaacaaaaatttagaagaagctaaaagaattgggataaagaaagctattacagccaatatttctataggtgctgctttcctgctgatctatgcatcttatgctctggccttctggtatgggaccaccttggtcctctcaggggaatattctattggacaagtactcactgtattcttttctgtattaattggggcttttagtgttggacaggcatctccaagcattgaagcatttgcaaatgcaagaggagcagcttatgaaatcttcaagataattgataataagccaagtattgacagctattcgaagagtgggcacaaaccagataatattaagggaaatttggaattcagaaatgttcacttcagttacccatctcgaaaagaagttaagatcttgaagggtctgaacctgaaggtgcagagtgggcagacggtggccctggttggaaacagtggctgtgggaagagcacaacagtccagctgatgcagaggctctatgaccccacagaggggatggtcagtgttgatggacaggatattaggaccataaatgtaaggtttctacgggaaatcattggtgtggtgagtcaggaacctgtattgtttgccaccacgatagctgaaaacattcgctatggccgtgaaaatgtcaccatggatgagattgagaaagctgtcaaggaagccaatgcctatgactttatcatgaaactgcctcataaatttgacaccctggttggagagagaggggcccagttgagtggtgggcagaagcagaggatcgccattgcacgtgccctggttcgcaaccccaagatcctcctgctggatgaggccacgtcagccttggacacagaaagcgaagcagtggttcaggtggctctggataaggccagaaaaggtcggaccaccattgtgatagctcatcgtttgtctacagttcgtaatgctgacgtcatcgctggtttcgatgatggagtcattgtggagaaaggaaatcatgatgaactcatgaaagagaaaggcatttacttcaaacttgtcacaatgcagacagcaggaaatgaagttgaattagaaaatgcagctgatgaatccaaaagtgaaattgatgccttggaaatgtcttcaaatgattcaagatccagtctaataagaaaaagatcaactcgtaggagtgtccgtggatcacaagcccaagacagaaagcttagtaccaaagaggctctggatgaaagtatacctccagtttccttttggaggattatgaagctaaatttaactgaatggccttattttgttgttggtgtattttgtgccattataaatggaggcctgcaaccagcatttgcaataatattttcaaagattataggggtttttacaagaattgatgatcctgaaacaaaacgacagaatagtaacttgttttcactattgtttctagcccttggaattatttcttttattacatttttccttcagggtttcacatttggcaaagctggagagatcctcaccaagcggctccgatacatggttttccgatccatgctcagacaggatgtgagttggtttgatgaccctaaaaacaccactggagcattgactaccaggctcgccaatgatgctgctcaagttaaaggggctataggttccaggcttgctgtaattacccagaatatagcaaatcttgggacaggaataattatatccttcatctatggttggcaactaacactgttactcttagcaattgtacccatcattgcaatagcaggagttgttgaaatgaaaatgttgtctggacaagcactgaaagataagaaagaactagaaggttctgggaagatcgctactgaagcaatagaaaacttccgaaccgttgtttctttgactcaggagcagaagtttgaacatatgtatgctcagagtttgcaggtaccatacagaaactctttgaggaaagcacacatctttggaattacattttccttcacccaggcaatgatgtatttttcctatgctggatgtttccggtttggagcctacttggtggcacataaactcatgagctttgaggatgttctgttagtattttcagctgttgtctttggtgccatggccgtggggcaagtcagttcatttgctcctgactatgccaaagccaaaatatcagcagcccacatcatcatgatcattgaaaaaacccctttgattgacagctacagcacggaaggcctaatgccgaacacattggaaggaaatgtcacatttggtgaagttgtattcaactatcccacccgaccggacatcccagtgcttcagggactgagcctggaggtgaagaagggccagacgctggctctggtgggcagcagtggctgtgggaagagcacagtggtccagctcctggagcggttctacgaccccttggcagggaaagtgctgcttgatggcaaagaaataaagcgactgaatgttcagtggctccgagcacacctgggcatcgtgtcccaggagcccatcctgtttgactgcagcattgctgagaacattgcctatggagacaacagccgggtggtgtcacaggaagagattgtgagggcagcaaaggaggccaacatacatgccttcatcgagtcactgcctaataaatatagcactaaagtaggagacaaaggaactcagctctctggtggccagaaacaacgcattgccatagctcgtgcccttgttagacagcctcatattttgcttttggatgaagccacgtcagctctggatacagaaagtgaaaaggttgtccaagaagccctggacaaagccagagaaggccgcacctgcattgtgattgctcaccgcctgtccaccatccagaatgcagacttaatagtggtgtttcagaatggcagagtcaaggagcatggcacgcatcagcagctgctggcacagaaaggcatctatttttcaatggtcagtgtccaggctggaacaaagcgccagtgaactctgactgtatgagatgttaaatactttttaatatttgtttagatatgacatttattcaaagttaaaagcaaacacttacagaattatgaagaggtatctgtttaacatttcctcagtcaagttcagagtcttcagagacttcgtaattaaaggaacagagtgagagacatcatcaagtggagagaaatcatagtttaaactgcattataaattttataacagaattaaagtagattttaaaagataaaatgtgtaattttgtttatattttcccatttggactgtaactgactgccttgctaaaagattatagaagtagcaaaaagtattgaaatgtttgcataaagtgtctataataaaactaaactttcatgtgactgg

SEQ ID NO: 110086 - DNA, 461 bp, Homo sapiens
  Payload ID: 1610
  Gene Symbol: ABCB1
  Gene Name: ATP-binding cassette, sub-family B (MDR/TAP), member 1
  ENST ID: ENST00000416177
  CDS Start-End: 318-461
tcattactctttacctgtgaagagtagaacatgaagaaatctactttattcagatattctccagattcctaaagattagagatcatttctcattctcctaggagtactcacttcaggaagcaaccagataaaagagaggtgcaacggaagccagaacattcctcctggaaattcaacctgtttcgcagtttctcgaggaatcagcattcagtcaatccgggccgggagcagtcatctgtggtctttccactaaagtcggagtatcttcttccaaaatttcacgtcttggtggccgttccaaggagcgcgaggtcggaatggatcttgaaggggaccgcaatggaggagcaaagaagaagaacttttttaaactgaacaataaaagtgaaaaagataagaaggaaaagaaaccaactgtcagtgtattttcaatgtttcgctattcaaattggcttgacaag

SEQ ID NO: 110087 - DNA, 4524 bp, Homo sapiens
  Payload ID: 1610
  Gene Symbol: ABCB1
  Gene Name: ATP-binding cassette, sub-family B (MDR/TAP), member 1
  Uniprot ID: P08183
  ENST ID: ENST00000543898
  CDS Start-End: 494-4144
aaacacttgtattaccattttaaaggctatcattactctttacctgtgaagagtagaacatgaagaaatctactttattcagatattctccagattcctaaagattagagatcatttctcattctcctaggagtactcacttcaggaagcaaccagataaaagagaggtgcaacggaagccagaacattcctcctggaaattcaacctgtttcgcagtttctcgaggaatcagcattcagtcaatccgggccgggagcagtcatctgtggtgaggctgattggctgggcaggaacagcgccggggcgtgggctgagcacagccgcttcgctctctttgccacaggaagcctgagctcattcgagtagcggctcttccaagctcaaagaagcagaggccgctgttcgtttcctttaggtctttccactaaagtcggagtatcttcttccaaaatttcacgtcttggtggccgttccaaggagcgcgaggtcggaatggatcttgaaggggaccgcaatggaggagcaaagaagaagaacttttttaaactgaacaataaaagtgaaaaagataagaaggaaaagaaaccaactgtcagtgtattttcaatgtttcgctattcaaattggcttgacaagttgtatatggtggtgggaactttggctgccatcatccatggggctggacttcctctcatgatgctggtgtttggagaaatgacagatatctttgcaaatgcaggaaatttagaagatctgatgtcaaacatcactaatagaagtgatatcaatgatacagggttcttcatgaatctggaggaagacatgaccagtgatgtctccaagattaatgaaggaattggtgacaaaattggaatgttctttcagtcaatggcaacatttttcactgggtttatagtaggatttacacgtggttggaagctaacccttgtgattttggccatcagtcctgttcttggactgtcagctgctgtctgggcaaagatactatcttcatttactgataaagaactcttagcgtatgcaaaagctggagcagtagctgaagaggtcttggcagcaattagaactgtgattgcatttggaggacaaaagaaagaacttgaaaggtacaacaaaaatttagaagaagctaaaagaattgggataaagaaagctattacagccaatatttctataggtgctgctttcctgctgatctatgcatcttatgctctggccttctggtatgggaccaccttggtcctctcaggggaatattctattggacaagtactcactgtattcttttctgtattaattggggcttttagtgttggacaggcatctccaagcattgaagcatttgcaaatgcaagaggagcagcttatgaaatcttcaagataattgataataagccaagtattgacagctattcgaagagtgggcacaaaccagataatattaagggaaatttggaattcagaaatgttcacttcagttacccatctcgaaaagaagttaagatcttgaagggtctgaacctgaaggtgcagagtgggcagacggtggccctggttggaaacagtggctgtgggaagagcacaacagtccagctgatgcagaggctctatgaccccacagaggggatggtcagtgttgatggacaggatattaggaccataaatgtaaggtttctacgggaaatcattggtgtggtgagtcaggaacctgtattgtttgccaccacgatagctgaaaacattcgctatggccgtgaaaatgtcaccatggatgagattgagaaagctgtcaaggaagccaatgcctatgactttatcatgaaactgcctcataaatttgacaccctggttggagagagaggggcccagttgagtggtgggcagaagcagaggatcgccattgcacgtgccctggttcgcaaccccaagatcctcctgctggatgaggccacgtcagccttggacacagaaagcgaagcagtggttcaggtggctctggataaggccagaaaaggtcggaccaccattgtgatagctcatcgtttgtctacagttcgtaatgctgacgtcatcgctggtttcgatgatggagtcattgtggagaaaggaaatcatgatgaactcatgaaagagaaaggcatttacttcaaacttgtcacaatgcagacagcaggaaatgaagttgaattagaaaatgcagctgatgaatccaaaagtgaaattgatgccttggaaatgtcttcaaatgattcaagatccagtctaataagaaaaagatcaactcgtaggagtgtccgtggatcacaagcccaagacagaaagcttagtaccaaagaggctctggatgaaagtatacctccagtttccttttggaggattatgaagctaaatttaactgaatggccttattttgttgttggtgtattttgtgccattataaatggaggcctgcaaccagcatttgcaataatattttcaaagattataggggtttttacaagaattgatgatcctgaaacaaaacgacagaatagtaacttgttttcactattgtttctagcccttggaattatttcttttattacatttttccttcagggtttcacatttggcaaagctggagagatcctcaccaagcggctccgatacatggttttccgatccatgctcagacaggatgtgagttggtttgatgaccctaaaaacaccactggagcattgactaccaggctcgccaatgatgctgctcaagttaaaggggctataggttccaggcttgctgtaattacccagaatatagcaaatcttgggacaggaataattatatccttcatctatggttggcaactaacactgttactcttagcaattgtacccatcattgcaatagcaggagttgttgaaatgaaaatgttgtctggacaagcactgaaagataagaaagaactagaaggttctgggaagatcgctactgaagcaatagaaaacttccgaaccgttgtttctttgactcaggagcagaagtttgaacatatgtatgctcagagtttgcaggtaccatacagaaactctttgaggaaagcacacatctttggaattacattttccttcacccaggcaatgatgtatttttcctatgctggatgtttccggtttggagcctacttggtggcacataaactcatgagctttgaggatgttctgttagtattttcagctgttgtctttggtgccatggccgtggggcaagtcagttcatttgctcctgactatgccaaagccaaaatatcagcagcccacatcatcatgatcattgaaaaaacccctttgattgacagctacagcacggaaggcctaatgccgaacacattggaaggaaatgtcacatttggtgaagttgtattcaactatcccacccgaccggacatcccagtgcttcagggactgagcctggaggtgaagaagggccagacgctggctctggtgggcagcagtggctgtgggaagagcacagtggtccagctcctggagcggttctacgaccccttggcagggaaagtgctgcttgatggcaaagaaataaagcgactgaatgttcagtggctccgagcacacctgggcatcgtgtcccaggagcccatcctgtttgactgcagcattgctgagaacattgcctatggagacaacagccgggtggtgtcacaggaagagattgtgagggcagcaaaggaggccaacatacatgccttcatcgagtcactgcctaataaatatagcactaaagtaggagacaaaggaactcagctctctggtggccagaaacaacgcattgccatagctcgtgcccttgttagacagcctcatattttgcttttggatgaagccacgtcagctctggatacagaaagtgaaaaggttgtccaagaagccctggacaaagccagagaaggccgcacctgcattgtgattgctcaccgcctgtccaccatccagaatgcagacttaatagtggtgtttcagaatggcagagtcaaggagcatggcacgcatcagcagctgctggcacagaaaggcatctatttttcaatggtcagtgtccaggctggaacaaagcgccagtgaactctgactgtatgagatgttaaatactttttaatatttgtttagatatgacatttattcaaagttaaaagcaaacacttacagaattatgaagaggtatctgtttaacatttcctcagtcaagttcagagtcttcagagacttcgtaattaaaggaacagagtgagagacatcatcaagtggagagaaatcatagtttaaactgcattataaattttataacagaattaaagtagattttaaaagataaaatgtgtaattttgtttatattttcccatttggactgtaactgactgccttgctaaaagattatagaagtagcaaaaagtattgaaatgtttgcataaagtgtctataataaaactaaactttcatgtga

SEQ ID NO: 110088 - DNA, 4778 bp, Homo sapiens
  Payload ID: 1610
  Gene Symbol: ABCB1
  Gene Name: ATP-binding cassette, sub-family B (MDR/TAP), member 1
  Uniprot ID: P08183
  ENST ID: ENST00000622132
  CDS Start-End: 326-4168
tgcaacggaagccagaacattcctcctggaaattcaacctgtttcgcagtttctcgaggaatcagcattcagtcaatccgggccgggagcagtcatctgtggtgaggctgattggctgggcaggaacagcgccggggcgtgggctgagcacagccgcttcgctctctttgccacaggaagcctgagctcattcgagtagcggctcttccaagctcaaagaagcagaggccgctgttcgtttcctttaggtctttccactaaagtcggagtatcttcttccaaaatttcacgtcttggtggccgttccaaggagcgcgaggtcggaatggatcttgaaggggaccgcaatggaggagcaaagaagaagaacttttttaaactgaacaataaaagtgaaaaagataagaaggaaaagaaaccaactgtcagtgtattttcaatgtttcgctattcaaattggcttgacaagttgtatatggtggtgggaactttggctgccatcatccatggggctggacttcctctcatgatgctggtgtttggagaaatgacagatatctttgcaaatgcaggaaatttagaagatctgatgtcaaacatcactaatagaagtgatatcaatgatacagggttcttcatgaatctggaggaagacatgaccaggtatgcctattattacagtggaattggtgctggggtgctggttgctgcttacattcaggtttcattttggtgcctggcagctggaagacaaatacacaaaattagaaaacagttttttcatgctataatgcgacaggagataggctggtttgatgtgcacgatgttggggagcttaacacccgacttacagatgatgtctccaagattaatgaaggaattggtgacaaaattggaatgttctttcagtcaatggcaacatttttcactgggtttatagtaggatttacacgtggttggaagctaacccttgtgattttggccatcagtcctgttcttggactgtcagctgctgtctgggcaaagatactatcttcatttactgataaagaactcttagcgtatgcaaaagctggagcagtagctgaagaggtcttggcagcaattagaactgtgattgcatttggaggacaaaagaaagaacttgaaaggtacaacaaaaatttagaagaagctaaaagaattgggataaagaaagctattacagccaatatttctataggtgctgctttcctgctgatctatgcatcttatgctctggccttctggtatgggaccaccttggtcctctcaggggaatattctattggacaagtactcactgtattcttttctgtattaattggggcttttagtgttggacaggcatctccaagcattgaagcatttgcaaatgcaagaggagcagcttatgaaatcttcaagataattgataataagccaagtattgacagctattcgaagagtgggcacaaaccagataatattaagggaaatttggaattcagaaatgttcacttcagttacccatctcgaaaagaagttaagatcttgaagggtctgaacctgaaggtgcagagtgggcagacggtggccctggttggaaacagtggctgtgggaagagcacaacagtccagctgatgcagaggctctatgaccccacagaggggatggtcagtgttgatggacaggatattaggaccataaatgtaaggtttctacgggaaatcattggtgtggtgagtcaggaacctgtattgtttgccaccacgatagctgaaaacattcgctatggccgtgaaaatgtcaccatggatgagattgagaaagctgtcaaggaagccaatgcctatgactttatcatgaaactgcctcataaatttgacaccctggttggagagagaggggcccagttgagtggtgggcagaagcagaggatcgccattgcacgtgccctggttcgcaaccccaagatcctcctgctggatgaggccacgtcagccttggacacagaaagcgaagcagtggttcaggtggctctggataaggccagaaaaggtcggaccaccattgtgatagctcatcgtttgtctacagttcgtaatgctgacgtcatcgctggtttcgatgatggagtcattgtggagaaaggaaatcatgatgaactcatgaaagagaaaggcatttacttcaaacttgtcacaatgcagacagcaggaaatgaagttgaattagaaaatgcagctgatgaatccaaaagtgaaattgatgccttggaaatgtcttcaaatgattcaagatccagtctaataagaaaaagatcaactcgtaggagtgtccgtggatcacaagcccaagacagaaagcttagtaccaaagaggctctggatgaaagtatacctccagtttccttttggaggattatgaagctaaatttaactgaatggccttattttgttgttggtgtattttgtgccattataaatggaggcctgcaaccagcatttgcaataatattttcaaagattataggggtttttacaagaattgatgatcctgaaacaaaacgacagaatagtaacttgttttcactattgtttctagcccttggaattatttcttttattacatttttccttcagggtttcacatttggcaaagctggagagatcctcaccaagcggctccgatacatggttttccgatccatgctcagacaggatgtgagttggtttgatgaccctaaaaacaccactggagcattgactaccaggctcgccaatgatgctgctcaagttaaaggggctataggttccaggcttgctgtaattacccagaatatagcaaatcttgggacaggaataattatatccttcatctatggttggcaactaacactgttactcttagcaattgtacccatcattgcaatagcaggagttgttgaaatgaaaatgttgtctggacaagcactgaaagataagaaagaactagaaggttctgggaagatcgctactgaagcaatagaaaacttccgaaccgttgtttctttgactcaggagcagaagtttgaacatatgtatgctcagagtttgcaggtaccatacagaaactctttgaggaaagcacacatctttggaattacattttccttcacccaggcaatgatgtatttttcctatgctggatgtttccggtttggagcctacttggtggcacataaactcatgagctttgaggatgttctgttagtattttcagctgttgtctttggtgccatggccgtggggcaagtcagttcatttgctcctgactatgccaaagccaaaatatcagcagcccacatcatcatgatcattgaaaaaacccctttgattgacagctacagcacggaaggcctaatgccgaacacattggaaggaaatgtcacatttggtgaagttgtattcaactatcccacccgaccggacatcccagtgcttcagggactgagcctggaggtgaagaagggccagacgctggctctggtgggcagcagtggctgtgggaagagcacagtggtccagctcctggagcggttctacgaccccttggcagggaaagtgctgcttgatggcaaagaaataaagcgactgaatgttcagtggctccgagcacacctgggcatcgtgtcccaggagcccatcctgtttgactgcagcattgctgagaacattgcctatggagacaacagccgggtggtgtcacaggaagagattgtgagggcagcaaaggaggccaacatacatgccttcatcgagtcactgcctaataaatatagcactaaagtaggagacaaaggaactcagctctctggtggccagaaacaacgcattgccatagctcgtgcccttgttagacagcctcatattttgcttttggatgaagccacgtcagctctggatacagaaagtgaaaaggttgtccaagaagccctggacaaagccagagaaggccgcacctgcattgtgattgctcaccgcctgtccaccatccagaatgcagacttaatagtggtgtttcagaatggcagagtcaaggagcatggcacgcatcagcagctgctggcacagaaaggcatctatttttcaatggtcagtgtccaggctggaacaaagcgccagtgaactctgactgtatgagatgttaaatactttttaatatttgtttagatatgacatttattcaaagttaaaagcaaacacttacagaattatgaagaggtatctgtttaacatttcctcagtcaagttcagagtcttcagagacttcgtaattaaaggaacagagtgagagacatcatcaagtggagagaaatcatagtttaaactgcattataaattttataacagaattaaagtagattttaaaagataaaatgtgtaattttgtttatattttcccatttggactgtaactgactgccttgctaaaagattatagaagtagcaaaaagtattgaaatgtttgcataaagtgtctataataaaactaaactttcatgtgactggagtcatcttgtccaaactgcctgtgaatatatcttctctcaattggaatattgtagataacttctgctttaaaaaagttttctttaaatatacctactcatttttgtgggaatggttaagcagtttaaataattcctgttgtatatgtctattcacattgggtcttacagaaccatctggcttcattcttcttggacttgatcctgctgattcttgcatttccaca

SEQ ID NO: 110089 - DNA, 3857 bp, Homo sapiens
  Payload ID: 1611
  Gene Symbol: ABCB10
  Gene Name: ATP-binding cassette, sub-family B (MDR/TAP), member 10
  Uniprot ID: Q9NRK6
  ENST ID: ENST00000344517
  CDS Start-End: 44-2260
cgcctggccggcgggctgaggcgtacgggtcgcacgcagcgccatgcgaggcccccctgcctggccgctgcggctgctcgagccaccgagccctgccgagccaggtcggctcctgccggtagcctgcgtgtgggccgcggccagccgcgttcccgggtccctatcgccgttcactggcctgaggccggcgcggctatggggcgcggggcccgcgctgctctggggcgttggagccgcgcgccgctggaggagcggctgccggggcgggggtccgggcgcctcgcggggcgtcctgggcctcgcgcggctcctggggctgtgggctcgcggccccggcagctgcaggtgcggggcttttgccgggccaggcgctcctcggctcccgcgcgcccggttcccgggcggtcccgcagccgctgcctgggcaggggacgaggcctggcggcgcgggccggcggcgcctcccggggacaaggggcggctgcgccccgcagcggccggactcccggaggcccggaagctcctggggctggcgtaccctgagcgccggaggctggcagctgcggttggatttctcacgatgtccagtgttatctccatgtctgcccctttcttcctggggaagatcattgatgtcatctataccaaccccactgtggactacagcgacaacctgacccgcctctgcctagggctcagtgccgtgtttctgtgtggtgctgccgccaatgccattcgtgtctacctcatgcaaacttcaggtcagcgcattgtgaataggctgagaacttcattattctcctccattctgaggcaggaggttgctttctttgacaagactcgcacaggagaattgattaaccgcctctcatcagacactgcactcctggggcgctcagtgactgaaaacctctcagatgggctcagggccggggcccaggcttccgtaggcatcagtatgatgttttttgtctcacctaatctggccacctttgttttgagcgtggtgcctccagtgtcaatcattgctgtaatttatgggcgatatctacggaaactgaccaaagtcactcaggattccctggcacaagccactcagctagctgaggaacgtattggaaatgtaagaactgttcgagcttttgggaaagaaatgactgaaatcgagaaatatgccagcaaagtggaccatgtaatgcagttagcaaggaaagaggcattcgcccgggctggtttctttggagcaactgggctctccggaaacctgatcgtgctttctgtcctgtacaaaggagggctgctgatgggcagtgcccacatgaccgtgggtgaactctcttccttcctaatgtatgctttctgggttggaataagcattggaggtctgagctctttctactcggagctgatgaaaggactgggtgcaggggggcgcctctgggagctcctggagagagagcccaagctgccttttaacgagggggtcatcttaaatgagaaaagcttccagggtgctttggagtttaagaacgtgcattttgcctatccagctcgcccagaggtgcccatatttcaggatttcagcctttccattccgtcaggatctgtcacggcactggttggcccaagtggttctggcaaatcaacagtgctttcactcctgctgaggttgtacgaccctgcttctggaactattagtcttgatggccatgacatccgtcagctaaacccagtgtggctgagatccaaaattgggacagtgagtcaggaacccattttgttttcttgctctattgctgagaacattgcttatggtgctgatgacccttcctctgtgaccgctgaggaaatccagagagtggctgaagtggccaatgcagtggccttcatccggaatttcccccaagggttcaacactgtggttggagaaaagggtgttctcctctcaggtgggcagaaacagcggattgcgattgcccgtgctctgctaaagaatcccaaaattcttctcctagatgaagcaaccagtgcgctggatgccgaaaatgagtaccttgttcaagaagctctagatcgactgatggatggaagaacggtgttagttattgcccatcgtctgtccaccattaagaatgctaatatggttgctgttcttgaccaaggaaaaattactgaatatggaaaacatgaagagctgctttcaaaaccaaatgggatatacagaaaactaatgaacaaacaaagttttatttcagcataaggaagcaattactggtaaacaatatgagactttaatgcaaaacagtgttgcagaaaaaaaactcagagactatgaaatacataaaccatatatcaagttatttgaaaaatacctatttttttccaaagtgtgtaaaagattgttttgaaacgtacctgttctcaagatctttttattcagagttttaataattgtaactttttaaatgtctatagcactgaagttattttcaggttttgtattttcttttcttgtggaatattttaattaatatagcatggcacctcattttcttttgcctgctgttaaagattgaagctattgtcaaatgacaactttaaaaaggcaattataaataaaaagcctgattattttaggccagtttaccaatcactgtgtaattcttctggtagtattctacctacttttaagtctaattttacagatagaataatggaaattgaaaatttaaccctttattccgataatctcatgaagcaaacctaactatttaacatcagctggaaagaagggaacatttatattgcccatctcctgtgtcttcaaaggtgtgagagctgaggaatatgtgttcctatgggaactatgtttgaatatgtgcagttttcaacattttggcacatgaaagcctgacaagtttttaaaagggcagaagctttattttttgaacaggaaaacatgttttttaaattcacatgtttgtatgagtacttttgcgaagcaaggcatgaactgctaggtattattaagaatgaatgatttttgcatttaagttgtttgaaggcatgtattttgaaaaatatctgttacaaatttataatttcaagacaaattgaatcttattttataatacttttggaatttcattaataaggctaaaatttgaggaatataactaattttcagccttaagacatttaagtttggaagtccttgctattcaacagaataacaagaaaacttcagaatgtatcactctcctgaaaagaagatattaataagcccttttatttatggttatagttttatttatagtctcaaaattcctaaagcaatgctacaaccattgaatttgccatattttgtatcagtgctgttaatttgctgttgcctcaagaaaaagtgctttttctccatggatgaggctagaccctaagaagtaattaagtcaatgtaaatcaaatggaagttttcccatgaactaagcatttattagttccctgattagactggaagaagaaaccactatttcatgaaaagcatggaatattatattttattgttcataattaatgaataaaattgatatgaatgaatatagtgttctttgaattagtaaacagtacatctgtgacaatcatttttaacaagctctacttgtgttctttataaagtgtgattttcagaaagcaaacaacacaattacaaggttgaatctgaggaaaataatccttgtgccatagaagtatttacgaaattgcatttcattgttatgttttattttctgatacatgatgttcaattttatctttaggtaatattttatatcatagattaaaatttatagtgaacttta

SEQ ID NO: 110090 - DNA, 4775 bp, Homo sapiens
  Payload ID: 1612
  Gene Symbol: ABCB11
  Gene Name: ATP-binding cassette, sub-family B (MDR/TAP), member 11
  Uniprot ID: O95342
  ENST ID: ENST00000263817
  CDS Start-End: 126-4091
aatgatgaaaaccgaggttggaaaaggttgtgaaaccttttaactctccacagtggagtccattatttcctctggcttcctcaaattcatattcacagggtcgttggctgtgggttgcaattaccatgtctgactcagtaattcttcgaagtataaagaaatttggagaggagaatgatggttttgagtcagataaatcatataataatgataagaaatcaaggttacaagatgagaagaaaggtgatggcgttagagttggcttctttcaattgtttcggttttcttcatcaactgacatttggctgatgtttgtgggaagtttgtgtgcatttctccatggaatagcccagccaggcgtgctactcatttttggcacaatgacagatgtttttattgactacgacgttgagttacaagaactccagattccaggaaaagcatgtgtgaataacaccattgtatggactaacagttccctcaaccagaacatgacaaatggaacacgttgtgggttgctgaacatcgagagcgaaatgatcaaatttgccagttactatgctggaattgctgtcgcagtacttatcacaggatatattcaaatatgcttttgggtcattgccgcagctcgtcagatacagaaaatgagaaaattttactttaggagaataatgagaatggaaatagggtggtttgactgcaattcagtgggggagctgaatacaagattctctgatgatattaataaaatcaatgatgccatagctgaccaaatggcccttttcattcagcgcatgacctcgaccatctgtggtttcctgttgggatttttcaggggttggaaactgaccttggttattatttctgtcagccctctcattgggattggagcagccaccattggtctgagtgtgtccaagtttacggactatgagctgaaggcctatgccaaagcaggggtggtggctgatgaagtcatttcatcaatgagaacagtggctgcttttggtggtgagaaaagagaggttgaaaggtatgagaaaaatcttgtgttcgcccagcgttggggaattagaaaaggaatagtgatgggattctttactggattcgtgtggtgtctcatctttttgtgttatgcactggccttctggtacggctccacacttgtcctggatgaaggagaatatacaccaggaacccttgtccagattttcctcagtgtcatagtaggagctttaaatcttggcaatgcctctccttgtttggaagcctttgcaactggacgtgcagcagccaccagcatttttgagacaatagacaggaaacccatcattgactgcatgtcagaagatggttacaagttggatcgaatcaagggtgaaattgaattccataatgtgaccttccattatccttccagaccagaggtgaagattctaaatgacctcaacatggtcattaaaccaggggaaatgacagctctggtaggacccagtggagctggaaaaagtacagcactgcaactcattcagcgattctatgacccctgtgaaggaatggtgaccgtggatggccatgacattcgctctcttaacattcagtggcttagagatcagattgggatagtggagcaagagccagttctgttctctaccaccattgcagaaaatattcgctatggcagagaagatgcaacaatggaagacatagtccaagctgccaaggaggccaatgcctacaacttcatcatggacctgccacagcaatttgacacccttgttggagaaggaggaggccagatgagtggtggccagaaacaaagggtagctatcgccagagccctcatccgaaatcccaagattctgcttttggacatggccacctcagctctggacaatgagagtgaagccatggtgcaagaagtgctgagtaagattcagcatgggcacacaatcatttcagttgctcatcgcttgtctacggtcagagctgcagataccatcattggttttgaacatggcactgcagtggaaagagggacccatgaagaattactggaaaggaaaggtgtttacttcactctagtgactttgcaaagccagggaaatcaagctcttaatgaagaggacataaaggatgcaactgaagatgacatgcttgcgaggacctttagcagagggagctaccaggatagtttaagggcttccatccggcaacgctccaagtctcagctttcttacctggtgcacgaacctccattagctgttgtagatcataagtctacctatgaagaagatagaaaggacaaggacattcctgtgcaggaagaagttgaacctgccccagttaggaggattctgaaattcagtgctccagaatggccctacatgctggtagggtctgtgggtgcagctgtgaacgggacagtcacacccttgtatgcctttttattcagccagattcttgggactttttcaattcctgataaagaggaacaaaggtcacagatcaatggtgtgtgcctactttttgtagcaatgggctgtgtatctcttttcacccaatttctacagggatatgcctttgctaaatctggggagctcctaacaaaaaggctacgtaaatttggtttcagggcaatgctggggcaagatattgcctggtttgatgacctcagaaatagccctggagcattgacaacaagacttgctacagatgcttcccaagttcaaggggctgccggctctcagatcgggatgatagtcaattccttcactaacgtcactgtggccatgatcattgccttctcctttagctggaagctgagcctggtcatcttgtgcttcttccccttcttggctttatcaggagccacacagaccaggatgttgacaggatttgcctctcgagataagcaggccctggagatggtgggacagattacaaatgaagccctcagtaacatccgcactgttgctggaattggaaaggagaggcggttcattgaagcacttgagactgagctggagaagcccttcaagacagccattcagaaagccaatatttacggattctgctttgcctttgcccagtgcatcatgtttattgcgaattctgcttcctacagatatggaggttacttaatctccaatgaggggctccatttcagctatgtgttcagggtgatctctgcagttgtactgagtgcaacagctcttggaagagccttctcttacaccccaagttatgcaaaagctaaaatatcagctgcacgcttttttcaactgctggaccgacaacccccaatcagtgtatacaatactgcaggtgaaaaatgggacaacttccaggggaagattgattttgttgattgtaaatttacatatccttctcgacctgactcgcaagttctgaatggtctctcagtgtcgattagtccagggcagacactggcgtttgttgggagcagtggatgtggcaaaagcactagcattcagctgttggaacgtttctatgatcctgatcaagggaaggtgatgatagatggtcatgacagcaaaaaagtaaatgtccagttcctccgctcaaacattggaattgtttcccaggaaccagtgttgtttgcctgtagcataatggacaatatcaagtatggagacaacaccaaagaaattcccatggaaagagtcatagcagctgcaaaacaggctcagctgcatgattttgtcatgtcactcccagagaaatatgaaactaacgttgggtcccaggggtctcaactctctagaggggagaaacaacgcattgctattgctcgggccattgtacgagatcctaaaatcttgctactagatgaagccacttctgccttagacacagaaagtgaaaagacggtgcaggttgctctagacaaagccagagagggtcggacctgcattgtcattgcccatcgcttgtccaccatccagaacgcggatatcattgctgtcatggcacagggggtggtgattgaaaaggggacccatgaagaactgatggcccaaaaaggagcctactacaaactagtcaccactggatcccccatcagttgacccaatgcaagaatctcagacacacatgacgcaccagttacaggggttgtttttaaagaaaaaaacaatcccagcaggagggattgctgggattgttttttctttaaagaagaatgttaatattttacttttacagtcattttcctacatcggaatccaagctaatttctaatggccttccataataattctgctttagatgtgtatacagaaaatgaaagaaactagggtccatatgagggaaaacccaatgtcaagtggcagctcagccaccactcagtgcttctctgtgcaggagccagtcctgattaatatgtgggaattagtgagacatcagggagtaagtgacactttgaactcctcaagggcagagaactgtctttcatttttgaaccctcggtgtacacagaggcgggtctataacaggcaatcaacaaacgtttcttgagctagaccaaggtcagatttgaaaagaacagaaggactgaagaccagctgtgtttcttaactaaatttgtctttcaagtgaaaccagcttccttcatctctaaggctaaggatagggaaagggtggatgctctcaggctgagggaggcagaaagggaaagtattagcatgagctttccagttagggctgttgatttatgctttaacttcagagtgagtgtaggggtggtgatgcta

SEQ ID NO: 110091 - DNA, 2822 bp, Homo sapiens
  Payload ID: 1612
  Gene Symbol: ABCB11
  Gene Name: ATP-binding cassette, sub-family B (MDR/TAP), member 11
  ENST ID: ENST00000439188
  CDS Start-End: 1-219
gacattcgctctcttaacattcagtggcttagagatcagattgggatagtggagcaagagccagttctgttctctaccaccattgcagaaaatattcgctatggcagagaagatgcaacaatggaagacatagtccaagctgccaaggaggccaatgcctacaacttcatcatggacctgccacagggatatttctttcagtggaagtcggagcagtgaaaattcgtgcttgagaagaaaactatgacagaaaggacattatagtggatcactgtcagaagccatcaaattcttttcccttcatgactggtgtcaccttccatctagcaatttgacacccttgttggagaaggaggaggccagatgagtggtggccagaaacaaagggtagctatcgccagagccctcatccgaaatcccaagattctgcttttggacatggccacctcagctctggacaatgagagtgaagccatggtgcaagaagtgctgagtaagattcagcatgggcacacaatcatttcagttgctcatcgcttgtctacggtcagagctgcagataccatcattggttttgaacatggcactgcagtggaaagagggacccatgaagaattactggaaaggaaaggtgtttacttcactctagtgactttgcaaagccagggaaatcaagctcttaatgaagaggacataaaggatgcaactgaagatgacatgcttgcgaggacctttagcagagggagctaccaggatagtttaagggcttccatccggcaacgctccaagtctcagctttcttacctggtgcacgaacctccattagctgttgtagatcataagtctacctatgaagaagatagaaaggacaaggacattcctgtgcaggaagaagttgaacctgccccagttaggaggattctgaaattcagtgctccagaatggccctacatgctggtagggtctgtgggtgcagctgtgaacgggacagtcacacccttgtatgcctttttattcagccagattcttgggactttttcaattcctgataaagaggaacaaaggtcacagatcaatggtgtgtgcctactttttgtagcaatgggctgtgtatctcttttcacccaatttctacagggatatgcctttgctaaatctggggagctcctaacaaaaaggctacgtaaatttggtttcagggcaatgctggggcaagatattgcctggtttgatgacctcagaaatagccctggagcattgacaacaagacttgctacagatgcttcccaagttcaaggggctgccggctctcagatcgggatgatagtcaattccttcactaacgtcactgtggccatgatcattgccttctcctttagctggaagctgagcctggtcatcttgtgcttcttccccttcttggctttatcaggagccacacagaccaggatgttgacaggatttgcctctcgagataagcaggccctggagatggtgggacagattacaaatgaagccctcagtaacatccgcactgttgctggaattggaaaggagaggcggttcattgaagcacttgagactgagctggagaagcccttcaagacagccattcagaaagccaatatttacggattctgctttgcctttgcccagtgcatcatgtttattgcgaattctgcttcctacagatatggaggttacttaatctccaatgaggggctccatttcagctatgtgttcagggtgatctctgcagttgtactgagtgcaacagctcttggaagagccttctcttacaccccaagttatgcaaaagctaaaatatcagctgcacgcttttttcaactgctggaccgacaacccccaatcagtgtatacaatactgcaggtgaaaaatgggacaacttccaggggaagattgattttgttgattgtaaatttacatatccttctcgacctgactcgcaagttctgaatggtctctcagtgtcgattagtccagggcagacactggcgtttgttgggagcagtggatgtggcaaaagcactagcattcagctgttggaacgtttctatgatcctgatcaagggaaggtggaaccagtgttgtttgcctgtagcataatggacaatatcaagtatggagacaacaccaaagaaattcccatggaaagagtcatagcagctgcaaaacaggctcagctgcatgattttgtcatgtcactcccagagaaatatgaaactaacgttgggtcccaggggtctcaactctctagaggggagaaacaacgcattgctattgctcgggccattgtacgagatcctaaaatcttgctactagatgaagccacttctgccttagacacagaaagtgaaaagacggtgcaggttgctctagacaaagccagagagggtcggacctgcattgtcattgcccatcgcttgtccaccatccagaacgcggatatcattgctgtcatggcacagggggtggtgattgaaaaggggacccatgaagaactgatggcccaaaaaggagcctactacaaactagtcaccactggatcccccatcagttgacccaatgcaagaatctcagacacacatgacgcaccagttacaggggttgtttttaaagaaaaaaacaatcccagcaggagggattgctgggattgttttttctttaaagaagaatgttaatattttacttttacagtcattttcctacatcggaatccaagctaatttctaatggccttccataataattctgctttagatgtgtatacagaaaatgaaagaaactagggtccatatga

SEQ ID NO: 110092 - DNA, 2040 bp, Homo sapiens
  Payload ID: 1612
  Gene Symbol: ABCB11
  Gene Name: ATP-binding cassette, sub-family B (MDR/TAP), member 11
  ENST ID: ENST00000618180
  CDS Start-End: 1-1356
gctgccggctctcagatcgggatgatagtcaattccttcactaacgtcactgtggccatgatcattgccttctcctttagctggaagctgagcctggtcatcttgtgcttcttccccttcttggctttatcaggagccacacagaccaggatgttgacaggatttgcctctcgagataagcaggccctggagatggtgggacagattacaaatgaagccctcagtaacatccgcactgttgctggaattggaaaggagaggcggttcattgaagcacttgagactgagctggagaagcccttcaagacagccattcagaaagccaatatttacggattctgctttgcctttgcccagtgcatcatgtttattgcgaattctgcttcctacagatatggaggttacttaatctccaatgaggggctccatttcagctatgtgttcagggtgatctctgcagttgtactgagtgcaacagctcttggaagagccttctcttacaccccaagttatgcaaaagctaaaatatcagctgcacgcttttttcaactgctggaccgacaacccccaatcagtgtatacaatactgcaggtgaaaaatgggacaacttccaggggaagattgattttgttgattgtaaatttacatatccttctcgacctgactcgcaagttctgaatggtctctcagtgtcgattagtccagggcagacactggcgtttgttgggagcagtggatgtggcaaaagcactagcattcagctgttggaacgtttctatgatcctgatcaagggaaggtgatgatagatggtcatgacagcaaaaaagtaaatgtccagttcctccgctcaaacattggaattgtttcccaggaaccagtgttgtttgcctgtagcataatggacaatatcaagtatggagacaacaccaaagaaattcccatggaaagagtcatagcagctgcaaaacaggctcagctgcatgattttgtcatgtcactcccagagaaatatgaaactaacgttgggtcccaggggtctcaactctctagaggggagaaacaacgcattgctattgctcgggccattgtacgagatcctaaaatcttgctactagatgaagccacttctgccttagacacagaaagtgaaaagacggtgcaggttgctctagacaaagccagagagggtcggacctgcattgtcattgcccatcgcttgtccaccatccagaacgcggatatcattgctgtcatggcacagggggtggtgattgaaaaggggacccatgaagaactgatggcccaaaaaggagcctactacaaactagtcaccactggatcccccatcagttgacccaatgcaagaatctcagacacacatgacgcaccagttacaggggttgtttttaaagaaaaaaacaatcccagcaggagggattgctgggattgttttttctttaaagaagaatgttaatattttacttttacagtcattttcctacatcggaatccaagctaatttctaatggccttccataataattctgctttagatgtgtatacagaaaatgaaagaaactagggtccatatgagggaaaacccaatgtcaagtggcagctcagccaccactcagtgcttctctgtgcaggagccagtcctgattaatatgtgggaattagtgagacatcagggagtaagtgacactttgaactcctcaagggcagagaactgtctttcatttttgaaccctcggtgtacacagaggcgggtctataacaggcaatcaacaaacgtttcttgagctagaccaaggtcagatttgaaaagaacagaaggactgaagaccagctgtgtttcttaactaaatttgtctttcaagtgaaaccagcttccttcatctctaaggctaaggatagggaaagggtggatgctctcaggctgagggaggcagaaagggaaagtattagcatgagctttccagttagggctgttgatttatgctttaacttcagagtgagtgtaggggtggtgatgcta

SEQ ID NO: 110093 - DNA, 4020 bp, Homo sapiens
  Payload ID: 1613
  Gene Symbol: ABCB4
  Gene Name: ATP-binding cassette, sub-family B (MDR/TAP), member 4
  Uniprot ID: P21439
  ENST ID: ENST00000265723
  CDS Start-End: 113-3973
gggcgggggcgggggcgggggcgaggccgcggcgagcaaagtccaggcccctctgctgcagcgcccgcgcgtccagaggccctgccagacacgcgcgaggttcgaggctgagatggatcttgaggcggcaaagaacggaacagcctggcgccccacgagcgcggagggcgactttgaactgggcatcagcagcaaacaaaaaaggaaaaaaacgaagacagtgaaaatgattggagtattaacattgtttcgatactccgattggcaggataaattgtttatgtcgctgggtaccatcatggccatagctcacggatcaggtctccccctcatgatgatagtatttggagagatgactgacaaatttgttgatactgcaggaaacttctcctttccagtgaacttttccttgtcgctgctaaatccaggcaaaattctggaagaagaaatgactagatatgcatattactactcaggattgggtgctggagttcttgttgctgcctatatacaagtttcattttggactttggcagctggtcgacagatcaggaaaattaggcagaagttttttcatgctattctacgacaggaaataggatggtttgacatcaacgacaccactgaactcaatacgcggctaacagatgacatctccaaaatcagtgaaggaattggtgacaaggttggaatgttctttcaagcagtagccacgttttttgcaggattcatagtgggattcatcagaggatggaagctcacccttgtgataatggccatcagccctattctaggactctctgcagccgtttgggcaaagatactctcggcatttagtgacaaagaactagctgcttatgcaaaagcaggcgccgtggcagaagaggctctgggggccatcaggactgtgatagctttcgggggccagaacaaagagctggaaaggtatcagaaacatttagaaaatgccaaagagattggaattaaaaaagctatttcagcaaacatttccatgggtattgccttcctgttaatatatgcatcatatgcactggccttctggtatggatccactctagtcatatcaaaagaatatactattggaaatgcaatgacagtttttttttcaatcctaattggagctttcagtgttggccaggctgccccatgtattgatgcttttgccaatgcaagaggagcagcatatgtgatctttgatattattgataataatcctaaaattgacagtttttcagagagaggacacaaaccagacagcatcaaagggaatttggagttcaatgatgttcacttttcttacccttctcgagctaacgtcaagatcttgaagggcctcaacctgaaggtgcagagtgggcagacggtggccctggttggaagtagtggctgtgggaagagcacaacggtccagctgatacagaggctctatgaccctgatgagggcacaattaacattgatgggcaggatattaggaactttaatgtaaactatctgagggaaatcattggtgtggtgagtcaggagccggtgctgttttccaccacaattgctgaaaatatttgttatggccgtggaaatgtaaccatggatgagataaagaaagctgtcaaagaggccaacgcctatgagtttatcatgaaattaccacagaaatttgacaccctggttggagagagaggggcccagctgagtggtgggcagaagcagaggatcgccattgcacgtgccctggttcgcaaccccaagatccttctgctggatgaggccacgtcagcattggacacagaaagtgaagctgaggtacaggcagctctggataaggccagagaaggccggaccaccattgtgatagcacaccgactgtctacggtccgaaatgcagatgtcatcgctgggtttgaggatggagtaattgtggagcaaggaagccacagcgaactgatgaagaaggaaggggtgtacttcaaacttgtcaacatgcagacatcaggaagccagatccagtcagaagaatttgaactaaatgatgaaaaggctgccactagaatggccccaaatggctggaaatctcgcctatttaggcattctactcagaaaaaccttaaaaattcacaaatgtgtcagaagagccttgatgtggaaaccgatggacttgaagcaaatgtgccaccagtgtcctttctgaaggtcctgaaactgaataaaacagaatggccctactttgtcgtgggaacagtatgtgccattgccaatggggggcttcagccggcattttcagtcatattctcagagatcatagcgatttttggaccaggcgatgatgcagtgaagcagcagaagtgcaacatattctctttgattttcttatttctgggaattatttctttttttactttcttccttcagggtttcacgtttgggaaagctggcgagatcctcaccagaagactgcggtcaatggcttttaaagcaatgctaagacaggacatgagctggtttgatgaccataaaaacagtactggtgcactttctacaagacttgccacagatgctgcccaagtccaaggagccacaggaaccaggttggctttaattgcacagaatatagctaaccttggaactggtattatcatatcatttatctacggttggcagttaaccctattgctattagcagttgttccaattattgctgtgtcaggaattgttgaaatgaaattgttggctggaaatgccaaaagagataaaaaagaactggaagctgctggaaagattgcaacagaggcaatagaaaatattaggacagttgtgtctttgacccaggaaagaaaatttgaatcaatgtatgttgaaaaattgtatggaccttacaggaattctgtgcagaaggcacacatctatggaattacttttagtatctcacaagcatttatgtatttttcctatgccggttgttttcgatttggtgcatatctcattgtgaatggacatatgcgcttcagagatgttattctggtgttttctgcaattgtatttggtgcagtggctctaggacatgccagttcatttgctccagactatgctaaagctaagctgtctgcagcccacttattcatgctgtttgaaagacaacctctgattgacagctacagtgaagaggggctgaagcctgataaatttgaaggaaatataacatttaatgaagtcgtgttcaactatcccacccgagcaaacgtgccagtgcttcaggggctgagcctggaggtgaagaaaggccagacactagccctggtgggcagcagtggctgtgggaagagcacggtggtccagctcctggagcggttctacgaccccttggcggggacagtgtttgtggactttggttttcagcttctcgatggtcaagaagcaaagaaactcaatgtccagtggctcagagctcaactcggaatcgtgtctcaggagcctatcctatttgactgcagcattgccgagaatattgcctatggagacaacagccgggttgtatcacaggatgaaattgtgagtgcagccaaagctgccaacatacatcctttcatcgagacgttaccccacaaatatgaaacaagagtgggagataaggggactcagctctcaggaggtcaaaaacagaggattgctattgcccgagccctcatcagacaacctcaaatcctcctgttggatgaagctacatcagctctggatactgaaagtgaaaaggttgtccaagaagccctggacaaagccagagaaggccgcacctgcattgtgattgctcaccgcctgtccaccatccagaatgcagacttaatagtggtgtttcagaatgggagagtcaaggagcatggcacgcatcagcagctgctggcacagaaaggcatctatttttcaatggtcagtgtccaggctgggacacagaacttatgaacttttgctacagtatattttaaaaataaattcaaattattctacca

SEQ ID NO: 110094 - DNA, 3826 bp, Homo sapiens
  Payload ID: 1613
  Gene Symbol: ABCB4
  Gene Name: ATP-binding cassette, sub-family B (MDR/TAP), member 4
  Uniprot ID: P21439
  ENST ID: ENST00000358400
  CDS Start-End: 77-3775
caaagtccaggcccctctgctgcagcgcccgcgcgtccagaggccctgccagacacgcgcgaggttcgaggctgagatggatcttgaggcggcaaagaacggaacagcctggcgccccacgagcgcggagggcgactttgaactgggcatcagcagcaaacaaaaaaggaaaaaaacgaagacagtgaaaatgattggagtattaacattgtttcgatactccgattggcaggataaattgtttatgtcgctgggtaccatcatggccatagctcacggatcaggtctccccctcatgatgatagtatttggagagatgactgacaaatttgttgatactgcaggaaacttctcctttccagtgaacttttccttgtcgctgctaaatccaggcaaaattctggaagaagaaatgactagatatgcatattactactcaggattgggtgctggagttcttgttgctgcctatatacaagtttcattttggactttggcagctggtcgacagatcaggaaaattaggcagaagttttttcatgctattctacgacaggaaataggatggtttgacatcaacgacaccactgaactcaatacgcggctaacagatgacatctccaaaatcagtgaaggaattggtgacaaggttggaatgttctttcaagcagtagccacgttttttgcaggattcatagtgggattcatcagaggatggaagctcacccttgtgataatggccatcagccctattctaggactctctgcagccgtttgggcaaagatactctcggcatttagtgacaaagaactagctgcttatgcaaaagcaggcgccgtggcagaagaggctctgggggccatcaggactgtgatagctttcgggggccagaacaaagagctggaaaggtatcagaaacatttagaaaatgccaaagagattggaattaaaaaagctatttcagcaaacatttccatgggtattgccttcctgttaatatatgcatcatatgcactggccttctggtatggatccactctagtcatatcaaaagaatatactattggaaatgcaatgacagtttttttttcaatcctaattggagctttcagtgttggccaggctgccccatgtattgatgcttttgccaatgcaagaggagcagcatatgtgatctttgatattattgataataatcctaaaattgacagtttttcagagagaggacacaaaccagacagcatcaaagggaatttggagttcaatgatgttcacttttcttacccttctcgagctaacgtcaagatcttgaagggcctcaacctgaaggtgcagagtgggcagacggtggccctggttggaagtagtggctgtgggaagagcacaacggtccagctgatacagaggctctatgaccctgatgagggcacaattaacattgatgggcaggatattaggaactttaatgtaaactatctgagggaaatcattggtgtggtgagtcaggagccggtgctgttttccaccacaattgctgaaaatatttgttatggccgtggaaatgtaaccatggatgagataaagaaagctgtcaaagaggccaacgcctatgagtttatcatgaaattaccacagaaatttgacaccctggttggagagagaggggcccagctgagtggtgggcagaagcagaggatcgccattgcacgtgccctggttcgcaaccccaagatccttctgctggatgaggccacgtcagcattggacacagaaagtgaagctgaggtacaggcagctctggataaggccagagaaggccggaccaccattgtgatagcacaccgactgtctacggtccgaaatgcagatgtcatcgctgggtttgaggatggagtaattgtggagcaaggaagccacagcgaactgatgaagaaggaaggggtgtacttcaaacttgtcaacatgcagacatcaggaagccagatccagtcagaagaatttgaactaaatgatgaaaaggctgccactagaatggccccaaatggctggaaatctcgcctatttaggcattctactcagaaaaaccttaaaaattcacaaatgtgtcagaagagccttgatgtggaaaccgatggacttgaagcaaatgtgccaccagtgtcctttctgaaggtcctgaaactgaataaaacagaatggccctactttgtcgtgggaacagtatgtgccattgccaatggggggcttcagccggcattttcagtcatattctcagagatcatagcgatttttggaccaggcgatgatgcagtgaagcagcagaagtgcaacatattctctttgattttcttatttctgggaattatttctttttttactttcttccttcagggtttcacgtttgggaaagctggcgagatcctcaccagaagactgcggtcaatggcttttaaagcaatgctaagacaggacatgagctggtttgatgaccataaaaacagtactggtgcactttctacaagacttgccacagatgctgcccaagtccaaggagccacaggaaccaggttggctttaattgcacagaatatagctaaccttggaactggtattatcatatcatttatctacggttggcagttaaccctattgctattagcagttgttccaattattgctgtgtcaggaattgttgaaatgaaattgttggctggaaatgccaaaagagataaaaaagaactggaagctgctggaaagattgcaacagaggcaatagaaaatattaggacagttgtgtctttgacccaggaaagaaaatttgaatcaatgtatgttgaaaaattgtatggaccttacagggtgttttctgcaattgtatttggtgcagtggctctaggacatgccagttcatttgctccagactatgctaaagctaagctgtctgcagcccacttattcatgctgtttgaaagacaacctctgattgacagctacagtgaagaggggctgaagcctgataaatttgaaggaaatataacatttaatgaagtcgtgttcaactatcccacccgagcaaacgtgccagtgcttcaggggctgagcctggaggtgaagaaaggccagacactagccctggtgggcagcagtggctgtgggaagagcacggtggtccagctcctggagcggttctacgaccccttggcggggacagtgcttctcgatggtcaagaagcaaagaaactcaatgtccagtggctcagagctcaactcggaatcgtgtctcaggagcctatcctatttgactgcagcattgccgagaatattgcctatggagacaacagccgggttgtatcacaggatgaaattgtgagtgcagccaaagctgccaacatacatcctttcatcgagacgttaccccacaaatatgaaacaagagtgggagataaggggactcagctctcaggaggtcaaaaacagaggattgctattgcccgagccctcatcagacaacctcaaatcctcctgttggatgaagctacatcagctctggatactgaaagtgaaaaggttgtccaagaagccctggacaaagccagagaaggccgcacctgcattgtgattgctcaccgcctgtccaccatccagaatgcagacttaatagtggtgtttcagaatgggagagtcaaggagcatggcacgcatcagcagctgctggcacagaaaggcatctatttttcaatggtcagtgtccaggctgggacacagaacttatgaacttttgctacagtatattttaaaaataaattcaaattattctaccatttt

SEQ ID NO: 110095 - DNA, 3923 bp, Homo sapiens
  Payload ID: 1613
  Gene Symbol: ABCB4
  Gene Name: ATP-binding cassette, sub-family B (MDR/TAP), member 4
  Uniprot ID: P21439
  ENST ID: ENST00000359206
  CDS Start-End: 33-3872
cctgccagacacgcgcgaggttcgaggctgagatggatcttgaggcggcaaagaacggaacagcctggcgccccacgagcgcggagggcgactttgaactgggcatcagcagcaaacaaaaaaggaaaaaaacgaagacagtgaaaatgattggagtattaacattgtttcgatactccgattggcaggataaattgtttatgtcgctgggtaccatcatggccatagctcacggatcaggtctccccctcatgatgatagtatttggagagatgactgacaaatttgttgatactgcaggaaacttctcctttccagtgaacttttccttgtcgctgctaaatccaggcaaaattctggaagaagaaatgactagatatgcatattactactcaggattgggtgctggagttcttgttgctgcctatatacaagtttcattttggactttggcagctggtcgacagatcaggaaaattaggcagaagttttttcatgctattctacgacaggaaataggatggtttgacatcaacgacaccactgaactcaatacgcggctaacagatgacatctccaaaatcagtgaaggaattggtgacaaggttggaatgttctttcaagcagtagccacgttttttgcaggattcatagtgggattcatcagaggatggaagctcacccttgtgataatggccatcagccctattctaggactctctgcagccgtttgggcaaagatactctcggcatttagtgacaaagaactagctgcttatgcaaaagcaggcgccgtggcagaagaggctctgggggccatcaggactgtgatagctttcgggggccagaacaaagagctggaaaggtatcagaaacatttagaaaatgccaaagagattggaattaaaaaagctatttcagcaaacatttccatgggtattgccttcctgttaatatatgcatcatatgcactggccttctggtatggatccactctagtcatatcaaaagaatatactattggaaatgcaatgacagtttttttttcaatcctaattggagctttcagtgttggccaggctgccccatgtattgatgcttttgccaatgcaagaggagcagcatatgtgatctttgatattattgataataatcctaaaattgacagtttttcagagagaggacacaaaccagacagcatcaaagggaatttggagttcaatgatgttcacttttcttacccttctcgagctaacgtcaagatcttgaagggcctcaacctgaaggtgcagagtgggcagacggtggccctggttggaagtagtggctgtgggaagagcacaacggtccagctgatacagaggctctatgaccctgatgagggcacaattaacattgatgggcaggatattaggaactttaatgtaaactatctgagggaaatcattggtgtggtgagtcaggagccggtgctgttttccaccacaattgctgaaaatatttgttatggccgtggaaatgtaaccatggatgagataaagaaagctgtcaaagaggccaacgcctatgagtttatcatgaaattaccacagaaatttgacaccctggttggagagagaggggcccagctgagtggtgggcagaagcagaggatcgccattgcacgtgccctggttcgcaaccccaagatccttctgctggatgaggccacgtcagcattggacacagaaagtgaagctgaggtacaggcagctctggataaggccagagaaggccggaccaccattgtgatagcacaccgactgtctacggtccgaaatgcagatgtcatcgctgggtttgaggatggagtaattgtggagcaaggaagccacagcgaactgatgaagaaggaaggggtgtacttcaaacttgtcaacatgcagacatcaggaagccagatccagtcagaagaatttgaactaaatgatgaaaaggctgccactagaatggccccaaatggctggaaatctcgcctatttaggcattctactcagaaaaaccttaaaaattcacaaatgtgtcagaagagccttgatgtggaaaccgatggacttgaagcaaatgtgccaccagtgtcctttctgaaggtcctgaaactgaataaaacagaatggccctactttgtcgtgggaacagtatgtgccattgccaatggggggcttcagccggcattttcagtcatattctcagagatcatagcgatttttggaccaggcgatgatgcagtgaagcagcagaagtgcaacatattctctttgattttcttatttctgggaattatttctttttttactttcttccttcagggtttcacgtttgggaaagctggcgagatcctcaccagaagactgcggtcaatggcttttaaagcaatgctaagacaggacatgagctggtttgatgaccataaaaacagtactggtgcactttctacaagacttgccacagatgctgcccaagtccaaggagccacaggaaccaggttggctttaattgcacagaatatagctaaccttggaactggtattatcatatcatttatctacggttggcagttaaccctattgctattagcagttgttccaattattgctgtgtcaggaattgttgaaatgaaattgttggctggaaatgccaaaagagataaaaaagaactggaagctgctggaaagattgcaacagaggcaatagaaaatattaggacagttgtgtctttgacccaggaaagaaaatttgaatcaatgtatgttgaaaaattgtatggaccttacaggaattctgtgcagaaggcacacatctatggaattacttttagtatctcacaagcatttatgtatttttcctatgccggttgttttcgatttggtgcatatctcattgtgaatggacatatgcgcttcagagatgttattctggtgttttctgcaattgtatttggtgcagtggctctaggacatgccagttcatttgctccagactatgctaaagctaagctgtctgcagcccacttattcatgctgtttgaaagacaacctctgattgacagctacagtgaagaggggctgaagcctgataaatttgaaggaaatataacatttaatgaagtcgtgttcaactatcccacccgagcaaacgtgccagtgcttcaggggctgagcctggaggtgaagaaaggccagacactagccctggtgggcagcagtggctgtgggaagagcacggtggtccagctcctggagcggttctacgaccccttggcggggacagtgcttctcgatggtcaagaagcaaagaaactcaatgtccagtggctcagagctcaactcggaatcgtgtctcaggagcctatcctatttgactgcagcattgccgagaatattgcctatggagacaacagccgggttgtatcacaggatgaaattgtgagtgcagccaaagctgccaacatacatcctttcatcgagacgttaccccacaaatatgaaacaagagtgggagataaggggactcagctctcaggaggtcaaaaacagaggattgctattgcccgagccctcatcagacaacctcaaatcctcctgttggatgaagctacatcagctctggatactgaaagtgaaaaggttgtccaagaagccctggacaaagccagagaaggccgcacctgcattgtgattgctcaccgcctgtccaccatccagaatgcagacttaatagtggtgtttcagaatgggagagtcaaggagcatggcacgcatcagcagctgctggcacagaaaggcatctatttttcaatggtcagtgtccaggctgggacacagaacttatgaacttttgctacagtatattttaaaaataaattcaaattattctaccatttt

SEQ ID NO: 110096 - DNA, 3699 bp, Homo sapiens
  Payload ID: 1613
  Gene Symbol: ABCB4
  Gene Name: ATP-binding cassette, sub-family B (MDR/TAP), member 4
  Uniprot ID: P21439
  ENST ID: ENST00000453593
  CDS Start-End: 1-3699
atggatcttgaggcggcaaagaacggaacagcctggcgccccacgagcgcggagggcgactttgaactgggcatcagcagcaaacaaaaaaggaaaaaaacgaagacagtgaaaatgattggagtattaacattgtttcgatactccgattggcaggataaattgtttatgtcgctgggtaccatcatggccatagctcacggatcaggtctccccctcatgatgatagtatttggagagatgactgacaaatttgttgatactgcaggaaacttctcctttccagtgaacttttccttgtcgctgctaaatccaggcaaaattctggaagaagaaatgactagatatgcatattactactcaggattgggtgctggagttcttgttgctgcctatatacaagtttcattttggactttggcagctggtcgacagatcaggaaaattaggcagaagttttttcatgctattctacgacaggaaataggatggtttgacatcaacgacaccactgaactcaatacgcggctaacagatgacatctccaaaatcagtgaaggaattggtgacaaggttggaatgttctttcaagcagtagccacgttttttgcaggattcatagtgggattcatcagaggatggaagctcacccttgtgataatggccatcagccctattctaggactctctgcagccgtttgggcaaagatactctcggcatttagtgacaaagaactagctgcttatgcaaaagcaggcgccgtggcagaagaggctctgggggccatcaggactgtgatagctttcgggggccagaacaaagagctggaaaggtatcagaaacatttagaaaatgccaaagagattggaattaaaaaagctatttcagcaaacatttccatgggtattgccttcctgttaatatatgcatcatatgcactggccttctggtatggatccactctagtcatatcaaaagaatatactattggaaatgcaatgacagtttttttttcaatcctaattggagctttcagtgttggccaggctgccccatgtattgatgcttttgccaatgcaagaggagcagcatatgtgatctttgatattattgataataatcctaaaattgacagtttttcagagagaggacacaaaccagacagcatcaaagggaatttggagttcaatgatgttcacttttcttacccttctcgagctaacgtcaagatcttgaagggcctcaacctgaaggtgcagagtgggcagacggtggccctggttggaagtagtggctgtgggaagagcacaacggtccagctgatacagaggctctatgaccctgatgagggcacaattaacattgatgggcaggatattaggaactttaatgtaaactatctgagggaaatcattggtgtggtgagtcaggagccggtgctgttttccaccacaattgctgaaaatatttgttatggccgtggaaatgtaaccatggatgagataaagaaagctgtcaaagaggccaacgcctatgagtttatcatgaaattaccacagaaatttgacaccctggttggagagagaggggcccagctgagtggtgggcagaagcagaggatcgccattgcacgtgccctggttcgcaaccccaagatccttctgctggatgaggccacgtcagcattggacacagaaagtgaagctgaggtacaggcagctctggataaggccagagaaggccggaccaccattgtgatagcacaccgactgtctacggtccgaaatgcagatgtcatcgctgggtttgaggatggagtaattgtggagcaaggaagccacagcgaactgatgaagaaggaaggggtgtacttcaaacttgtcaacatgcagacatcaggaagccagatccagtcagaagaatttgaactaaatgatgaaaaggctgccactagaatggccccaaatggctggaaatctcgcctatttaggcattctactcagaaaaaccttaaaaattcacaaatgtgtcagaagagccttgatgtggaaaccgatggacttgaagcaaatgtgccaccagtgtcctttctgaaggtcctgaaactgaataaaacagaatggccctactttgtcgtgggaacagtatgtgccattgccaatggggggcttcagccggcattttcagtcatattctcagagatcatagcgatttttggaccaggcgatgatgcagtgaagcagcagaagtgcaacatattctctttgattttcttatttctgggaattatttctttttttactttcttccttcagggtttcacgtttgggaaagctggcgagatcctcaccagaagactgcggtcaatggcttttaaagcaatgctaagacaggacatgagctggtttgatgaccataaaaacagtactggtgcactttctacaagacttgccacagatgctgcccaagtccaaggagccacaggaaccaggttggctttaattgcacagaatatagctaaccttggaactggtattatcatatcatttatctacggttggcagttaaccctattgctattagcagttgttccaattattgctgtgtcaggaattgttgaaatgaaattgttggctggaaatgccaaaagagataaaaaagaactggaagctgctggaaagattgcaacagaggcaatagaaaatattaggacagttgtgtctttgacccaggaaagaaaatttgaatcaatgtatgttgaaaaattgtatggaccttacagggtgttttctgcaattgtatttggtgcagtggctctaggacatgccagttcatttgctccagactatgctaaagctaagctgtctgcagcccacttattcatgctgtttgaaagacaacctctgattgacagctacagtgaagaggggctgaagcctgataaatttgaaggaaatataacatttaatgaagtcgtgttcaactatcccacccgagcaaacgtgccagtgcttcaggggctgagcctggaggtgaagaaaggccagacactagccctggtgggcagcagtggctgtgggaagagcacggtggtccagctcctggagcggttctacgaccccttggcggggacagtgcttctcgatggtcaagaagcaaagaaactcaatgtccagtggctcagagctcaactcggaatcgtgtctcaggagcctatcctatttgactgcagcattgccgagaatattgcctatggagacaacagccgggttgtatcacaggatgaaattgtgagtgcagccaaagctgccaacatacatcctttcatcgagacgttaccccacaaatatgaaacaagagtgggagataaggggactcagctctcaggaggtcaaaaacagaggattgctattgcccgagccctcatcagacaacctcaaatcctcctgttggatgaagctacatcagctctggatactgaaagtgaaaaggttgtccaagaagccctggacaaagccagagaaggccgcacctgcattgtgattgctcaccgcctgtccaccatccagaatgcagacttaatagtggtgtttcagaatgggagagtcaaggagcatggcacgcatcagcagctgctggcacagaaaggcatctatttttcaatggtcagtgtccaggctgggacacagaacttatga

SEQ ID NO: 110097 - DNA, 2007 bp, Homo sapiens
  Payload ID: 1613
  Gene Symbol: ABCB4
  Gene Name: ATP-binding cassette, sub-family B (MDR/TAP), member 4
  ENST ID: ENST00000417608
  CDS Start-End: 1825-2007
tagaaaatcaggtggagatgatagtggcttgcatgatggtggtagagctggaggtgcagggcaaaggtcagattctgaatatattttgaaagtaaaggcaacaagatttcctgacagattgattatggtgtgtcaaagaaagagaggaatgcaggatgattccagtgtttttgttgacaactataagtctggagctgccaactggatgcagaagttcactggagggcccagcctggggaaaggatcaggagcaggttaggcatgttaagcttgagatgtctgttaaacatccagataggaatgtcaaagatgcacttgtgtttaagagtcaggaatgcaagagggaattttaggctagaaacaaaaagttagaaattattcgatacagatggtatttaaagctgtgtgactgactgacatgacagaagtggcgagaatagactgagaagtccaaggaatgagccttggaccactccagtgttaggtaagtagttgaaaaaaagagagagagagaaggcatcaaaggagactgaggaagagtgatcaggaaagcataggaaaatccgagaaacatatggtgtcctggaatctatatgaaaaagatatattcagaaagacagagtgataaatctgtcaaattattgaatttgtcaggtaaaataagaacagagaattgatctttggacttagcaaagcagagattatcagtgacttttataaaaatagtttcggtagtgtggaaagatcaaacttctgtttagagtgggtttcagagagaacaacaggaattgaagaaagtaataaactttgccaaccagtttagctccaaaggaaaagagggaaatatgatggtagctggcaggggaagtgtggtcaagagaggttttttgtttgtttttcaagatggaagaaataacagtatgtatgtaagctcacaggagggatccagcaggcatggggaaattgatgatataggacagaaagggaagaatggctccttgtgaaagtgaaaggggatgggatctacaggatgaacatgcaaacaaagactggctgcaaagagaggcatgaatagttcatttacagaaacagcaaaggcagagtgttggtacagatgctggtaagtggaaaaatatcatggtaggaggttatggagttccattctaaacacttcaacttcatcagtgaaataagcacggtaatttagcagaatgtgaagatgtaaaagaacagaatttgagaaaacagacgatatgaaataattattagaaaagcagagactgaagaaactgtcatctccttatgtgctaatgagtttaataatgtcctccagtcaccacaagccttctttcaaactacacaattccaactgcttccgtctcagagtatcttgaaataatgatctgaccgcctgttagaccagtgaagggaaggaatttgggttgatttaagaagagaatcctcatggtcatggtagactgatatggagagaaaacattttgaggaaaaatactcaactaaattcatttctactccagcatgcagtttcaagtcaagttccaccttagctccaggtggcaggcagagcaggatgcagaggcacagcacaagtaagggatccaatgactgagtcaagaattacataacctggccagacagctggtacatgggaaagtgctaagagggcaccaacagcgttcctcctccccaaggagcataatgtgatggttcctgccggccctggctgactctcgccgtccttggagataattgggttcagtgccacctggaccagaactggggatgcggaagcaagaggctgagatggatcttgaggcggcaaagaacggaacagcctggcgccccacgagcgcggagggcgactttgaactgggcatcagcagcaaacaaaaaaggaaaaaaacgaagacagtgaaaatgattggagtattaacattgtttcgatactccgattggcaggataaattgtttatgtcgctgggtacc

SEQ ID NO: 110098 - DNA, 523 bp, Homo sapiens
  Payload ID: 1613
  Gene Symbol: ABCB4
  Gene Name: ATP-binding cassette, sub-family B (MDR/TAP), member 4
  ENST ID: ENST00000440025
  CDS Start-End: 1-298
catcagacaacctcaaatcctcctgttggatgaagctacatcagctctggatactgaaagtgaaaaggttgtccaagaagccctggacaaagccagagaaggccgcacctgcattgtgattgctcaccgcctgtccaccatccagaatgcagacttaatagtggtgtttcagaatgggagagtcaaggagcatggcacgcatcagcagctgctggcacagaaaggcatctatttttcaatgatcaatttagaagacccaatttggggtttattacggcatttgaaatttgagagttagaagtgacacctgtcttgatgaagtattgaaacaacaggctagctctccctaagttattagaaacatccagaaaaagaacaaaattcaaggtaagtacaggtgtagaaatatagaagccacagacatagggaaatggtcttatggtcctgaatgggttgggtagacaggaaagtttgggaataattttcccaagtacaaaagaaaaataaattgttcaatagcctc

SEQ ID NO: 110099 - DNA, 2906 bp, Homo sapiens
  Payload ID: 1614
  Gene Symbol: ABCB5
  Gene Name: ATP-binding cassette, sub-family B (MDR/TAP), member 5
  Uniprot ID: Q2M3G0
  ENST ID: ENST00000258738
  CDS Start-End: 468-2906
cctaattcctctaatatctctctgtgagcctaaaccaataattatatattacattctattgtctttcttatataactgcagaaagataaatatcactttgtttgttcctgtaggttttctttagtgtaatccatagcagttattgcattggagcagcagtccctcactttgaaaccttcgcaatagcccgaggagctgcctttcatattttccaggttattgataagaaacccagtatagataacttttccacagctggatataaacctgaatccatagaaggaactgtggaatttaaaaatgtttctttcaattatccatcaagaccatctatcaagattctgaaaggtctgaatctcagaattaagtctggagagacagtcgccttggtcggtctcaatggcagtgggaagagtacggtagtccagcttctgcagaggttatatgatccggatgatggctttatcatggtggatgagaatgacatcagagctttaaatgtgcggcattatcgagaccatattggagtggttagtcaagagcctgttttgttcgggaccaccatcagtaacaatatcaagtatggacgagatgatgtgactgatgaagagatggagagagcagcaagggaagcaaatgcgtatgattttatcatggagtttcctaataaatttaatacattggtaggggaaaaaggagctcaaatgagtggagggcagaaacagaggatcgcaattgctcgtgccttagttcgaaaccccaagattctgattttagatgaggctacgtctgccctggattcagaaagcaagtcagctgttcaagctgcactggagaaggcgagcaaaggtcggactacaatcgtggtagcacaccgactttctactattcgaagtgcagatttgattgtgaccctaaaggatggaatgctggcggagaaaggagcacatgctgaactaatggcaaaacgaggtctatattattcacttgtgatgtcacaggatattaaaaaagctgatgaacagatggagtcaatgacatattctactgaaagaaagaccaactcacttcctctgcactctgtgaagagcatcaagtcagacttcattgacaaggctgaggaatccacccaatctaaagagataagtcttcctgaagtctctctattaaaaattttaaagttaaacaagcctgaatggccttttgtggttctggggacattggcttctgttctaaatggaactgttcatccagtattttccatcatctttgcaaaaattataaccatgtttggaaataatgataaaaccacattaaagcatgatgcagaaatttattccatgatattcgtcattttgggtgttatttgctttgtcagttatttcatgcagggattattttacggcagagcaggggaaattttaacgatgagattaagacacttggccttcaaagccatgttatatcaggatattgcctggtttgatgaaaaggaaaacagcacaggaggcttgacaacaatattagccatagatatagcacaaattcaaggagcaacaggttccaggattggcgtcttaacacaaaatgcaactaacatgggactttcagttatcatttcctttatatatggatgggagatgacattcctgattctgagtattgctccagtacttgccgtgacaggaatgattgaaaccgcagcaatgactggatttgccaacaaagataagcaagaacttaagcatgctggaaagatagcaactgaagctttggagaatatacgtactatagtgtcattaacaagggaaaaagccttcgagcaaatgtatgaagagatgcttcagactcaacacagaaatacctcgaagaaagcacagattattggaagctgttatgcattcagccatgcctttatatattttgcctatgcggcagggtttcgatttggagcctatttaattcaagctggacgaatgaccccagagggcatgttcatagtttttactgcaattgcatatggagctatggccatcggagaaacgctcgttttggctcctgaatattccaaagccaaatcgggggctgcgcatctgtttgccttgttggaaaagaaaccaaatatagacagccgcagtcaagaagggaaaaagccagacacatgtgaagggaatttagagtttcgagaagtctctttcttctatccatgtcgcccagatgttttcatcctccgtggcttatccctcagtattgagcgaggaaagacagtagcatttgtggggagcagcggctgtgggaaaagcacttctgttcaacttctgcagagactttatgaccccgtgcaaggacaagtgctgtttgatggtgtggatgcaaaagaattgaatgtacagtggctccgttcccaaatagcaatcgttcctcaagagcctgtgctcttcaactgcagcattgctgagaacatcgcctatggtgacaacagccgtgtggtgccattagatgagatcaaagaagccgcaaatgcagcaaatatccattcttttattgaaggtctccctgagaaatacaacacacaagttggactgaaaggagcacagctttctggcggccagaaacaaagactagctattgcaagggctcttctccaaaaacccaaaattttattgttggatgaggccacttcagccctcgataatgacagtgagaaggtggttcagcatgcccttgataaagccaggacgggaaggacatgcctagtggtcactcacaggctctctgcaattcagaacgcagatttgatagtggttctgcacaatggaaagataaaggaacaaggaactcatcaagagctcctgagaaatcgagacatatattttaagttagtgaatgcacagtcagtgcagtga

SEQ ID NO: 110100 - DNA, 1483 bp, Homo sapiens
  Payload ID: 1614
  Gene Symbol: ABCB5
  Gene Name: ATP-binding cassette, sub-family B (MDR/TAP), member 5
  Uniprot ID: Q2M3G0
  ENST ID: ENST00000406935
  CDS Start-End: 547-927
attgcttctcggccttttggctaagatcaagtgtaatctgtgttcttttttatttggtcatatcttccattctttcttacctaattcctctaatatctctctgtgagcctaaaccaataattatatattacattctattgtctttcttatataactgcagaaagataaatatcactttgtttgttcctgtaggttttctttagtgtaatccatagcagttattgcattggagcagcagtccctcactttgaaaccttcgcaatagcccgaggagctgcctttcatattttccaggttattgataagaaacccagtatagataacttttccacagctggatataaacctgaatccatagaaggaactgtggaatttaaaaatgtttctttcaattatccatcaagaccatctatcaagattctgaaaggtctgaatctcagaattaagtctggagagacagtcgccttggtcggtctcaatggcagtgggaagagtacggtagtccagcttctgcagaggttatatgatccggatgatggctttatcatggtggatgagaatgacatcagagctttaaatgtgcggcattatcgagaccatattggagtggttagtcaagagcctgttttgttcgggaccaccatcagtaacaatatcaagtatggacgagatgatgtgactgatgaagagatggagagagcagcaagggaagcaaatgcgtatgattttatcatggagtttcctaataaatttaatacattggtaggggaaaaaggagctcaaatgagtggagggcagaaacagaggatcgcaattgctcgtgccttagttcgaaaccccaagattctgattttagatgaggctacgtctgccctggattcagaaagcaagtcagctgttcaagctgcactggagaagaaaaaataatacaacaaagacgtattgataatctaccacactatctacgttgaggtatctggaaccacagtggtatgaattgcactatctccctaatctttacactaattctggctaaaagacagcatcagctcaaattttcctgatcagttttttagcaggctttggctgccaaaatctcttctgtgttttaagtctgaagcaattacagttgaatattttgttgttgttcactatgaggagtatatcggttttaggtcacatgaatgatctagtagagatgtatttttctagtacacttgatagtaccttgaatatgtacagtacatgtaggcccattttatggacctctgaggcacagttttttcccttttaagttattagatatttctgtgatttatttgatgcactcagatacaaattcatgctataataagttaaattgtaacataatatctaccttaatcaaatatttatagtttaggccaggagcctggcaaagtaaagatgacacagatgaaatgcttgataagtaaataaatatgagaagagatatatattaaaa

SEQ ID NO: 110101 - DNA, 5811 bp, Homo sapiens
  Payload ID: 1614
  Gene Symbol: ABCB5
  Gene Name: ATP-binding cassette, sub-family B (MDR/TAP), member 5
  Uniprot ID: Q2M3G0
  ENST ID: ENST00000404938
  CDS Start-End: 653-4426
aaattataaaagttgtcctaaaaattggttcagtgccttttacaatcgtatgtaccttatctctctctccatttctgcatgaacagtccatcctatccaaaccgttctcatttctctaccatgagataattcaccttgcattcctaaaactatgcccttgttcctcctccacatttttctacttactgaaaccttagccttcctccagaaactaacctcagggccatcctcatctgtgggcgaaaccattttagatcacaatgttcttcctcagtcttcttagatactagaatagtcactctttgtactattcatcacataacgtctgtcttgccaggtatattaggttcccctagagaaatagaatcaataggccgtgtgtgtgtgtgtgtgtgtgtgtgtgtgtgtgtgtgtatgtagagagagaaagagaaaacacgctcatgtaattgtggtgactggcacttccaaaatccacaagccagactagaaggctggaaattctggcaaaaaattgataccttgtatctgaaagctttatcctatcctcttcagaagacttcagtcttttctcttaaggacttcaactgactggatggggcccactcaaaacagcatctaaggaattaaaaagaagtaaattgtaaataagatggaaaattcagaaagagctgaagaaatgcaagaaaattatcagagaaatggaactgcagaagaacagccaaaactgagaaaggaagcagttggatctattgagatattccgctttgctgatggactggacatcacactcatgatcctgggtatactggcatcactggtcaatggagcctgccttcctttaatgccactggttttaggagaaatgagtgataaccttattagtggatgtctagtccaaactaacacaacaaattatcagaactgtactcagtctcaagagaagctgaatgaagatatgactctgttgaccctgtattatgttggaataggtgttgctgccttgatttttggttacatacagatttccttgtggattataactgcagcacgacagaccaagaggattcgaaaacagttttttcattcagttttggcacaggacatcggctggtttgatagctgtgacatcggtgaacttaacactcgcatgacagatgacattgacaaaatcagtgatggtattggagataagattgctctgttgtttcaaaacatgtctactttttcgattggcctggcagttggtttggtgaagggctggaaactcaccctagtgactctatccacgtctcctcttataatggcttcagcggcagcatgttctaggatggtcatctcattgaccagtaaggaattaagtgcctattccaaagctggggctgtggcagaagaagtcttgtcatcaatccgaacagtcatagcctttagggcccaggagaaagaacttcaaaggtatacacagaatctcaaagatgcaaaggattttggcataaaaaggactatagcttcaaaagtgtctcttggtgctgtgtacttctttatgaatggaacctatggacttgctttttggtatggaacctccttgattcttaatggagaacctggatataccatcgggactgttcttgctgttttctttagtgtaatccatagcagttattgcattggagcagcagtccctcactttgaaaccttcgcaatagcccgaggagctgcctttcatattttccaggttattgataagaaacccagtatagataacttttccacagctggatataaacctgaatccatagaaggaactgtggaatttaaaaatgtttctttcaattatccatcaagaccatctatcaagattctgaaaggtctgaatctcagaattaagtctggagagacagtcgccttggtcggtctcaatggcagtgggaagagtacggtagtccagcttctgcagaggttatatgatccggatgatggctttatcatggtggatgagaatgacatcagagctttaaatgtgcggcattatcgagaccatattggagtggttagtcaagagcctgttttgttcgggaccaccatcagtaacaatatcaagtatggacgagatgatgtgactgatgaagagatggagagagcagcaagggaagcaaatgcgtatgattttatcatggagtttcctaataaatttaatacattggtaggggaaaaaggagctcaaatgagtggagggcagaaacagaggatcgcaattgctcgtgccttagttcgaaaccccaagattctgattttagatgaggctacgtctgccctggattcagaaagcaagtcagctgttcaagctgcactggagaaggcgagcaaaggtcggactacaatcgtggtagcacaccgactttctactattcgaagtgcagatttgattgtgaccctaaaggatggaatgctggcggagaaaggagcacatgctgaactaatggcaaaacgaggtctatattattcacttgtgatgtcacaggatattaaaaaagctgatgaacagatggagtcaatgacatattctactgaaagaaagaccaactcacttcctctgcactctgtgaagagcatcaagtcagacttcattgacaaggctgaggaatccacccaatctaaagagataagtcttcctgaagtctctctattaaaaattttaaagttaaacaagcctgaatggccttttgtggttctggggacattggcttctgttctaaatggaactgttcatccagtattttccatcatctttgcaaaaattataaccatgtttggaaataatgataaaaccacattaaagcatgatgcagaaatttattccatgatattcgtcattttgggtgttatttgctttgtcagttatttcatgcagggattattttacggcagagcaggggaaattttaacgatgagattaagacacttggccttcaaagccatgttatatcaggatattgcctggtttgatgaaaaggaaaacagcacaggaggcttgacaacaatattagccatagatatagcacaaattcaaggagcaacaggttccaggattggcgtcttaacacaaaatgcaactaacatgggactttcagttatcatttcctttatatatggatgggagatgacattcctgattctgagtattgctccagtacttgccgtgacaggaatgattgaaaccgcagcaatgactggatttgccaacaaagataagcaagaacttaagcatgctggaaagatagcaactgaagctttggagaatatacgtactatagtgtcattaacaagggaaaaagccttcgagcaaatgtatgaagagatgcttcagactcaacacagaaatacctcgaagaaagcacagattattggaagctgttatgcattcagccatgcctttatatattttgcctatgcggcagggtttcgatttggagcctatttaattcaagctggacgaatgaccccagagggcatgttcatagtttttactgcaattgcatatggagctatggccatcggagaaacgctcgttttggctcctgaatattccaaagccaaatcgggggctgcgcatctgtttgccttgttggaaaagaaaccaaatatagacagccgcagtcaagaagggaaaaagccagacacatgtgaagggaatttagagtttcgagaagtctctttcttctatccatgtcgcccagatgttttcatcctccgtggcttatccctcagtattgagcgaggaaagacagtagcatttgtggggagcagcggctgtgggaaaagcacttctgttcaacttctgcagagactttatgaccccgtgcaaggacaagtgctgtttgatggtgtggatgcaaaagaattgaatgtacagtggctccgttcccaaatagcaatcgttcctcaagagcctgtgctcttcaactgcagcattgctgagaacatcgcctatggtgacaacagccgtgtggtgccattagatgagatcaaagaagccgcaaatgcagcaaatatccattcttttattgaaggtctccctgagaaatacaacacacaagttggactgaaaggagcacagctttctggcggccagaaacaaagactagctattgcaagggctcttctccaaaaacccaaaattttattgttggatgaggccacttcagccctcgataatgacagtgagaaggtggttcagcatgcccttgataaagccaggacgggaaggacatgcctagtggtcactcacaggctctctgcaattcagaacgcagatttgatagtggttctgcacaatggaaagataaaggaacaaggaactcatcaagagctcctgagaaatcgagacatatattttaagttagtgaatgcacagtcagtgcagtgatgctgttgaggtagcacatattttgatgttcgtgtaatgcaaagaaggagtacttaataattacttggcaagctttgatctcttttattgcatatatcaatacctagaatcatgctactcaagtacatacatgttctattcacacaccatctgaccttcagatttttaaaaggaagcaaaaatttgcttatttcatgtaagtgaaataatgcttatatccttcactttataaaactattctagcacatttgcttgtaaagcagttttctacaaggtgaatttatttcccatcaacttctgctataaaatcggaaatatgtttccagggggaatattatccaattaaccatgttgaaggttttagcaaaggcagtgtaagatagagtggggcctgtagcattgcagggagagtgtctttcacttggaattttgttttgcagcacatattacagtagttttgctagtcccttttctccagaccgtagggatttctctcaataagtattcactatttctctaaattttattctatttttttgttgagcagggaatagaaaggattacgatgtaaaatttctgggaggattaggtagctatctcctacttcaccagtaagtgaagtgcctcacatgagccatcccaaagattcattattccaaaccttgggtttggcagtataagtcacaggcctacctgtttatgaaaacttacttacttaaaataagagctacttttgggccgggtgcggtggctcacgcctgtaatcccagaactttgggaggccgaggagggcggatcacttgaggtcaggagttcgagaccagcctggccaacatggtgaaaccccgtctctactaaaaacacaaaaattagccaatcttggtggcgggcacctggaatcccagctacttgggaggctgaggcaggagaatcatttgaacctaggaggcagaggttgcagtgagccgagatctcaccactgcactccagcctgcgcaacagagcgagactccatctcaaaaaataataaataagagctaattttattgtgggtgaaaatttttaaacgtctttctctataataaaataatttccttaaattttatatatactttatcatatataatgtgtgaatgattttaaagttctgtgtaaataacaatattggtaaaatgagttacattttcaacttacttaaatatgtaatgtcacctggtgattttatctttattcttcagtgtattttcttccatttacacatttagctagcctccctaaagtgtactctaccaataattgaaatcttgttaaacaaaattaaaaccatttatatattatgctgctttctttaaaatgcaaaataaaaataagattggggacttgag

SEQ ID NO: 110102 - DNA, 2204 bp, Homo sapiens
  Payload ID: 1614
  Gene Symbol: ABCB5
  Gene Name: ATP-binding cassette, sub-family B (MDR/TAP), member 5
  ENST ID: ENST00000441315
  CDS Start-End: 1-945
ggatgggagatgacattcctgattctgagtattgctccagtacttgccgtgacaggaatgattgaaaccgcagcaatgactggatttgccaacaaagataagcaagaacttaagcatgctggaaagatagcaactgaagctttggagaatatacgtactatagtgtcattaacaagggaaaaagccttcgagcaaatgtatgaagagatgcttcagactcaacacagaaatacctcgaagaaagcacagattattggaagctgttatgcattcagccatgcctttatatattttgcctatgcggcagggtttcgatttggagcctatttaattcaagctggacgaatgaccccagagggcatgttcatagtttttactgcaattgcatatggagctatggccatcggagaaacgctcgttttggctcctgaatattccaaagccaaatcgggggctgcgcatctgtttgccttgttggaaaagaaaccaaatatagacagccgcagtcaagaagggaaaaagccagacacatgtgaagggaatttagagtttcgagaagtctctttcttctatccatgtcgcccagatgttttcatcctccgtggcttatccctcagtattgagcgaggaaagacagtagcatttgtggggagcagcggctgtgggaaaagcacttctgttcaacttctgcagagactttatgaccccgtgcaaggacaagtgctgtttgatggtgtggatgcaaaagaattgaatgtacagtggctccgttcccaaatagcaatcgttcctcaagagcctgtgctcttcaactgcagcattgctgagaacatcgcctatggtgacaacagccgtgtggtgccattagatgagatcaaagaagccgcaaatgcagcaaatatccattcttttattgaaggtctccctgagagcctagagtgttgattgtagcaccaaggtcttctgtccacaatttattcagcaagatagctgatgcagtcatggctcacagagtgcactggatcaatgtgaggaccaaaccaaaattttggcagcagctgcatggtctcattaaattaaccaggcacacccagaaaatattctgtatccacatccctaaaacaagattgaactcagctcaagcaacttcgggtccggactctcctcaggaatcaaaccaaaaagcactatttcactaaaagaagtgaagatagttggccagactaaatccaggtatttggacataaatctcaggtggctcatctgccttttcccaggaaaatgcggccccagctttcatcagtgtgtgctttgtcttgatagaaatgcataatcatcaaagctaagtattttttttacctcaaatataagatcctttagcactgattttaaaagtattcgtaaaccacttataaactacgaatgaaaaaataaaggacgacacagatttgtaggggcaagaaaggtgagtagggaaggactagatcatctgcatcgagatttgaaagacacttgtggcttacttgcaaagcttcttttagcattgagcgtacgagggaaattctgttcttgatgacagcgcagtgggaattcccactccaacaacccatgaaatgttactgcataattattcaccttctgaggcccattacgacttatcagcagagaaagaaatttaatttaaactcacccctctgtgctaaagaatgactgggacatgagatcaaagcgcgaagctctgtcctccagtggtttgcaacacctaggcacaatagggtgagagaacgcggcattccagcgcttcccagctttccggaccccggagagagggggtgggggtgtgggctcacatcgccggctggcttgagggaggagagtggtggcggctccggaggtggacgtgtcaattatatcctggagctccgggaagccagattgcttctaccggcggctgcaggggcttgcaagcgaagataggcggccctccttccttccccactgtgggggattggggtcagtggagcccgtggatttagccacgaggggacatgactggagccctgtcacgcgcaggtgtgcgtctccgagagctctttcaatataagtgcgggagaagatttatgctgcagcctcatcacaggatgccttaaatgcatgtacatagtgcgtatctaaccacccataaaagccaagtttaatccttg

SEQ ID NO: 110103 - DNA, 2247 bp, Homo sapiens
  Payload ID: 1614
  Gene Symbol: ABCB5
  Gene Name: ATP-binding cassette, sub-family B (MDR/TAP), member 5
  Uniprot ID: Q2M3G0
  ENST ID: ENST00000443026
  CDS Start-End: 547-942
attgcttctcggccttttggctaagatcaagtgtaatctgtgttcttttttatttggtcatatcttccattctttcttacctaattcctctaatatctctctgtgagcctaaaccaataattatatattacattctattgtctttcttatataactgcagaaagataaatatcactttgtttgttcctgtaggttttctttagtgtaatccatagcagttattgcattggagcagcagtccctcactttgaaaccttcgcaatagcccgaggagctgcctttcatattttccaggttattgataagaaacccagtatagataacttttccacagctggatataaacctgaatccatagaaggaactgtggaatttaaaaatgtttctttcaattatccatcaagaccatctatcaagattctgaaaggtctgaatctcagaattaagtctggagagacagtcgccttggtcggtctcaatggcagtgggaagagtacggtagtccagcttctgcagaggttatatgatccggatgatggctttatcatggtggatgagaatgacatcagagctttaaatgtgcggcattatcgagaccatattggagtggttagtcaagagcctgttttgttcgggaccaccatcagtaacaatatcaagtatggacgagatgatgtgactgatgaagagatggagagagcagcaagggaagcaaatgcgtatgattttatcatggagtttcctaataaatttaatacattggtaggggaaaaaggagctcaaatgagtggagggcagaaacagaggatcgcaattgctcgtgccttagttcgaaaccccaagattctgattttagatgaggctacgtctgccctggattcagaaagcaagtcagctgttcaagctgcactggagaaggatacccccaggtattcattttgacctaatttcacctcaagtggagaatcgctgaccttgaaccagcgcccttcgacagctctggcccctcaaacctcaccctgacctcctgctgcctatgagctactgcacatacctcaaggccatatgcagttgtggccctgcaccaaattacactgaatctaggaggggagttggcagtggcggtatgaaaaaccattgaacagttttctcgatggcctgactcccttataaaccagagccttcagaccccttacaaggcttaatggcacattttactttgcatttgcttggaagtgagttaagcgtttttttttctctaagaaaatcgcaggcttctttttttaaaatgctgactttatggaaccagaaacggatactggcaggctaaatgtccactgcttcttgaaaaatctcttagttactattatttagtagcaaatcagattgtgcaagtttgaacgcttgtttccctcccataataacaatgccacatgttgcttgtgtgataaataatctttgtttactgtggacacttcggcaatttggttcatcttggtacagaaaatacaaagacaggactaatattttattcattttttatacttagtaactaggacagggatctgtatttagactatattcaagcctcgctctgtcacccatgcttgagtgcaacctctgcccactgtgttcaagcgattctcctgcctcagcctcctgagtagctgggagtacaggcgtgcatcaccacacccagctaatttttgtatttttagtagagacaaggttttgccatgttgaccaggctggtctcaaactcctgacctcaggtgatccgcccacctcggcctcccaaagtgctgggattacaggtgtgcgtctccgcgcccggccagttacataagattttaaaaaatgtattgtaataggctctctgattgtttagaaggtttcatgttgtgcccgcagtattttcatccactggtaatcactttaggtaatcaaaactagttcagacttttaaaataaatagttgcttggtgacatgataaactaataaatgttattcttattggttaatatgaaacatctatcaaaagtgaaaaaagaagaatgcagaatgtttgtaaactgattccaaaattacacaaaatagcaactgtgaaaaaaatgaaggcaatatatgaaaataataacagctatgtggcataattatgggggaatttaacttatttcaaaaattcatttactgtccctgtttttcagttgtttaaaggagaaagagattaaatcaatgtagaaata

SEQ ID NO: 110104 - DNA, 3016 bp, Homo sapiens
  Payload ID: 1615
  Gene Symbol: ABCB6
  Gene Name: ATP-binding cassette, sub-family B (MDR/TAP), member 6 (Langereis blood group)
  Uniprot ID: Q9NP58
  ENST ID: ENST00000265316
  CDS Start-End: 318-2846
ccgtggagcgcggtgcgagtccaacaccgagcattcccgtgggcctgcagttggcaggagggtcccgggcccagagccagcggggccgtgctgagacggcgtacgtgccctgcgtgagtgcgtggcggcggcgcgtgcgctaggggagtgggcggtgaggcctggtccacgtgcgtcccttcccgggacccccgcagcttggcgcccagcggctacgtgagccaaggcacccggatgtccgcgcccctctccgagtgaccagtcccggcctccggtcccgcagtgcccgcagcctcggccggcgtccacgcattgccatggtgactgtgggcaactactgcgaggccgaagggcccgtgggtccggcctggatgcaggatggcctgagtccctgcttcttcttcacgctcgtgccctcgacgcggatggctctggggactctggccttggtgctggctcttccctgcagacgccgggagcggcccgctggtgctgattcgctgtcttggggggccggccctcgcatctctccctacgtgctgcagctgcttctggccacacttcaggcggcgctgcccctggccggcctggctggccgggtgggcactgcccggggggccccactgccaagctatctacttctggcctccgtgctggagagtctggccggcgcctgtggcctgtggctgcttgtcgtggagcggagccaggcacggcagcgtctggcaatgggcatctggatcaagttcaggcacagccctggtctcctgctcctctggactgtggcgtttgcagctgagaacttggccctggtgtcttggaacagcccacagtggtggtgggcaagggcagacttgggccagcaggttcagtttagcctgtgggtgctgcggtatgtggtctctggagggctgtttgtcctgggtctctgggcccctggacttcgtccccagtcctatacattgcaggttcatgaagaggaccaagatgtggaaaggagccaggttcggtcagcagcccaacagtctacctggcgagattttggcaggaagctccgcctcctgagtggctacctgtggcctcgagggagtccagctctgcagctggtggtgctcatctgcctggggctcatgggtttggaacgggcactcaatgtgttggtgcctatattctataggaacattgtgaacttgctgactgagaaggcaccttggaactctctggcctggactgttaccagttacgtcttcctcaagttcctccaggggggtggcactggcagtacaggcttcgtgagcaacctgcgcaccttcctgtggatccgggtgcagcagttcacgtctcggcgggtggagctgctcatcttctcccacctgcacgagctctcactgcgctggcacctggggcgccgcacaggggaggtgctgcggatcgcggatcggggcacatccagtgtcacagggctgctcagctacctggtgttcaatgtcatccccacgctggccgacatcatcattggcatcatctacttcagcatgttcttcaacgcctggtttggcctcattgtgttcctgtgcatgagtctttacctcaccctgaccattgtggtcactgagtggagaaccaagtttcgtcgtgctatgaacacacaggagaacgctacccgggcacgagcagtggactctctgctaaacttcgagacggtgaagtattacaacgccgagagttacgaagtggaacgctatcgagaggccatcatcaaatatcagggtttggagtggaagtcgagcgcttcactggttttactaaatcagacccagaacctggtgattgggctcgggctcctcgccggctccctgctttgcgcatactttgtcactgagcagaagctacaggttggggactatgtgctctttggcacctacattatccagctgtacatgcccctcaattggtttggcacctactacaggatgatccagaccaacttcattgacatggagaacatgtttgacttgctgaaagaggagacagaagtgaaggaccttcctggagcagggccccttcgctttcagaagggccgtattgagtttgagaacgtgcacttcagctatgccgatgggcgggagactctgcaggacgtgtctttcactgtgatgcctggacagacacttgccctggtgggcccatctggggcagggaagagcacaattttgcgcctgctgtttcgcttctacgacatcagctctggctgcatccgaatagatgggcaggacatttcacaggtgacccaggcctctctccggtctcacattggagttgtgccccaagacactgtcctctttaatgacaccatcgccgacaatatccgttacggccgtgtcacagctgggaatgatgaggtggaggctgctgctcaggctgcaggcatccatgatgccattatggctttccctgaagggtacaggacacaggtgggcgagcggggactgaagctgagcggcggggagaagcagcgcgtcgccattgcccgcaccatcctcaaggctccgggcatcattctgctggatgaggcaacgtcagcgctggatacatctaatgagagggccatccaggcttctctggccaaagtctgtgccaaccgcaccaccatcgtagtggcacacaggctctcaactgtggtcaatgctgaccagatcctcgtcatcaaggatggctgcatcgtggagaggggacgacacgaggctctgttgtcccgaggtggggtgtatgctgacatgtggcagctgcagcagggacaggaagaaacctctgaagacactaagcctcagaccatggaacggtgacaaaagtttggccacttccctctcaaagactaacccagaagggaataagatgtgtctcctttccctggcttatttcatcctggtcttggggtatggtgctagctatggtaagggaaagggacctttccgaaaaacatcttttggggaaataaaaatgtggactgtgcgag

SEQ ID NO: 110105 - DNA, 2238 bp, Homo sapiens
  Payload ID: 1615
  Gene Symbol: ABCB6
  Gene Name: ATP-binding cassette, sub-family B (MDR/TAP), member 6 (Langereis blood group)
  ENST ID: ENST00000295750
  CDS Start-End: 1-2072
tacttctggcctccgtgctggagagtctggccggcgcctgtggcctgtggctgcttgtcgtggagcggagccaggcacggcagcgtctggcaatgggcatctggatcaagttcaggcacagccctggtctcctgctcctctggactgtggcgtttgcagctgagaacttggccctggtgtcttggaacagcccacagtggtggtgggcaagggcagacttgggccagcaggttcggtcagcagcccaacagtctacctggcgagattttggcaggaagctccgcctcctgagtggctacctgtggcctcgagggagtccagctctgcagctggtggtgctcatctgcctggggctcatgggtttggaacgggcactcaatgtgttggtgcctatattctataggaacattgtgaacttgctgactgagaaggcaccttggaactctctggcctggactgttaccagttacgtcttcctcaagttcctccaggggggtggcactggcagtacaggcttcgtgagcaacctgcgcaccttcctgtggatccgggtgcagcagttcacgtctcggcgggtggagctgctcatcttctcccacctgcacgagctctcactgcgctggcacctggggcgccgcacaggggaggtgctgcggatcgcggatcggggcacatccagtgtcacagggctgctcagctacctggtgttcaatgtcatccccacgctggccgacatcatcattggcatcatctacttcagcatgttcttcaacgcctggtttggcctcattgtgttcctgtgcatgagtctttacctcaccctgaccattgtggtcactgagtggagaaccaagtttcgtcgtgctatgaacacacaggagaacgctacccgggcacgagcagtggactctctgctaaacttcgagacggtgaagtattacaacgccgagagttacgaagtggaacgctatcgagaggccatcatcaaatatcagggtttggagtggaagtcgagcgcttcactggttttactaaatcagacccagaacctggtgattgggctcgggctcctcgccggctccctgctttgcgcatactttgtcactgagcagaagctacaggttggggactatgtgctctttggcacctacattatccagctgtacatgcccctcaattggtttggcacctactacaggatgatccagaccaacttcattgacatggagaacatgtttgacttgctgaaagaggagacagaagtgaaggaccttcctggagcagggccccttcgctttcagaagggccgtattgagtttgagaacgtgcacttcagctatgccgatgggcgggagactctgcaggacgtgtctttcactgtgatgcctggacagacacttgccctggtgggcccatctggggcagggaagagcacaattttgcgcctgctgtttcgcttctacgacatcagctctggctgcatccgaatagatgggcaggacatttcacaggtgacccaggcctctctccggtctcacattggagttgtgccccaagacactgtcctctttaatgacaccatcgccgacaatatccgttacggccgtgtcacagctgggaatgatgaggtggaggctgctgctcaggctgcaggcatccatgatgccattatggctttccctgaagggtacaggacacaggtgggcgagcggggactgaagctgagcggcggggagaagcagcgcgtcgccattgcccgcaccatcctcaaggctccgggcatcattctgctggatgaggcaacgtcagcgctggatacatctaatgagagggccatccaggcttctctggccaaagtctgtgccaaccgcaccaccatcgtagtggcacacaggctctcaactgtggtcaatgctgaccagatcctcgtcatcaaggatggctgcatcgtggagaggggacgacacgaggctctgttgtcccgaggtggggtgtatgctgacatgtggcagctgcagcagggacaggaagaaacctctgaagacactaagcctcagaccatggaacggtgacaaaagtttggccacttccctctcaaagactaacccagaagggaataagatgtgtctcctttccctggcttatttcatcctggtcttggggtatggtgctagctatggtaagggaaagggacctttccgaaaaacatcttttggggaaataaaaatgtggactgtg

SEQ ID NO: 110106 - DNA, 793 bp, Homo sapiens
  Payload ID: 1615
  Gene Symbol: ABCB6
  Gene Name: ATP-binding cassette, sub-family B (MDR/TAP), member 6 (Langereis blood group)
  ENST ID: ENST00000417678
  CDS Start-End: 1-443
aggcggcgctgcccctggccggcctggctggccgggtgggcactgcccggggggccccactgccaagctatctacttctggcctccgtgctggagagtctggccggcgcctgtggcctgtggctgcttgtcgtggagcggagccaggcacggcagcgtctggcaatgggcatctggatcaagttcaggcacagccctggtctcctgctcctctggactgtggcgtttgcagctgagaacttggccctggtgtcttggaacagcccacagtggtggtgggcaagggcagacttgggccagcaggttcagtttagcctgtgggtgctgcggtatgtggtctctggagggctgtttgtcctgggtctctgggcccctggacttcgtccccagtcctatacattgcaggttcatgaagaggaccaagatgtggaaaggagccagtgaacttgctgactgagaaggcaccttggaactctctggcctggactgttaccagttacgtcttcctcaagttcctccaggggggtggcactggcagtacagctacctggtgttcaatgtcatccccacgctggccgacatcatcattggcatcatctacttcagcatgttcttcaacgcctggtttggcctcattgtgttcctgtgcatgagtctttacctcaccctgaccattgtggtcactgagtggagaaccaagtttcgtcgtgctatgaacacacaggagaacgctacccgggcacgagcagtggactctctgctaaacttcgagacggtgaagtattacaacgccg

SEQ ID NO: 110107 - DNA, 544 bp, Homo sapiens
  Payload ID: 1615
  Gene Symbol: ABCB6
  Gene Name: ATP-binding cassette, sub-family B (MDR/TAP), member 6 (Langereis blood group)
  ENST ID: ENST00000452545
  CDS Start-End: 1-207
aacttggccctggtgtcttggaacagcccacagtggtggtgggcaagggcagacttgggccagcaggttcagtttagcctgtgggtgctgcggtatgtggtctctggagggctgtttgtcctgggtctctgggcccctggacttcgtccccagtcctatacattgcaggttcatgaagaggaccaagatgtggaaaggagccagtgaacttgctgactgagaaggcaccttggaactctctggcctggactgttaccagttacgtcttcctcaagttcctccaggggggtggcactggcagtacaggcttcgtgagcaacctgcgcaccttcctgtggatccgggtgcagcagttcacgtctcggcgggtggagctgctcatcttctcccacctgcacgagctctcactgcgctggcacctggggcgccgcacaggggaggtgctgcggatcgcggatcggggcacatccagtgtcacagggctgctcagctacctggtgttcaatgtcatccccacgctggccgacatcatcattggcatcat

SEQ ID NO: 110108 - DNA, 882 bp, Homo sapiens
  Payload ID: 1615
  Gene Symbol: ABCB6
  Gene Name: ATP-binding cassette, sub-family B (MDR/TAP), member 6 (Langereis blood group)
  ENST ID: ENST00000448398
  CDS Start-End: 1-358
cggccctcgcatctctccctacgtgctgcagctgcttctggccacacttcaggcggcgctgcccctggccggcctggctggccgggtgggcactgcccggggggccccactgccaagctatctacttctggcctccgtgctggagagtctggccggcgcctgtggcctgtggctgcttgtcgtggagcggagccaggcacggcagcgtctggcaatgggcatctggatcaagttcaggcacagccctggtctcctgctcctctggactgtggcgtttgcagctgagaacttggccctggtgtcttggaacagcccacagtggtggtgggcaagggcagacttgggccagcagccctgaccattgtggtcactgagtggagaaccaagtttcgtcgtgctatgaacacacaggagaacgctacccgggcacgagcagtggactctctgctaaacttcgagacggtgaagtattacaacgccgagagttacgaagtggaacgctatcgagaggccatcatcaaatatcagggtttggagtggaagtcgagcgcttcactggttttactaaatcagacccagaacctggtgattgggctcgggctcctcgccggctccctgctttgcgcatactttgtcactgagcagaagctacaggttggggactatgtgctctttggcacctacattatccagctgtacatgcccctcaattggtttggcacctactacaggatgatccagaccaacttcattgacatggagaacatgtttgacttgctgaaagaggagacagaagtgaaggaccttcctggagcagggccccttcgctttcagaagggccgtattgagtttgagaacgtgcacttcagctatgccgatggg

SEQ ID NO: 110109 - DNA, 679 bp, Homo sapiens
  Payload ID: 1615
  Gene Symbol: ABCB6
  Gene Name: ATP-binding cassette, sub-family B (MDR/TAP), member 6 (Langereis blood group)
  ENST ID: ENST00000443805
  CDS Start-End: 1-122
tcgccgacaatatccgttacggccgtgtcacagctgggaatgatgaggtggaggctgctgctcaggctgcaggcatccatgatgccattatggctttccctgaagaaacgtgtggtgggtaatatccacagggtacaggacacaggtgggcgagcggggactgaagctgagcggcggggagaagcagcgcgtcgccattgcccgcaccatcctcaaggctccgggcatcattctgctggatgaggcaacgtcagcgctggatacatctaatgagagggccatccaggcttctctggccaaagtctgtgccaaccgcaccaccatcgtagtggcacacaggctctcaactgtggtcaatgctgaccagatcctcgtcatcaaggatggctgcatcgtggagaggggacgacacgaggctctgttgtcccgaggtggggtgtatgctgacatgtggcagctgcagcagggacaggaagaaacctctgaagacactaagcctcagaccatggaacggtgacaaaagtttggccacttccctctcaaagactaacccagaagggaataagatgtgtctcctttccctggcttatttcatcctggtcttggggtatggtgctagctatggtaagggaaagggacctttccgaaaaacatcttttggggaaataaaaatgtggac

SEQ ID NO: 110110 - DNA, 2377 bp, Homo sapiens
  Payload ID: 1616
  Gene Symbol: ABCB7
  Gene Name: ATP-binding cassette, sub-family B (MDR/TAP), member 7
  Uniprot ID: O75027
  ENST ID: ENST00000253577
  CDS Start-End: 26-2287
ctcggttcctctttcctcgctcaagatggcgctgctcgcgatgcattcttggcgctgggcggccgcggcggctgctttcgaaaagcgccggcactccgcgattctgatccggcctttagtctctgttagcggctcaggtccgcagtggaggccacatcaactcggcgccttgggaaccgctcgagcctaccagcagattccagagtcattaaaaagtatcacatggcagagattgggaaaaggcaattcaggacagttcttagatgctgcaaaggctctccaggtatggccactgatagaaaagaggacatgttggcatggtcatgcaggaggaggactccacacagacccaaaagaagggttaaaagatgttgatactcggaaaatcataaaagcaatgctttcttatgtgtggcccaaagacaggccagatctacgagctagagttgccatttcgctgggatttttgggtggtgcaaaggccatgaatattgtggttcccttcatgtttaaatatgctgtagacagcctcaaccagatgtcgggaaacatgctgaacctgagtgatgcaccaaatacagttgcaaccatggcaacagcagttctgattggctatggtgtatcaagagctggagctgctttttttaacgaagttcgaaatgcagtatttggcaaggtagcccagaattcaatccgaagaatagccaaaaatgtctttctccatcttcacaacctggatctgggttttcacctgagcagacagacgggagctttatctaaggctattgacagaggaacaaggggtatcagttttgtcctgagtgctttggtatttaatcttcttcccatcatgtttgaagtgatgcttgtcagtggtgttttgtattacaaatgcggtgcccagtttgctttggtaacccttggaacacttggtacatacacagcattcacagttgcagtcacacggtggagaactagatttagaatagaaatgaacaaagcagataatgatgcaggtaatgctgctatagactcactgctgaattatgaaactgtgaagtattttaataatgaaagatatgaagcacagagatatgatggatttttgaagacgtatgagactgcttcattgaaaagtacctctactctggctatgctgaactttggtcaaagtgctattttcagtgtcggtttaacagctataatggtgctcgccagtcagggaattgtggcaggtacccttactgttggagatctagtaatggtgaatggactgctttttcagctttcattacccctgaactttctgggaactgtatatagagagactagacaagcactcatagatatgaacaccttgtttactctactcaaggtagacacccaaattaaagacaaagtgatggcatctccccttcagatcacaccacagacagctaccgtggcctttgataatgtgcattttgaatacattgagggccagaaagtccttagtggaatatcctttgaagtccctgcaggaaagaaagtggccattgtaggaggtagtgggtcagggaaaagcacaatagtgaggctattatttcgcttctatgagcctcaaaagggtagcatttatcttgctggtcaaaatatacaagatgtgagcctggaaagccttcggagggcagtgggagtggtacctcaggatgctgtcctcttccataatactatttattacaacctcttatatggaaacatcagtgcttcacctgaggaagtgtatgcagtggcaaaattagctggacttcatgatgcaattcttcgaatgccacatggatatgacacccaagtaggggaacgaggactcaagctttcaggaggagaaaagcaaagagtagcaattgcaagagccattttgaaggaccccccagtcatactctatgatgaagctacttcatcgttagattcgattactgaagagactattcttggtgccatgaaggatgtggtcaaacacagaacttctattttcattgcacacagattgtcaacagtggttgatgcagatgaaatcattgtcttggatcagggtaaggtagccgaacgtggtacccaccatggtttgcttgctaaccctcatagtatctattcagaaatgtggcatacacagagcagccgtgtgcagaaccatgataaccccaaatgggaagcaaagaaagaaaatatatccaaagaggaggaaagaaagaaactacaagaagaaattgtcaatagtgtgaaaggctgtggaaactgttcgtgctaagtcacataagacattttctttttttgttgttttggactacatatttgcactgaagcagaattgttttattaaaaaaatcatacattccca

SEQ ID NO: 110111 - DNA, 2234 bp, Homo sapiens
  Payload ID: 1616
  Gene Symbol: ABCB7
  Gene Name: ATP-binding cassette, sub-family B (MDR/TAP), member 7
  Uniprot ID: O75027
  ENST ID: ENST00000339447
  CDS Start-End: 8-2146
gctcaagatggcgctgctcgcgatgcattcttggcgctgggcggccgcggcggctgctttcgaaaagcgccggcactccgcgattctgatccggcctttagtctctgttagcggctcaggtccgcagtggaggccacatcaactcggcgccttgggaaccgctcgagcctaccagattccagagtcattaaaaagtatcacatggcagagattgggaaaaggcaattcaggacagttcttagatgctgcaaaggctctccaggtatggccactgatagaaaagaggacatgttggcatggtcatgcaggaggaggactccacacagacccaaaagaaggggccatgaatattgtggttcccttcatgtttaaatatgctgtagacagcctcaaccagatgtcgggaaacatgctgaacctgagtgatgcaccaaatacagttgcaaccatggcaacagcagttctgattggctatggtgtatcaagagctggagctgctttttttaacgaagttcgaaatgcagtatttggcaaggtagcccagaattcaatccgaagaatagccaaaaatgtctttctccatcttcacaacctggatctgggttttcacctgagcagacagacgggagctttatctaaggctattgacagaggaacaaggggtatcagttttgtcctgagtgctttggtatttaatcttcttcccatcatgtttgaagtgatgcttgtcagtggtgttttgtattacaaatgcggtgcccagtttgctttggtaacccttggaacacttggtacatacacagcattcacagttgcagtcacacggtggagaactagatttagaatagaaatgaacaaagcagataatgatgcaggtaatgctgctatagactcactgctgaattatgaaactgtgaagtattttaataatgaaagatatgaagcacagagatatgatggatttttgaagacgtatgagactgcttcattgaaaagtacctctactctggctatgctgaactttggtcaaagtgctattttcagtgtcggtttaacagctataatggtgctcgccagtcagggaattgtggcaggtacccttactgttggagatctagtaatggtgaatggactgctttttcagctttcattacccctgaactttctgggaactgtatatagagagactagacaagcactcatagatatgaacaccttgtttactctactcaaggtagacacccaaattaaagacaaagtgatggcatctccccttcagatcacaccacagacagctaccgtggcctttgataatgtgcattttgaatacattgagggccagaaagtccttagtggaatatcctttgaagtccctgcaggaaagaaagtggccattgtaggaggtagtgggtcagggaaaagcacaatagtgaggctattatttcgcttctatgagcctcaaaagggtagcatttatcttgctggtcaaaatatacaagatgtgagcctggaaagccttcggagggcagtgggagtggtacctcaggatgctgtcctcttccataatactatttattacaacctcttatatggaaacatcagtgcttcacctgaggaagtgtatgcagtggcaaaattagctggacttcatgatgcaattcttcgaatgccacatggatatgacacccaagtaggggaacgaggactcaagctttcaggaggagaaaagcaaagagtagcaattgcaagagccattttgaaggaccccccagtcatactctatgatgaagctacttcatcgttagattcgattactgaagagactattcttggtgccatgaaggatgtggtcaaacacagaacttctattttcattgcacacagattgtcaacagtggttgatgcagatgaaatcattgtcttggatcagggtaaggtagccgaacgtggtacccaccatggtttgcttgctaaccctcatagtatctattcagaaatgtggcatacacagagcagccgtgtgcagaaccatgataaccccaaatgggaagcaaagaaagaaaatatatccaaagaggaggaaagaaagaaactacaagaagaaattgtcaatagtgtgaaaggctgtggaaactgttcgtgctaagtcacataagacattttctttttttgttgttttggactacatatttgcactgaagcagaattgttttattaaaaaaatcatacattcc

SEQ ID NO: 110112 - DNA, 2353 bp, Homo sapiens
  Payload ID: 1616
  Gene Symbol: ABCB7
  Gene Name: ATP-binding cassette, sub-family B (MDR/TAP), member 7
  Uniprot ID: O75027
  ENST ID: ENST00000373394
  CDS Start-End: 9-2267
cgctcaagatggcgctgctcgcgatgcattcttggcgctgggcggccgcggcggctgctttcgaaaagcgccggcactccgcgattctgatccggcctttagtctctgttagcggctcaggtccgcagtggaggccacatcaactcggcgccttgggaaccgctcgagcctaccagattccagagtcattaaaaagtatcacatggcagagattgggaaaaggcaattcaggacagttcttagatgctgcaaaggctctccaggtatggccactgatagaaaagaggacatgttggcatggtcatgcaggaggaggactccacacagacccaaaagaagggttaaaagatgttgatactcggaaaatcataaaagcaatgctttcttatgtgtggcccaaagacaggccagatctacgagctagagttgccatttcgctgggatttttgggtggtgcaaaggccatgaatattgtggttcccttcatgtttaaatatgctgtagacagcctcaaccagatgtcgggaaacatgctgaacctgagtgatgcaccaaatacagttgcaaccatggcaacagcagttctgattggctatggtgtatcaagagctggagctgctttttttaacgaagttcgaaatgcagtatttggcaaggtagcccagaattcaatccgaagaatagccaaaaatgtctttctccatcttcacaacctggatctgggttttcacctgagcagacagacgggagctttatctaaggctattgacagaggaacaaggggtatcagttttgtcctgagtgctttggtatttaatcttcttcccatcatgtttgaagtgatgcttgtcagtggtgttttgtattacaaatgcggtgcccagtttgctttggtaacccttggaacacttggtacatacacagcattcacagttgcagtcacacggtggagaactagatttagaatagaaatgaacaaagcagataatgatgcaggtaatgctgctatagactcactgctgaattatgaaactgtgaagtattttaataatgaaagatatgaagcacagagatatgatggatttttgaagacgtatgagactgcttcattgaaaagtacctctactctggctatgctgaactttggtcaaagtgctattttcagtgtcggtttaacagctataatggtgctcgccagtcagggaattgtggcaggtacccttactgttggagatctagtaatggtgaatggactgctttttcagctttcattacccctgaactttctgggaactgtatatagagagactagacaagcactcatagatatgaacaccttgtttactctactcaaggtagacacccaaattaaagacaaagtgatggcatctccccttcagatcacaccacagacagctaccgtggcctttgataatgtgcattttgaatacattgagggccagaaagtccttagtggaatatcctttgaagtccctgcaggaaagaaagtggccattgtaggaggtagtgggtcagggaaaagcacaatagtgaggctattatttcgcttctatgagcctcaaaagggtagcatttatcttgctggtcaaaatatacaagatgtgagcctggaaagccttcggagggcagtgggagtggtacctcaggatgctgtcctcttccataatactatttattacaacctcttatatggaaacatcagtgcttcacctgaggaagtgtatgcagtggcaaaattagctggacttcatgatgcaattcttcgaatgccacatggatatgacacccaagtaggggaacgaggactcaagctttcaggaggagaaaagcaaagagtagcaattgcaagagccattttgaaggaccccccagtcatactctatgatgaagctacttcatcgttagattcgattactgaagagactattcttggtgccatgaaggatgtggtcaaacacagaacttctattttcattgcacacagattgtcaacagtggttgatgcagatgaaatcattgtcttggatcagggtaaggtagccgaacgtggtacccaccatggtttgcttgctaaccctcatagtatctattcagaaatgtggcatacacagagcagccgtgtgcagaaccatgataaccccaaatgggaagcaaagaaagaaaatatatccaaagaggaggaaagaaagaaactacaagaagaaattgtcaatagtgtgaaaggctgtggaaactgttcgtgctaagtcacataagacattttctttttttgttgttttggactacatatttgcactgaagcagaattgttttattaaaaaaatcatacatt

SEQ ID NO: 110113 - DNA, 550 bp, Homo sapiens
  Payload ID: 1616
  Gene Symbol: ABCB7
  Gene Name: ATP-binding cassette, sub-family B (MDR/TAP), member 7
  ENST ID: ENST00000526404
  CDS Start-End: 36-550
agaagggagtgaagataagaatatgcatagggaaaatggagagaggggagcgtgacattgagttggaggagatggcgctgctcgcgatgcattcttggcgctgggcggccgcggcggctgctttcgaaaagcgccggcactccgcgattctgatccggcctttagtctctgttagcggctcaggtccgcagtggaggccacatcaactcggcgccttgggaaccgctcgagcctaccagcagattccagagtcattaaaaagtatcacatggcagagattgggaaaaggcaattcaggacagttcttagatgctgcaaaggctctccaggtatggccactgatagaaaagaggacatgttggcatggtcatgcaggaggaggactccacacagacccaaaagaagggttaaaagatgttgatactcggaaaatcataaaagcaatgctttcttatgtgtggcccaaagacaggccagatctacgagctagagttgccatttcgctgggatttttgggtggtgcaaaggccatgaatattgtggttccctt

SEQ ID NO: 110114 - DNA, 580 bp, Homo sapiens
  Payload ID: 1616
  Gene Symbol: ABCB7
  Gene Name: ATP-binding cassette, sub-family B (MDR/TAP), member 7
  ENST ID: ENST00000534524
  CDS Start-End: 15-580
tttcctcgctcaagatggcgctgctcgcgatgcattcttggcgctgggcggccgcggcggctgctttcgaaaagcgccggcactccgcgattctgatccggcctttagtctctgttagcggctcaggtccgcagtggaggccacatcaactcggcgccttgggaaccgctcgagcctaccagttaaaagatgttgatactcggaaaatcataaaagcaatgctttcttatgtgtggcccaaagacaggccagatctacgagctagagttgccatttcgctgggatttttgggtggtgcaaaggccatgaatattgtggttcccttcatgtttaaatatgctgtagacagcctcaaccagatgtcgggaaacatgctgaacctgagtgatgcaccaaatacagttgcaaccatggcaacagcagttctgattggctatggtgtatcaagagctggagctgctttttttaacgaagttcgaaatgcagtatttggcaaggtagcccagaattcaatccgaagaatagccaaaaatgtctttctccatcttcacaacctggatctgggttttcacctgagcag

SEQ ID NO: 110115 - DNA, 2116 bp, Homo sapiens
  Payload ID: 1616
  Gene Symbol: ABCB7
  Gene Name: ATP-binding cassette, sub-family B (MDR/TAP), member 7
  ENST ID: ENST00000529949
  CDS Start-End: 11-2116
ctcgctcaagatggcgctgctcgcgatgcattcttggcgctgggcggccgcggcggctgctttcgaaaagcgccggcactccgcgattctgatccggcctttagtctctgttagcggctcaggtccgcagtggaggccacatcaactcggcgccttgggaaccgctcgagcctaccaggctctccaggtatggccactgatagaaaagaggacatgttggcatggtcatgcaggaggaggactccacacagacccaaaagaagggttaaaagatgttgatactcggaaaatcataaaagcaatgctttcttatgtgtggcccaaagacaggccagatctacgagctagagttgccatttcgctgggatttttgggtggtgcaaaggccatgaatattgtggttcccttcatgtttaaatatgctgtagacagcctcaaccagatgtcgggaaacatgctgaacctgagtgatgcaccaaatacagttgcaaccatggcaacagcagttctgattggctatggtgtatcaagagctggagctgctttttttaacgaagttcgaaatgcagtatttggcaaggtagcccagaattcaatccgaagaatagccaaaaatgtctttctccatcttcacaacctggatctgggttttcacctgagcagacagacgggagctttatctaaggctattgacagaggaacaaggggtatcagttttgtcctgagtgctttggtatttaatcttcttcccatcatgtttgaagtgatgcttgtcagtggtgttttgtattacaaatgcggtgcccagtttgctttggtaacccttggaacacttggtacatacacagcattcacagttgcagtcacacggtggagaactagatttagaatagaaatgaacaaagcagataatgatgcaggtaatgctgctatagactcactgctgaattatgaaactgtgaagtattttaataatgaaagatatgaagcacagagatatgatggatttttgaagacgtatgagactgcttcattgaaaagtacctctactctggctatgctgaactttggtcaaagtgctattttcagtgtcggtttaacagctataatggtgctcgccagtcagggaattgtggcaggtacccttactgttggagatctagtaatggtgaatggactgctttttcagctttcattacccctgaactttctgggaactgtatatagagagactagacaagcactcatagatatgaacaccttgtttactctactcaaggtagacacccaaattaaagacaaagtgatggcatctccccttcagatcacaccacagacagctaccgtggcctttgataatgtgcattttgaatacattgagggccagaaagtccttagtggaatatcctttgaagtccctgcaggaaagaaagtggccattgtaggaggtagtgggtcagggaaaagcacaatagtgaggctattatttcgcttctatgagcctcaaaagggtagcatttatcttgctggtcaaaatatacaagatgtgagcctggaaagccttcggagggcagtgggagtggtacctcaggatgctgtcctcttccataatactatttattacaacctcttatatggaaacatcagtgcttcacctgaggaagtgtatgcagtggcaaaattagctggacttcatgatgcaattcttcgaatgccacatggatatgacacccaagtaggggaacgaggactcaagctttcaggaggagaaaagcaaagagtagcaattgcaagagccattttgaaggaccccccagtcatactctatgatgaagctacttcatcgttagattcgattactgaagagactattcttggtgccatgaaggatgtggtcaaacacagaacttctattttcattgcacacagattgtcaacagtggttgatgcagatgaaatcattgtcttggatcagggtaaggtagccgaacgtggtacccaccatggtttgcttgctaaccctcatagtatctattcagaaatgtggcatacacagagcagccgtgtgcagaaccatgataaccccaaatgggaagcaaagaaagaaaatatatcc

SEQ ID NO: 110116 - DNA, 2408 bp, Homo sapiens
  Payload ID: 1616
  Gene Symbol: ABCB7
  Gene Name: ATP-binding cassette, sub-family B (MDR/TAP), member 7
  ENST ID: ENST00000620875
  CDS Start-End: 69-2210
aggtagccgaattcagtccgccagtgtcccataatcctcttctctcggttcctctttcctcgctcaagatggcgctgctcgcgatgcattcttggcgctgggcggccgcggcggctgctttcgaaaagcgccggcactccgcgattctgatccggcctttagtctctgttagcggctcaggtccgcagtggaggccacatcaactcggcgccttgggaaccgctcgagcctaccagcagattccagagtcattaaaaagtatcacatggcagagattgggaaaaggcaattcaggacagttcttagatgctgcaaaggctctccaggtatggccactgatagaaaagaggacatgttggcatggtcatgcaggaggaggactccacacagacccaaaagaaggggccatgaatattgtggttcccttcatgtttaaatatgctgtagacagcctcaaccagatgtcgggaaacatgctgaacctgagtgatgcaccaaatacagttgcaaccatggcaacagcagttctgattggctatggtgtatcaagagctggagctgctttttttaacgaagttcgaaatgcagtatttggcaaggtagcccagaattcaatccgaagaatagccaaaaatgtctttctccatcttcacaacctggatctgggttttcacctgagcagacagacgggagctttatctaaggctattgacagaggaacaaggggtatcagttttgtcctgagtgctttggtatttaatcttcttcccatcatgtttgaagtgatgcttgtcagtggtgttttgtattacaaatgcggtgcccagtttgctttggtaacccttggaacacttggtacatacacagcattcacagttgcagtcacacggtggagaactagatttagaatagaaatgaacaaagcagataatgatgcaggtaatgctgctatagactcactgctgaattatgaaactgtgaagtattttaataatgaaagatatgaagcacagagatatgatggatttttgaagacgtatgagactgcttcattgaaaagtacctctactctggctatgctgaactttggtcaaagtgctattttcagtgtcggtttaacagctataatggtgctcgccagtcagggaattgtggcaggtacccttactgttggagatctagtaatggtgaatggactgctttttcagctttcattacccctgaactttctgggaactgtatatagagagactagacaagcactcatagatatgaacaccttgtttactctactcaaggtagacacccaaattaaagacaaagtgatggcatctccccttcagatcacaccacagacagctaccgtggcctttgataatgtgcattttgaatacattgagggccagaaagtccttagtggaatatcctttgaagtccctgcaggaaagaaagtggccattgtaggaggtagtgggtcagggaaaagcacaatagtgaggctattatttcgcttctatgagcctcaaaagggtagcatttatcttgctggtcaaaatatacaagatgtgagcctggaaagccttcggagggcagtgggagtggtacctcaggatgctgtcctcttccataatactatttattacaacctcttatatggaaacatcagtgcttcacctgaggaagtgtatgcagtggcaaaattagctggacttcatgatgcaattcttcgaatgccacatggatatgacacccaagtaggggaacgaggactcaagctttcaggaggagaaaagcaaagagtagcaattgcaagagccattttgaaggaccccccagtcatactctatgatgaagctacttcatcgttagattcgattactgaagagactattcttggtgccatgaaggatgtggtcaaacacagaacttctattttcattgcacacagattgtcaacagtggttgatgcagatgaaatcattgtcttggatcagggtaaggtagccgaacgtggtacccaccatggtttgcttgctaaccctcatagtatctattcagaaatgtggcatacacagagcagccgtgtgcagaaccatgataaccccaaatgggaagcaaagaaagaaaatatatccaaagaggaggaaagaaagaaactacaagaagaaattgtcaatagtgtgaaaggctgtggaaactgttcgtgctaagtcacataagacattttctttttttgttgttttggactacatatttgcactgaagcagaattgttttattaaaaaaatcatacattcccattttctataatccttcttttagataagatttatttaaaaggggatttgagttttacatctttcatagtctatttaatgtggcatctgtatttatccccaaattatttt

SEQ ID NO: 110117 - DNA, 2487 bp, Homo sapiens
  Payload ID: 1617
  Gene Symbol: ABCB8
  Gene Name: ATP-binding cassette, sub-family B (MDR/TAP), member 8
  Uniprot ID: Q9NUT2
  ENST ID: ENST00000297504
  CDS Start-End: 67-2274
atagagccctcagtgggatgagggtgaaactgctattgccggcggctcctgttttaccgcgtcagcatgctggtgcatttatttcgggtcgggattcggggtggcccattcccaggcaggctgctaccgcccctccgcttccagacattctcagctgtcagaaacacatggcgtaatgggaaaactggacagttacacaaggcagaaggagagtactctgatggctaccgcagctcctccctcctccgggccgtggcccacctgcggtcccagctctgggcccacctccctcgagcccccctagctcccagatggagcccctctgcctggtgctgggttgggggagccctgctaggccccatggtactgagtaagcatccccacctctgccttgtggccctgtgtgaggcagaagaggcccctcctgccagctccacaccccatgtcgtggggtctcgctttaactggaagctcttctggcagtttctgcacccccacctgctggtcctgggggtagccgtcgtgctggccttgggtgcggcactcgtgaatgtacagatccccctgctcctgggccagctggtagaggtcgtggccaagtacacaagggaccacgtagggagtttcatgactgagtcccagaatctcagcacccacctgcttatcctctatggtgtccagggactgctgaccttcgggtacctggtgctgctgtcccacgttggcgagcgcatggctgtggacatgcggagggccctcttcagctccctgctccgacaagacatcaccttctttgacgccaataagacagggcagctggtgagccgcttgacaactgacgtgcaggagtttaagtcatccttcaagcttgtcatctcccaggggctgcgaagctgcacccaggtggcaggctgcctggtgtccctgtccatgctgtcgacacgcctcacgctgctgctgatggtggccacaccagccctgatgggagtgggcaccctgatgggctcaggcctccgaaaattgtctcgccagtgtcaggagcagatcgccagggcaatgggcgtagcagacgaggccctgggcaatgtgcggactgtgcgtgccttcgccatggagcaacgggaagaggagcgctatggggcagagctggaagcctgccgctgccgggcagaggagctgggccgcggcatcgccttgttccaagggctttccaacatcgccttcaactgcatggtcttgggtaccctatttattgggggctcccttgtggccggacagcagctgacagggggagacctcatgtccttcctggtggcctcccagacagtgcaaaggtccatggccaacctctctgtcctgtttgggcaggtggtccgggggctgagtgcaggtgcccgggtctttgagtacatggccctgaacccctgcatcccactgtctgggggctgctgcgtccccaaagagcagctgcgtggctccgttacatttcagaacgtctgcttcagctacccctgccgccccggcttcgaggtgctgaaagacttcaccctgacgctgccccctggcaagatcgtggccctcgtgggccagtctggcggaggaaagaccaccgtggcttccctgctggagcgcttctacgaccccacggcaggcgtggtgatgctggatgggcgggacctgcgcacccttgacccctcctggctccggggccaggttgtcggcttcatcagccaggagcccgtcctgtttgggacgaccatcatggaaaacatccgctttgggaagctggaagcttccgatgaagaggtgtacacagccgcccgggaagcgaatgctcacgagttcatcaccagcttccccgagggctacaacacggtcgtcggtgaacggggcactaccctgtctgggggccagaagcagcgcctggccatcgcccgagcccttatcaagcagcccacggtgctgatactggatgaagctaccagcgcgctggatgcagagtccgagcgggttgtacaggaggccctggaccgggccagtgcaggccgcacggtgctggtaattgcccaccggctcagcactgtccgtggggcccactgcattgtcgtcatggccgatggccgtgtctgggaggctgggacacatgaagagctcctgaagaaaggcgggctatacgccgagctcatccggaggcaggccctggatgccccgaggacagcggccccaccgcccaaaaagccagaaggccccaggagccaccagcacaagtcctgagaagggccccctgaggtgtggtcgctgccaagcatcagtgttagggctggggctcagcctgggggagcctactggggactgagcccccaggagggccagcatgtggagagtcgctgcggctgctcctgctcacaataaagccggggccgagcagctggcaggggaggccaatccctccctcccctccccagtcctgccggctgcctccctccc

SEQ ID NO: 110118 - DNA, 4683 bp, Homo sapiens
  Payload ID: 1617
  Gene Symbol: ABCB8
  Gene Name: ATP-binding cassette, sub-family B (MDR/TAP), member 8
  Uniprot ID: Q9NUT2
  ENST ID: ENST00000358849
  CDS Start-End: 94-2250
gttgtcgggatgggggcgggagccaacatagagccctcagtgggatgagggtgaaactgctattgccggcggctcctgttttaccgcgtcagcatgctggtgcatttatttcgggtcgggattcggggtggcccattcccaggcaggctgctaccgcccctccgcttccagacattctcagctgtcaggtactctgatggctaccgcagctcctccctcctccgggccgtggcccacctgcggtcccagctctgggcccacctccctcgagcccccctagctcccagatggagcccctctgcctggtgctgggttgggggagccctgctaggccccatggtactgagtaagcatccccacctctgccttgtggccctgtgtgaggcagaagaggcccctcctgccagctccacaccccatgtcgtggggtctcgctttaactggaagctcttctggcagtttctgcacccccacctgctggtcctgggggtagccgtcgtgctggccttgggtgcggcactcgtgaatgtacagatccccctgctcctgggccagctggtagaggtcgtggccaagtacacaagggaccacgtagggagtttcatgactgagtcccagaatctcagcacccacctgcttatcctctatggtgtccagggactgctgaccttcgggtacctggtgctgctgtcccacgttggcgagcgcatggctgtggacatgcggagggccctcttcagctccctgctccgacaagacatcaccttctttgacgccaataagacagggcagctggtgagccgcttgacaactgacgtgcaggagtttaagtcatccttcaagcttgtcatctcccaggggctgcgaagctgcacccaggtggcaggctgcctggtgtccctgtccatgctgtcgacacgcctcacgctgctgctgatggtggccacaccagccctgatgggagtgggcaccctgatgggctcaggcctccgaaaattgtctcgccagtgtcaggagcagatcgccagggcaatgggcgtagcagacgaggccctgggcaatgtgcggactgtgcgtgccttcgccatggagcaacgggaagaggagcgctatggggcagagctggaagcctgccgctgccgggcagaggagctgggccgcggcatcgccttgttccaagggctttccaacatcgccttcaactgcatggtcttgggtaccctatttattgggggctcccttgtggccggacagcagctgacagggggagacctcatgtccttcctggtggcctcccagacagtgcaaaggtccatggccaacctctctgtcctgtttgggcaggtggtccgggggctgagtgcaggtgcccgggtctttgagtacatggccctgaacccctgcatcccactgtctgggggctgctgcgtccccaaagagcagctgcgtggctccgttacatttcagaacgtctgcttcagctacccctgccgccccggcttcgaggtgctgaaagacttcaccctgacgctgccccctggcaagatcgtggccctcgtgggccagtctggcggaggaaagaccaccgtggcttccctgctggagcgcttctacgaccccacggcaggcgtggtgatgctggatgggcgggacctgcgcacccttgacccctcctggctccggggccaggttgtcggcttcatcagccaggagcccgtcctgtttgggacgaccatcatggaaaacatccgctttgggaagctggaagcttccgatgaagaggtgtacacagccgcccgggaagcgaatgctcacgagttcatcaccagcttccccgagggctacaacacggtcgtcggtgaacggggcactaccctgtctgggggccagaagcagcgcctggccatcgcccgagcccttatcaagcagcccacggtgctgatactggatgaagctaccagcgcgctggatgcagagtccgagcgggttgtacaggaggccctggaccgggccagtgcaggccgcacggtgctggtaattgcccaccggctcagcactgtccgtggggcccactgcattgtcgtcatggccgatggccgtgtctgggaggctgggacacatgaagagctcctgaagaaaggcgggctatacgccgagctcatccggaggcaggccctggatgccccgaggacagcggccccaccgcccaaaaagccagaaggccccaggagccaccagcacaagtcctgagaagggccccctgaggtgtggtcgctgccaagcatcagtgttagggctggggctcagcctgggggagcctactggggactgagcccccaggagggccagcatgtggagagtcgctgcggctgctcctgctcacaataaagccggggccgagcagctggcaggggaggccaatccctccctcccctccccagtcctgccggctgcctccctcccaccagagtctgccagagtcattgggctgcaatgggcagagacagagttccacgagacacctccactctattctccctttgcccagacccctccagacctctcaagagacgttctggccagtctccctgccccacccagcagcttcaaattggccaggcctacagtagctccagggaatttttaaaaatcagggtctggaagtgggcctgggaattcaaacctaggctcttcccacacccttgctaggacctcacttccctagactggcgactgactccctctcctgtgtccccactccctccatgggagaaggagcctatcccctggctcaccccgggacccacagtccccatcttccaaacaacctccctcctttctccctgcacagtgaacacagtcctgatttctagatttcacctcccctccccacccacaagggacacaggcctaacagggcccaacacttgggtcagggtaggagggacggggccacaatggccagttcccacgagaagcgccagcctgcctggctgtcttccaccggccctgccctgtgtgcctggcgtctttcacccactgagattgtgaaccagcctccatctacaccaagaacacccagcactgaaggagatgggaggggctgatgcccacctggagctctctgcttcctgcccacagtgctgacgagtacagagctaaatggagcagctactgcagaatccagtacagaatcggtccaggagggtgcggctgtggacaggccagcatccccagcaggttctgggaggcgcaccttgaaaggggaaggcagacatcctgagtgatgggcgcctgtggccctgagactgtggatgagggggctaggctccagctggcttctgaggggcctggaaaggcacacaagtaggtccttggctgaactggtgccccagcaggacctcgtgtccctgcactgctgcagatgcatcagccctccccatgttggtgccgctgtcacttcctactgggatccttcccctatccagccacatccaggctgtgggactacacggtgccctgttcccctgggcaggagaagaggtggtacctgcaatgcaccttcacagccaggcaagcattctggatttaccctgtgtaaagaagggtggtaccctctttcaggggtgtgatacagtgcattgatggagcagctggtgctgctgggaggccagcctggaagaggcagcagtggctcaagtttgcgtgcaggagccagagtgggacccacgggctcttgtgggtgtggtttagaactagatggtgctttggggacaagccatccaaaaaccccaggcccacatccaccctgatttgatatcccacttcctgacagatcagaggctgtgtctttaagcagtggaggtccaggagcagagcctggggctggttcacagctaaacccctccttagggcagcccagagtagggcctcagctggcaagtccacaagccctgctggggccctgcttgttggcctgacccctccctcaccaggcagccagccaaggtggttcctgcttcacccactcagtcatcagcctcaggctgcccaaaatgcctctgacaccagatttatatcttctgggcggcttctttaaatccagcccttcacccgccccctagagaagcagtgaaaccccttggctagtccagctggaagagctagaccgcaggagccgcgccgtcttcctaacctcgcctcggccttcgctccacagtggagagtgggagcctagctgtgcttgatgctgaatgcctgttttgagagtgtgagtgggatcatctacagtaaatacttgcaaagcatggcactgtggctctggggagctggtacgcctgtgctgtaaccatggtactcagtccttccaaagtgtttattaatcaagcacctgtcatgtgccattgagcccacgatggggaatgaggacagtccctgcccccatgaagcttgtgtcctgttgggaggacagacaggtggcccagcagttgcagcatggtgtgtgcacacgtttggctggtggaaccatgtttctaccactcatggtcaaaaaaagcccaccaaagtcctgggagttcacatctgtgtgatgatacggcaacattgtttgtaatggaaagactggacacccccagtgcccatcagtgggggagtcattaaataaactatggtatgtgcacataa

SEQ ID NO: 110119 - DNA, 537 bp, Homo sapiens
  Payload ID: 1617
  Gene Symbol: ABCB8
  Gene Name: ATP-binding cassette, sub-family B (MDR/TAP), member 8
  ENST ID: ENST00000461373
  CDS Start-End: 94-537
gttgtcgggatgggggcgggagccaacatagagccctcagtgggatgagggtgaaactgctattgccggcggctcctgttttaccgcgtcagcatgctggtgcatttatttcgggtcgggattcggggtggcccattcccaggcaggctgctaccgcccctccgcttccagacattctcagctgtcaggaggctcctgcgtctgcagccgcgtgtcagccagaaggaggggacgctcggggtcagtgaccacgcccagtccgcactcccgaccgggggtcccctttcctggccctggaggtactctgatggctaccgcagctcctccctcctccgggccgtggcccacctgcggtcccagctctgggcccacctccctcgagcccccctagctcccagatggagcccctctgcctggtgctgggttgggggagccctgctaggccccatggtactgagtaagcatccccacctctgccttgtggccctgtgtgaggcagaagaggcccctcctgccagctccacaccccatgtcgtg

SEQ ID NO: 110120 - DNA, 2350 bp, Homo sapiens
  Payload ID: 1617
  Gene Symbol: ABCB8
  Gene Name: ATP-binding cassette, sub-family B (MDR/TAP), member 8
  Uniprot ID: Q9NUT2
  ENST ID: ENST00000498578
  CDS Start-End: 55-2136
gtgggatgagggtgaaactgctattgccggcggctcctgttttaccgcgtcagcatgctggtgcatttatttcgggtcgggattcggggtggcccattcccaggcaggctgctaccgcccctccgcttccagacattctcagctgtcaggtactctgatggctaccgcagctcctccctcctccgggccgtggcccacctgcggtcccagctctgggcccacctccctcgagcccccctagctcccagatggagcccctctgcctggtgctgggttgggggagccctgctaggccccatggtactgagtaagcatccccacctctgccttgtggccctgtgtgaggcagaagaggcccctcctgccagctccacaccccatgtcgtggggtctcgctttaactggaagctcttctggcagtttctgcacccccacctgctggtcctgggggtagccgtcgtgctggccttgggtgcggcactcgtgaatgtacagatccccctgctcctgggccagctggtagaggtcgtggccaagtacacaagggaccacgtagggagtttcatgactgagtcccagaatctcagcacccacctgcttatcctctatggtgtccagggactgctgaccttcgggtacctggtgctgctgtcccacgttggcgagcgcatggctgtggacatgcggagggccctcttcagctccctgctccgacaagacatcaccttctttgacgccaataagacagggcagctggtgagccgcttgacaactgacgtgcaggagtttaagtcatccttcaagcttgtcatctcccaggggctgcgaagctgcacccaggtggcaggctgcctggtgtccctgtccatgctgtcgacacgcctcacgctgctgctgatggtggccacaccagccctgatgggagtgggcaccctgatgggctcaggcctccgaaaattgtctcgccagtgtcaggagcagatcgccagggcaatgggcgtagcagacgaggccctgggcaatgtgcggactgtgcgtgccttcgccatggagcaacgggaagaggagcgctatggggcagagctggaagcctgccgctgccgggcagaggagctgggccgcggcatcgccttgttccaagggctttccaacatcgccttcaactgcatggtcttgggtaccctatttattgggggctcccttgtggccggacagcagctgacagggggagacctcatgtccttcctggtggcctcccagacagtgcaaaggtccatggccaacctctctgtcctgtttgggcaggtggtccgggggctgagtgcaggtgcccgggtctttgagtacatggccctgaacccctgcatcccactgtctgggggctgctgcgtccccaaagagcagctgcgtggctccgttacatttcagaacgtctgcttcagctacccctgccgccccggcttcgaggtgctgaaagacttcaccctgacgctgccccctggcaagatcgtggccctcgtgggccagtctggcggaggaaagaccaccgtggcttccctgctggagcgcttctacgaccccacggcaggcgtggtgatgctggatgggcgggacctgcgcacccttgacccctcctggctccggggccaggttgtcggcttcatcagccaggagcccgtcctgtttgggacgaccatcatggaaaacatccgctttgggaagctggaagcttccgatgaagaggtgtacacagccgcccgggaagcgaatgctcacgagttcatcaccagcttccccgagggctacaacacggtcgtcggtgaacggggcactaccctgtctgggggccagaagcagcgcctggccatcgcccgagcccttatcaagcagcccacggtgctgatactggatgaagctaccagcgcgctggatgcagagtccgagcgggttgtacaggaggccctggaccgggccagtgcaggccgcacggtgctggctgggacacatgaagagctcctgaagaaaggcgggctatacgccgagctcatccggaggcaggccctggatgccccgaggacagcggccccaccgcccaaaaagccagaaggccccaggagccaccagcacaagtcctgagaagggccccctgaggtgtggtcgctgccaagcatcagtgttagggctggggctcagcctgggggagcctactggggactgagcccccaggagggccagcatgtggagagtcgctgcggctgctcctgctcacaataaagccggggccgagcagctggcaggggaggccaatccctccctcccctccccagtcctgccggctgcctccctccca

SEQ ID NO: 110121 - DNA, 552 bp, Homo sapiens
  Payload ID: 1617
  Gene Symbol: ABCB8
  Gene Name: ATP-binding cassette, sub-family B (MDR/TAP), member 8
  ENST ID: ENST00000488551
  CDS Start-End: 41-187
aaactgctattgccggcggctcctgttttaccgcgtcagcatgctggtgcatttatttcgggtcgggattcggggtggcccattcccaggcaggctgctaccgcccctccgcttccagacattctcagctgtcagctgtggagagggagtgtgtgtcatggcgccccaggccagggaggggaggtagggtaatgggcctgggacatcagaagacatggcacactggcagagtagagccagcctgggtgctggagtcagactgcagacttggttccctgctcgtcccagttctgctgcctgcggacaagttatttcagctctcttagctccacatgatttttttcatctgtcagctggccttgggtgcggcactcgtgaatgtacagatccccctgctcctgggccagctggtagaggtcgtggccaagtacacaagggaccacgtagggagtttcatgactgagtcccagaatctcagcacccacctgcttatcctctatggtgtccagggactgctgaccttcgggtacctggtgctgctgtcccacgttg

SEQ ID NO: 110122 - DNA, 762 bp, Homo sapiens
  Payload ID: 1617
  Gene Symbol: ABCB8
  Gene Name: ATP-binding cassette, sub-family B (MDR/TAP), member 8
  ENST ID: ENST00000489192
  CDS Start-End: 79-255
gcgggagccaacatagagccctcagtgggatgagggtgaaactgctattgccggcggctcctgttttaccgcgtcagcatgctggtgcatttatttcgggtcgggattcggggtggcccattcccaggcaggctgctaccgcccctccgcttccagacattctcagctgtcagtgacactccagtcgccagcaggaggctcctgcgtctgcagccgcgtgtcagccagaaggaggggacgctcggggtactctgatggctaccgcagctcctccctcctccgggccgtggcccacctgcggtcccagctctgggcccacctccctcgagcccccctagctcccagatggagcccctctgcctggtgctgggttgggggagccctgctaggccccatggtactgagtaagcatccccacctctgccttgtggccctgtgtgaggcagaagaggcccctcctgccagctccacaccccatgtcgtggggtctcgctttaactggaagctcttctggcagtttctgcacccccacctgctggtcctgggggtagccgtcgtgctggccttgggtgcggcactcgtgaatgtacagatccccctgctcctgggccagctggtagaggtcgtggccaagtacacaagggaccacgtagggagtttcatgactgagtcccagaatctcagcacccacctgcttatcctctatggtgtccagggactgctgaccttcgggtacctggtgctgctgtcccacgttggcga

SEQ ID NO: 110123 - DNA, 1994 bp, Homo sapiens
  Payload ID: 1617
  Gene Symbol: ABCB8
  Gene Name: ATP-binding cassette, sub-family B (MDR/TAP), member 8
  ENST ID: ENST00000482309
  CDS Start-End: 91-210
gtcgggatgggggcgggagccaacatagagccctcagtgggatgagggtgaaactgctattgccggcggctcctgttttaccgcgtcagcatgctggtgcatttatttcgggtcgggattcggggtggcccattcccaggcaggctgctaccgcccctccgcttccagacattctcagctgtcagctggccttgggtgcggcactcgtgaatgtacagatccccctgctcctgggccagctggtagaggtcgtggccaagtacacaagggaccacgtagggagtttcatgactgagtcccagaatctcagcacccacctgcttatcctctatggtgtccagggactgctgaccttcgggtacctggtgctgctgtcccacgttggcgagcgcatggctgtggacatgcggagggccctcttcagctccctgctccgacaagacatcaccttctttgacgccaataagacagggcagctggtgagccgcttgacaactgacgtgcaggagtttaagtcatccttcaagcttgtcatctcccaggggctgcgaagctgcacccaggtggcaggctgcctggtgtccctgtccatgctgtcgacacgcctcacgctgctgctgatggtggccacaccagccctgatgggagtgggcaccctgatgggctcaggcctccgaaaattgtctcgccagtgtcaggagcagatcgccagggcaatgggcgtagcagacgaggccctgggcaatgtgcggactgtgcgtgccttcgccatggagcaacgggaagaggagcgctatggggcagagctggaagcctgccgctgccgggcagaggagctgggccgcggcatcgccttgttccaagggctttccaacatcgccttcaactgcatggtcttgggtaccctatttattgggggctcccttgtggccggacagcagctgacagggggagacctcatgtccttcctggtggcctcccagacagtgcaaaggtccatggccaacctctctgtcctgtttgggcaggtggtccgggggctgagtgcaggtgcccgggtctttgagtacatggccctgaacccctgcatcccactgtctgggggctgctgcgtccccaaagagcagctgcgtggctccgttacatttcagaacgtctgcttcagctacccctgccgccccggcttcgaggtgctgaaagacttcaccctgacgctgccccctggcaagatcgtggccctcgtgggccagtctggcggaggaaagaccaccgtggcttccctgctggagcgcttctacgaccccacggcaggcgtggtgatgctggatgggcgggacctgcgcacccttgacccctcctggctccggggccaggttgtcggcttcatcagccaggagcccgtcctgtttgggacgaccatcatggaaaacatccgctttgggaagctggaagcttccgatgaagaggtgtacacagccgcccgggaagcgaatgctcacgagttcatcaccagcttccccgagggctacaacacggtcgtcggtgaacggggcactaccctgtctgggggccagaagcagcgcctggccatcgcccgagcccttatcaagcagcccacggtgctgatactggatgaagctaccagcgcgctggatgcagagtccgagcgggttgtacaggaggccctggaccgggccagtgcaggccgcacggtgctggtaattgcccaccggctcagcactgtccgtggggcccactgcattgtcgtcatggccgatggccgtgtctgggaggctgggacacatgaagagctcctgaagaaaggcgggctatacgccgagctcatccggaggcaggccctggatgccccgaggacagcggccccaccgcccaaaaagccagaaggccccaggagccaccagcacaagtcctgagaagggccccctgaggtgtggtcgctgccaagcatcagtgttagggctggggctcagcct

SEQ ID NO: 110124 - DNA, 1596 bp, Homo sapiens
  Payload ID: 1617
  Gene Symbol: ABCB8
  Gene Name: ATP-binding cassette, sub-family B (MDR/TAP), member 8
  ENST ID: ENST00000477092
  CDS Start-End: 50-1345
atgagggtgaaactgctattgccggcggctcctgttttaccgcgtcagcatgctggtgcatttatttcgggtcgggattcggggtggcccattcccaggcaggctgctaccgcccctccgcttccagacattctcagctgtcaggtactctgatggctaccgcagctcctccctcctccgggccgtggcccacctgcggtcccagctctgggcccacctccctcgagcccccctagctcccagatggagcccctctgcctggtgctgggttgggggagccctgctaggccccatggtactgagtaagcatccccacctctgccttgtggccctgtgtgaggcagaagaggcccctcctgccagctccacaccccatgtcgtggggtctcgctttaactggaagctcttctggcagtttctgcacccccacctgctggtcctgggggtagccgtcgtgctggccttgggtgcggcactcgtgaatgtacagatccccctgctcctgggccagctggtagaggtcgtggccaagtacacaagggaccacgtagggagtttcatgactgagtcccagaatctcagcacccacctgcttatcctctatggtgtccagggactgctgaccttcgggtacctggtgctgctgtcccacgttggcgagcgcatggctgtggacatgcggagggccctcttcagctccctgctccgacaagacatcaccttctttgacgccaataagacagggcagctggtgagccgcttgacaactgacgtgcaggagtttaagtcatccttcaagcttgtcatctcccaggggctgcgaagctgcacccaggtggcaggctgcctggtgtccctgtccatgctgtcgacacgcctcacgctgctgctgatggtggccacaccagccctgatgggagtgggcaccctgatgggctcaggcctccgaaaattgtctcgccagtgtcaggagcagatcgccagggcaatgggcgtagcagacgaggccctgggcaatgtgcggactgtgcgtgccttcgccatggagcaacgggaagaggagcgctatggggcagagctggaagcctgccgctgccgggcagaggagctgggccgcggcatcgccttgttccaagggctttccaacatcgccttcaactgcatggtcttgggtaccctatttattgggggctcccttgtggccggacagcagctgacagggggagacctcatgtccttcctggtggcctcccagacagtgcaaagcttcctccgtgttgcaccctgtccgaattcccttccgctgcaggctgtgacattccatgcatggaaggaccatccttgacaggctgtgtgagctgcccttccccatgcctgccacttccagggatgacaagctgacccctgtccccacacaccccacccttatagcttattgctttgcgttggtccaaaaccacccgctcagctgagcctctgggatgaccagagctgatcaccagacagctcaaggcgggcctcccccctcctatctctttccaagctaaacacaagcagttctacataaatatgttatggtaaataatgagatagtaa

SEQ ID NO: 110125 - DNA, 1625 bp, Homo sapiens
  Payload ID: 1617
  Gene Symbol: ABCB8
  Gene Name: ATP-binding cassette, sub-family B (MDR/TAP), member 8
  ENST ID: ENST00000477719
  CDS Start-End: 53-1282
gggatgagggtgaaactgctattgccggcggctcctgttttaccgcgtcagcatgctggtgcatttatttcgggtcgggattcggggtggcccattcccaggcaggctgctaccgcccctccgcttccagacattctcagctgtcaggtactctgatggctaccgcagctcctccctcctccgggccgtggcccacctgcggtcccagctctgggcccacctccctcgagcccccctagctcccagatggagcccctctgcctggtgctgggttgggggagccctgctaggccccatggtactgagtaagcatccccacctctgccttgtggccctgtgtgaggcagaagaggcccctcctgccagctccacaccccatgtcgtggggtctcgctttaactggaagctcttctggcagtttctgcacccccacctgctggtcctgggggtagccgtcgtgctggccttgggtgcggcactcgtgaatgtacagatccccctgctcctgggccagctggtagaggtcgtggccaagtacacaagggaccacgtagggagtttcatgactgagtcccagaatctcagcacccacctgcttatcctctatggtgtccagggactgctgaccttcgggtacctggtgctgctgtcccacgttggcgagcgcatggctgtggacatgcggagggccctcttcagctccctgctccgacaagacatcaccttctttgacgccaataagacagggcagctggtgagccgcttgacaactgacgtgcaggagtttaagtcatccttcaagcttgtcatctcccaggggctgcgaagctgcacccaggtggcaggctgcctggtgtccctgtccatgctgtcgacacgcctcacgctgctgctgatggtggccacaccagccctgatgggagtgggcaccctgatgggctcaggcctccgaaaattgtctcgccagtgtcaggagcagatcgccagggcaatgggcgtagcagacgaggccctgggcaatgtgcggactgtgcgtgccttcgccatggagcaacgggaagaggagcgctatggggcagagctggaagcctgccgctgccgggcagaggagctgggccgcggcatcgccttgttccaagggctttccaacatcgccttcaactgcatggtcttgggtaccctatttattgggggctcccttgtggccggacagcagctgacagggggagacctcatgtccttcctggtggcctcccagacagtgcaaagggacgtcctctaagtggagtcagactatgtccttttgtgactgcgttttgtcactccacattgtgtcctcagcttcctccgtgttgcaccctgtccgaattcccttccgctgcaggctgtgacattccatgcatggaaggaccatccttgacaggctgtgtgagctgcccttccccatgcctgccacttccagggatgacaagctgacccctgtccccacacaccccacccttatagcttattgctttgcgttggtccaaaaccacccgctcagctgagcctctgggatgaccagagctgatcaccagacagctcaaggcgggcctcccccctcctatctctttccaagctaaaca

SEQ ID NO: 110126 - DNA, 717 bp, Homo sapiens
  Payload ID: 1617
  Gene Symbol: ABCB8
  Gene Name: ATP-binding cassette, sub-family B (MDR/TAP), member 8
  ENST ID: ENST00000491920
  CDS Start-End: 1-421
gtccctgtccatgctgtcgacacgcctcacgctgctgctgatggtggccacaccagccctgatgggagtgggcaccctgatgggctcaggcctccgaaaattgtctcgccagtgtcaggagcagatcgccagggcaatgggcgtagcagacgaggccctgggcaatgtgcggactgtgcgtgccttcgccatggagcaacgggaagaggagcgctatggggcagagctggaagcctgccgctgccgggcagaggagctgggccgcggcatcgccttgttccaagggctttccaacatcgccttcaactgcatggtcttgggtaccctatttattgggggctcccttgtggccggacagcagctgacagggggagacctcatgtccttcctggtggcctcccagacagtgcaaaggctgtgacattccatgcatggaaggaccatccttgacaggctgtgtgagctgcccttccccatgcctgccacttccagggatgacaagctgacccctgtccccacacaccccacccttatagcttattgctttgcgttggtccaaaaccacccgctcagctgagcctctgggatgaccagagctgatcaccagacagctcaaggcgggcctcccccctcctatctctttccaagctaaacacaagcagttctacataaatatgttatggtaaataatgagatagtaaatatgctgtaacagat

SEQ ID NO: 110127 - DNA, 1722 bp, Homo sapiens
  Payload ID: 1617
  Gene Symbol: ABCB8
  Gene Name: ATP-binding cassette, sub-family B (MDR/TAP), member 8
  ENST ID: ENST00000470645
  CDS Start-End: 67-213
atagagccctcagtgggatgagggtgaaactgctattgccggcggctcctgttttaccgcgtcagcatgctggtgcatttatttcgggtcgggattcggggtggcccattcccaggcaggctgctaccgcccctccgcttccagacattctcagctgtcagctgtggagagggagtgtgtgtcatggcgccccaggccagggaggggaggtagggtaatgggcctgggacatcagaagacatggcacactggcagagtagagccagcctgggtgctggagtcagactgcagacttggttccctgctcgtcccagttctgctgcctgcggacaagttatttcagctctcttagctccacatgatttttttcatctgtcagggactgctgaccttcgggtacctggtgctgctgtcccacgttggcgagcgcatggctgtggacatgcggagggccctcttcagctccctgctccgacaagacatcaccttctttgacgccaataagacagggcagctggtgagccgcttgacaactgacgtgcaggagtttaagtcatccttcaagcttgtcatctcccaggggctgcgaagctgcacccaggtggcaggctgcctggtgtccctgtccatgctgtcgacacgcctcacgctgctgctgatggtggccacaccagccctgatgggagtgggcaccctgatgggctcaggcctccgaaaattgtctcgccagtgtcaggagcaggtaccggcattcctggccatcctcttcaccctccccacaccgtttctctttccactccccggaactcctccctgtccccatcctggactccttgtcctgttttctggactccttgtcctgtttcctggactccttgcagatcgccagggcaatgggcgtagcagacgaggccctgggcaatgtgcggactgtgcgtgccttcgccatggagcaacgggaagaggagtgagtcctgggagggcggagcacaaagcagagatgccccccacaccctgccaacccttcgtgccagcccagctgcctcctgaatgcactggtctctctcaccaggcgctatggggcagagctggaagcctgccgctgccgggcagaggagctgggccgcggcatcgccttgttccaagggctttccaacatcgccttcaactgcatggtcttgggtaccctatttattgggggctcccttgtggccggacagcagctgacagggggagacctcatgtccttcctggtggcctcccagacagtgcaaaggtggtccgggggctgagtgcaggtgcccgggtctttgagtacatggccctgaacccctgcatcccactgtctgggggctgctgcgtccccaaagagcagctgcgtggctccgttacatttcagaacgtctgcttcaggtcagcacggctacccctgccgccccggcttcgaggtgctgaaagacttcaccctgacgctgccccctggcaagatcgtggccctcgtgggccagtctggcggaggaaagaccaccgtggcttccctgctggagcgcttctacgaccccacggcaggcgtggtgatgctggatgggcgggacctgcgcacccttgacccctcctggctccggggccaggttgtcggcttcatcagccaggagcccgtcctgtttgggacgaccatcatggaaaacatccgctttgggaagctggaagcttccgatgaag

SEQ ID NO: 110128 - DNA, 2199 bp, Homo sapiens
  Payload ID: 1617
  Gene Symbol: ABCB8
  Gene Name: ATP-binding cassette, sub-family B (MDR/TAP), member 8
  ENST ID: ENST00000466514
  CDS Start-End: 67-186
atagagccctcagtgggatgagggtgaaactgctattgccggcggctcctgttttaccgcgtcagcatgctggtgcatttatttcgggtcgggattcggggtggcccattcccaggcaggctgctaccgcccctccgcttccagacattctcagctgtcagctggccttgggtgcggcactcgtgaatgtacagatccccctgctcctgggccagctggtagaggtcgtggccaagtacacaagggaccacgtagggagtttcatgactgagtcccagaatctcagcacccacctgcttatcctctatggtgtccaggtacagccgggagtggggctggggaccgccgaggagccacccgaggcatccctgagtgcactgggctctttcgcagggactgctgaccttcgggtacctggtgctgctgtcccacgttggcgagcgcatggctgtggacatgcggagggccctcttcagctccctgctccgacaagacatcaccttctttgacgccaataagacagggcagctggtgagccgcttgacaactgacgtgcaggagtttaagtcatccttcaagcttgtcatctcccaggggctgcgaagctgcacccaggtggcaggctgcctggtgtccctgtccatgctgtcgacacgcctcacgctgctgctgatggtggccacaccagccctgatgggagtgggcaccctgatgggctcaggcctccgaaaattgtctcgccagtgtcaggagcagatcgccagggcaatgggcgtagcagacgaggccctgggcaatgtgcggactgtgcgtgccttcgccatggagcaacgggaagaggagcgctatggggcagagctggaagcctgccgctgccgggcagaggagctgggccgcggcatcgccttgttccaagggctttccaacatcgccttcaactgcatggtcttgggtaccctatttattgggggctcccttgtggccggacagcagctgacagggggagacctcatgtccttcctggtggcctcccagacagtgcaaaggtccatggccaacctctctgtcctgtttgggcaggtggtccgggggctgagtgcaggtgcccgggtctttgagtacatggccctgaacccctgcatcccactgtctgggggctgctgcgtccccaaagagcagctgcgtggctccgttacatttcagaacgtctgcttcagctacccctgccgccccggcttcgaggtgctgaaagacttcaccctgacgctgccccctggcaagatcgtggccctcgtgggccagtctggcggaggaaagaccaccgtggcttccctgctggagcgcttctacgaccccacggcaggcgtggtgatgctggatgggcgggacctgcgcacccttgacccctcctggctccggggccaggttgtcggcttcatcagccaggagcccgtcctgtttgggacgaccatcatggaaaacatccgctttgggaagctggaagcttccgatgaagaggtgtacacagccgcccgggaagcgaatgctcacgagttcatcaccagcttccccgagggctacaacacggtcgtcggtgaacggggcactaccctgtctgggggccagaagcagcgcctggccatcgcccgagcccttatcaagcagcccacggtgctgatactggatgaagctaccagcgcgctggatgcagagtccgagcgggttgtacaggaggccctggaccgggccagtgcaggccgcacggtgctggtaattgcccaccggctcagcactgtccgtggggcccactgcattgtcgtcatggccgatggccgtgtctgggaggctgggacacatgaagagctcctgaagaaaggcgggctatacgccgagctcatccggaggcaggccctggatgccccgaggacagcggccccaccgcccaaaaagccagaaggccccaggagccaccagcacaagtcctgagaagggccccctgaggtgtggtcgctgccaagcatcagtgttagggctggggctcagcctgggggagcctactggggactgagcccccaggagggccagcatgtggagagtcgctgcggctgctcctgctcacaataaagccggggccgagcagctggcaggggaggccaatccctccctcccctccccagtcctgccggctgcctccctccc

SEQ ID NO: 110129 - DNA, 4371 bp, Homo sapiens
  Payload ID: 1617
  Gene Symbol: ABCB8
  Gene Name: ATP-binding cassette, sub-family B (MDR/TAP), member 8
  Uniprot ID: Q9NUT2
  ENST ID: ENST00000542328
  CDS Start-End: 46-1938
ggttgtcgggatgggggcgggagccaacatagagccctcagtgggatgagggtgaaactgctattgccggcggctcctgttttaccgcgtcagcatgctggtgcatttatttcgggtcgggattcggggtggcccattcccaggcaggctgctaccgcccctccgcttccagacattctcagctgtcagctggccttgggtgcggcactcgtgaatgtacagatccccctgctcctgggccagctggtagaggtcgtggccaagtacacaagggaccacgtagggagtttcatgactgagtcccagaatctcagcacccacctgcttatcctctatggtgtccagggactgctgaccttcgggtacctggtgctgctgtcccacgttggcgagcgcatggctgtggacatgcggagggccctcttcagctccctgctccgacaagacatcaccttctttgacgccaataagacagggcagctggtgagccgcttgacaactgacgtgcaggagtttaagtcatccttcaagcttgtcatctcccaggggctgcgaagctgcacccaggtggcaggctgcctggtgtccctgtccatgctgtcgacacgcctcacgctgctgctgatggtggccacaccagccctgatgggagtgggcaccctgatgggctcaggcctccgaaaattgtctcgccagtgtcaggagcagatcgccagggcaatgggcgtagcagacgaggccctgggcaatgtgcggactgtgcgtgccttcgccatggagcaacgggaagaggagcgctatggggcagagctggaagcctgccgctgccgggcagaggagctgggccgcggcatcgccttgttccaagggctttccaacatcgccttcaactgcatggtcttgggtaccctatttattgggggctcccttgtggccggacagcagctgacagggggagacctcatgtccttcctggtggcctcccagacagtgcaaaggtccatggccaacctctctgtcctgtttgggcaggtggtccgggggctgagtgcaggtgcccgggtctttgagtacatggccctgaacccctgcatcccactgtctgggggctgctgcgtccccaaagagcagctgcgtggctccgttacatttcagaacgtctgcttcagctacccctgccgccccggcttcgaggtgctgaaagacttcaccctgacgctgccccctggcaagatcgtggccctcgtgggccagtctggcggaggaaagaccaccgtggcttccctgctggagcgcttctacgaccccacggcaggcgtggtgatgctggatgggcgggacctgcgcacccttgacccctcctggctccggggccaggttgtcggcttcatcagccaggagcccgtcctgtttgggacgaccatcatggaaaacatccgctttgggaagctggaagcttccgatgaagaggtgtacacagccgcccgggaagcgaatgctcacgagttcatcaccagcttccccgagggctacaacacggtcgtcggtgaacggggcactaccctgtctgggggccagaagcagcgcctggccatcgcccgagcccttatcaagcagcccacggtgctgatactggatgaagctaccagcgcgctggatgcagagtccgagcgggttgtacaggaggccctggaccgggccagtgcaggccgcacggtgctggtaattgcccaccggctcagcactgtccgtggggcccactgcattgtcgtcatggccgatggccgtgtctgggaggctgggacacatgaagagctcctgaagaaaggcgggctatacgccgagctcatccggaggcaggccctggatgccccgaggacagcggccccaccgcccaaaaagccagaaggccccaggagccaccagcacaagtcctgagaagggccccctgaggtgtggtcgctgccaagcatcagtgttagggctggggctcagcctgggggagcctactggggactgagcccccaggagggccagcatgtggagagtcgctgcggctgctcctgctcacaataaagccggggccgagcagctggcaggggaggccaatccctccctcccctccccagtcctgccggctgcctccctcccaccagagtctgccagagtcattgggctgcaatgggcagagacagagttccacgagacacctccactctattctccctttgcccagacccctccagacctctcaagagacgttctggccagtctccctgccccacccagcagcttcaaattggccaggcctacagtagctccagggaatttttaaaaatcagggtctggaagtgggcctgggaattcaaacctaggctcttcccacacccttgctaggacctcacttccctagactggcgactgactccctctcctgtgtccccactccctccatgggagaaggagcctatcccctggctcaccccgggacccacagtccccatcttccaaacaacctccctcctttctccctgcacagtgaacacagtcctgatttctagatttcacctcccctccccacccacaagggacacaggcctaacagggcccaacacttgggtcagggtaggagggacggggccacaatggccagttcccacgagaagcgccagcctgcctggctgtcttccaccggccctgccctgtgtgcctggcgtctttcacccactgagattgtgaaccagcctccatctacaccaagaacacccagcactgaaggagatgggaggggctgatgcccacctggagctctctgcttcctgcccacagtgctgacgagtacagagctaaatggagcagctactgcagaatccagtacagaatcggtccaggagggtgcggctgtggacaggccagcatccccagcaggttctgggaggcgcaccttgaaaggggaaggcagacatcctgagtgatgggcgcctgtggccctgagactgtggatgagggggctaggctccagctggcttctgaggggcctggaaaggcacacaagtaggtccttggctgaactggtgccccagcaggacctcgtgtccctgcactgctgcagatgcatcagccctccccatgttggtgccgctgtcacttcctactgggatccttcccctatccagccacatccaggctgtgggactacacggtgccctgttcccctgggcaggagaagaggtggtacctgcaatgcaccttcacagccaggcaagcattctggatttaccctgtgtaaagaagggtggtaccctctttcaggggtgtgatacagtgcattgatggagcagctggtgctgctgggaggccagcctggaagaggcagcagtggctcaagtttgcgtgcaggagccagagtgggacccacgggctcttgtgggtgtggtttagaactagatggtgctttggggacaagccatccaaaaaccccaggcccacatccaccctgatttgatatcccacttcctgacagatcagaggctgtgtctttaagcagtggaggtccaggagcagagcctggggctggttcacagctaaacccctccttagggcagcccagagtagggcctcagctggcaagtccacaagccctgctggggccctgcttgttggcctgacccctccctcaccaggcagccagccaaggtggttcctgcttcacccactcagtcatcagcctcaggctgcccaaaatgcctctgacaccagatttatatcttctgggcggcttctttaaatccagcccttcacccgccccctagagaagcagtgaaaccccttggctagtccagctggaagagctagaccgcaggagccgcgccgtcttcctaacctcgcctcggccttcgctccacagtggagagtgggagcctagctgtgcttgatgctgaatgcctgttttgagagtgtgagtgggatcatctacagtaaatacttgcaaagcatggcactgtggctctggggagctggtacgcctgtgctgtaaccatggtactcagtccttccaaagtgtttattaatcaagcacctgtcatgtgccattgagcccacgatggggaatgaggacagtccctgcccccatgaagcttgtgtcctgttgggaggacagacaggtggcccagcagttgcagcatggtgtgtgcacacgtttggctggtggaaccatgtttctaccactcatggtcaaaaaaagcccaccaaagtcctgggagttcacatctgtgtgatgatacggcaacattgtttgtaatggaaagactggacacccccagtgcccatcagtgggggagtcattaaataaactatggtatgtgcacataa

SEQ ID NO: 110130 - DNA, 3399 bp, Homo sapiens
  Payload ID: 1618
  Gene Symbol: ABCB9
  Gene Name: ATP-binding cassette, sub-family B (MDR/TAP), member 9
  Uniprot ID: Q9NP78
  ENST ID: ENST00000346530
  CDS Start-End: 311-2482
gtcactgaggccccgccccgtccatcagcctgtctcaacgcacgccagtctcagctccgaccttgcagcggcgcagcgcgggtgggaggcggggaggagcagcgggaagagcggagcgaggaccgcgtccggcgcagtcttcaatgagcagcgcggaaactgcaccccagacccgagcctgctgcgcgccccctcccagagctcacctggtgccaggtaacaggcctggcctcgccctgtggatgatgatggccttgcccccgtgagctacaacctggccttcagcacccgcccacctccaaccagcaggatgcggctgtggaaggcggtggtggtgactttggccttcatgagtgtggacatctgcgtgaccacggccatctatgtcttcagccacctggaccgcagcctcctggaggacatccgccacttcaacatctttgactcggtgctggatctctgggcagcctgcctgtaccgcagctgcctgctgctgggagccaccattggtgtggccaagaacagtgcgctggggccccggcggctgcgggcctcgtggctggtcatcaccctcgtgtgcctcttcgtgggcatctatgccatggtgaagctgctgctcttctcagaggtgcgcaggcccatccgggacccctggttttgggccctgttcgtgtggacgtacatttcactcggcgcatccttcctgctctggtggctgctgtccaccgtgcggccaggcacccaggccctggagccaggggcggccaccgaggctgagggcttccctgggagcggccggccaccgcccgagcaggcgtctggggccacgctgcagaagctgctctcctacaccaagcccgacgtggccttcctcgtggccgcctccttcttcctcatcgtggcagctctgggagagaccttcctgccctactacacgggccgcgccattgatggcatcgtcatccagaaaagcatggatcagttcagcacggctgtcgtcatcgtgtgcctgctggccattggcagctcatttgccgcaggtattcggggcggcatttttaccctcatatttgccagactgaacattcgccttcgaaactgtctcttccgctcactggtgtcccaggagacaagcttctttgatgagaaccgcacaggggacctcatctcccgcctgacctcggacaccaccatggtcagcgacctggtctcccagaacatcaatgtcttcctgcggaacacagtcaaggtcacgggcgtggtggtcttcatgttcagcctctcatggcagctctccttggtcaccttcatgggcttccccatcatcatgatggtgtccaacatctacggcaagtactacaagaggctctccaaagaggtccagaatgccctggccagagcgagcaacacggcggaggagaccatcagtgccatgaagactgtccggagcttcgccaatgaggaggaggaggcagaggtgtacctgcggaagctgcagcaggtgtacaagctgaacaggaaggaggcagctgcctacatgtactacgtctggggcagcgggtccgtgggctccgtctacagtggcctgatgcagggagtgggggctgctgagaaggtgttcgagttcatcgaccggcagccgaccatggtgcacgatggcagcttggcccccgaccacctggagggccgggtggactttgagaatgtgaccttcacctaccgcactcggccccacacccaggtcctgcagaatgtctccttcagcctgtcccccggcaaggtgacggccctggtggggccctcgggcagtgggaagagctcctgtgtcaacatcctggagaacttctaccccctggaggggggccgggtgctgctggacggcaagcccatcagcgcctacgaccacaagtacttgcaccgtgtgatctccctggtgagccaggagcccgtgctgttcgcccgctccatcacggataacatctcctacggcctgcccactgtgcctttcgagatggtggtggaggccgcacagaaggccaatgcccacggcttcatcatggaactccaggacggctacagcacagagacaggggagaagggcgcccagctgtcaggtggccagaagcagcgggtggccatggcccgggctctggtgcggaaccccccagtcctcatcctggatgaagccaccagcgctttggatgccgagagcgagtatctgatccagcaggccatccatggcaacctgcagaagcacacggtactcatcatcgcgcaccggctgagcaccgtggagcacgcgcacctcattgtggtgctggacaagggccgcgtagtgcagcagggcacccaccagcagctgctggcccagggcggcctctacgccaagctggtgcagcggcagatgctggggcttcagcccgccgcagacttcacagctggccacaacgagcctgtagccaacggcagtcacaaggcctgatggggggcccctgcttctcccggtggggcagaggacccggtgcctgcctggcagatgtgcccacggaggcccccagctgccctccgagcccaggcctgcagcactgaaagacgacctgccatgtcccatggatcaccgcttcctgcatcttgcccctggtccctgccccattcccagggcactccttacccctgctgccctgagccaacgccttcacggacctccctagcctcctaagcaaaggtagagctgcctttttaaacctaggtcttaccagggtttttactgtttggtttgaggcaccccagtcaactcctagatttcaaaaacctttttctaattgggagtaatggcgggcactttcaccaagatgttctagaaacttctgagccaggagtgaatggcccttccttagtagcctgggggatgtccagagactaggcctctcccctttacccctccagagaaggggcttccctgtcccggagggagacacggggaacgggattttccgtctctccctcttgccagctctgtgagtctggccagggcgggtagggagcgtggagggcatctgtctgccatcgcccgctgccaatctaagccagtctcactgtgaaccacacgaaacctcaactgggggagtgaggggctggccaggtctggaggggcctcaggggtgcccccagcccggcacccagcgctttcgcccctcgtccacccacccctggctggcagcctccctccccacacccgcccctgtgctctgctgtctggaggccacgtggatgttcatgagatgcattctcttctgtctttggtggatgggatggtggcaaagcccaggatctggctttgccagaggttgcaacatgttgagagaacccggtcaataaagtgtactacctcttacccct

SEQ ID NO: 110131 - DNA, 3517 bp, Homo sapiens
  Payload ID: 1618
  Gene Symbol: ABCB9
  Gene Name: ATP-binding cassette, sub-family B (MDR/TAP), member 9
  Uniprot ID: Q9NP78
  ENST ID: ENST00000280560
  CDS Start-End: 298-2598
cgccccgtccatcagcctgtctcaacgcacgccagtctcagctccgaccttgcagcggcgcagcgcgggtgggaggcggggaggagcagcgggaagagcggagcgaggaccgcgtccggcgcagtcttcaatgagcagcgcggaaactgcaccccagacccgagcctgctgcgcgccccctcccagagctcacctggtgccaggtaacaggcctggcctcgccctgtggatgatgatggccttgcccccgtgagctacaacctggccttcagcacccgcccacctccaaccagcaggatgcggctgtggaaggcggtggtggtgactttggccttcatgagtgtggacatctgcgtgaccacggccatctatgtcttcagccacctggaccgcagcctcctggaggacatccgccacttcaacatctttgactcggtgctggatctctgggcagcctgcctgtaccgcagctgcctgctgctgggagccaccattggtgtggccaagaacagtgcgctggggccccggcggctgcgggcctcgtggctggtcatcaccctcgtgtgcctcttcgtgggcatctatgccatggtgaagctgctgctcttctcagaggtgcgcaggcccatccgggacccctggttttgggccctgttcgtgtggacgtacatttcactcggcgcatccttcctgctctggtggctgctgtccaccgtgcggccaggcacccaggccctggagccaggggcggccaccgaggctgagggcttccctgggagcggccggccaccgcccgagcaggcgtctggggccacgctgcagaagctgctctcctacaccaagcccgacgtggccttcctcgtggccgcctccttcttcctcatcgtggcagctctgggagagaccttcctgccctactacacgggccgcgccattgatggcatcgtcatccagaaaagcatggatcagttcagcacggctgtcgtcatcgtgtgcctgctggccattggcagctcatttgccgcaggtattcggggcggcatttttaccctcatatttgccagactgaacattcgccttcgaaactgtctcttccgctcactggtgtcccaggagacaagcttctttgatgagaaccgcacaggggacctcatctcccgcctgacctcggacaccaccatggtcagcgacctggtctcccagaacatcaatgtcttcctgcggaacacagtcaaggtcacgggcgtggtggtcttcatgttcagcctctcatggcagctctccttggtcaccttcatgggcttccccatcatcatgatggtgtccaacatctacggcaagtactacaagaggctctccaaagaggtccagaatgccctggccagagcgagcaacacggcggaggagaccatcagtgccatgaagactgtccggagcttcgccaatgaggaggaggaggcagaggtgtacctgcggaagctgcagcaggtgtacaagctgaacaggaaggaggcagctgcctacatgtactacgtctggggcagcgggctcacactgctggtggtccaggtcagcatcctctactacgggggccaccttgtcatctcaggccagatgaccagcggcaacctcatcgccttcatcatctacgagtttgtcctgggagattgtatggagtccgtgggctccgtctacagtggcctgatgcagggagtgggggctgctgagaaggtgttcgagttcatcgaccggcagccgaccatggtgcacgatggcagcttggcccccgaccacctggagggccgggtggactttgagaatgtgaccttcacctaccgcactcggccccacacccaggtcctgcagaatgtctccttcagcctgtcccccggcaaggtgacggccctggtggggccctcgggcagtgggaagagctcctgtgtcaacatcctggagaacttctaccccctggaggggggccgggtgctgctggacggcaagcccatcagcgcctacgaccacaagtacttgcaccgtgtgatctccctggtgagccaggagcccgtgctgttcgcccgctccatcacggataacatctcctacggcctgcccactgtgcctttcgagatggtggtggaggccgcacagaaggccaatgcccacggcttcatcatggaactccaggacggctacagcacagagacaggggagaagggcgcccagctgtcaggtggccagaagcagcgggtggccatggcccgggctctggtgcggaaccccccagtcctcatcctggatgaagccaccagcgctttggatgccgagagcgagtatctgatccagcaggccatccatggcaacctgcagaagcacacggtactcatcatcgcgcaccggctgagcaccgtggagcacgcgcacctcattgtggtgctggacaagggccgcgtagtgcagcagggcacccaccagcagctgctggcccagggcggcctctacgccaagctggtgcagcggcagatgctggggcttcagcccgccgcagacttcacagctggccacaacgagcctgtagccaacggcagtcacaaggcctgatggggggcccctgcttctcccggtggggcagaggacccggtgcctgcctggcagatgtgcccacggaggcccccagctgccctccgagcccaggcctgcagcactgaaagacgacctgccatgtcccatggatcaccgcttcctgcatcttgcccctggtccctgccccattcccagggcactccttacccctgctgccctgagccaacgccttcacggacctccctagcctcctaagcaaaggtagagctgcctttttaaacctaggtcttaccagggtttttactgtttggtttgaggcaccccagtcaactcctagatttcaaaaacctttttctaattgggagtaatggcgggcactttcaccaagatgttctagaaacttctgagccaggagtgaatggcccttccttagtagcctgggggatgtccagagactaggcctctcccctttacccctccagagaaggggcttccctgtcccggagggagacacggggaacgggattttccgtctctccctcttgccagctctgtgagtctggccagggcgggtagggagcgtggagggcatctgtctgccatcgcccgctgccaatctaagccagtctcactgtgaaccacacgaaacctcaactgggggagtgaggggctggccaggtctggaggggcctcaggggtgcccccagcccggcacccagcgctttcgcccctcgtccacccacccctggctggcagcctccctccccacacccgcccctgtgctctgctgtctggaggccacgtggatgttcatgagatgcattctcttctgtctttggtggatgggatggtggcaaagcccaggatctggctttgccagaggttgcaacatgttgagagaacccggtcaataaagtgtactacctcttacccctaa

SEQ ID NO: 110132 - DNA, 3791 bp, Homo sapiens
  Payload ID: 1618
  Gene Symbol: ABCB9
  Gene Name: ATP-binding cassette, sub-family B (MDR/TAP), member 9
  Uniprot ID: Q9NP78
  ENST ID: ENST00000392439
  CDS Start-End: 579-2879
cacgcccccaaccgcgggaggcgcggaaccagcggccaaggggccgctctaagttcccaagggcggaaaaggacgaagacgcacctcgccaggaaacggtctgcggagaaagatgctcctgggccgggttgggaccggcggcctcctcgttccgcctcccagttttcccactacgaggcagggactaatggctccactttacagacagctgaactgggtcgtgccttcacaggacggggagaggaagggactcggagccccaaggcctttgacttaaacgccgacccaccccccgccgtctgcccggagctcgtggagaaccagccgagctgaggacagtttaaagagctcggaggtccgactagttcccgctggtgcttcaatcatccagccctgtacgtttcagtttggatttagcatctaccccgggtccctgcctggcgcttccggtccctccgccacagtctgttggattacctcagattgccccagcctggcctcgccctgtggatgatgatggccttgcccccgtgagctacaacctggccttcagcacccgcccacctccaaccagcaggatgcggctgtggaaggcggtggtggtgactttggccttcatgagtgtggacatctgcgtgaccacggccatctatgtcttcagccacctggaccgcagcctcctggaggacatccgccacttcaacatctttgactcggtgctggatctctgggcagcctgcctgtaccgcagctgcctgctgctgggagccaccattggtgtggccaagaacagtgcgctggggccccggcggctgcgggcctcgtggctggtcatcaccctcgtgtgcctcttcgtgggcatctatgccatggtgaagctgctgctcttctcagaggtgcgcaggcccatccgggacccctggttttgggccctgttcgtgtggacgtacatttcactcggcgcatccttcctgctctggtggctgctgtccaccgtgcggccaggcacccaggccctggagccaggggcggccaccgaggctgagggcttccctgggagcggccggccaccgcccgagcaggcgtctggggccacgctgcagaagctgctctcctacaccaagcccgacgtggccttcctcgtggccgcctccttcttcctcatcgtggcagctctgggagagaccttcctgccctactacacgggccgcgccattgatggcatcgtcatccagaaaagcatggatcagttcagcacggctgtcgtcatcgtgtgcctgctggccattggcagctcatttgccgcaggtattcggggcggcatttttaccctcatatttgccagactgaacattcgccttcgaaactgtctcttccgctcactggtgtcccaggagacaagcttctttgatgagaaccgcacaggggacctcatctcccgcctgacctcggacaccaccatggtcagcgacctggtctcccagaacatcaatgtcttcctgcggaacacagtcaaggtcacgggcgtggtggtcttcatgttcagcctctcatggcagctctccttggtcaccttcatgggcttccccatcatcatgatggtgtccaacatctacggcaagtactacaagaggctctccaaagaggtccagaatgccctggccagagcgagcaacacggcggaggagaccatcagtgccatgaagactgtccggagcttcgccaatgaggaggaggaggcagaggtgtacctgcggaagctgcagcaggtgtacaagctgaacaggaaggaggcagctgcctacatgtactacgtctggggcagcgggctcacactgctggtggtccaggtcagcatcctctactacgggggccaccttgtcatctcaggccagatgaccagcggcaacctcatcgccttcatcatctacgagtttgtcctgggagattgtatggagtccgtgggctccgtctacagtggcctgatgcagggagtgggggctgctgagaaggtgttcgagttcatcgaccggcagccgaccatggtgcacgatggcagcttggcccccgaccacctggagggccgggtggactttgagaatgtgaccttcacctaccgcactcggccccacacccaggtcctgcagaatgtctccttcagcctgtcccccggcaaggtgacggccctggtggggccctcgggcagtgggaagagctcctgtgtcaacatcctggagaacttctaccccctggaggggggccgggtgctgctggacggcaagcccatcagcgcctacgaccacaagtacttgcaccgtgtgatctccctggtgagccaggagcccgtgctgttcgcccgctccatcacggataacatctcctacggcctgcccactgtgcctttcgagatggtggtggaggccgcacagaaggccaatgcccacggcttcatcatggaactccaggacggctacagcacagagacaggggagaagggcgcccagctgtcaggtggccagaagcagcgggtggccatggcccgggctctggtgcggaaccccccagtcctcatcctggatgaagccaccagcgctttggatgccgagagcgagtatctgatccagcaggccatccatggcaacctgcagaagcacacggtactcatcatcgcgcaccggctgagcaccgtggagcacgcgcacctcattgtggtgctggacaagggccgcgtagtgcagcagggcacccaccagcagctgctggcccagggcggcctctacgccaagctggtgcagcggcagatgctggggcttcagcccgccgcagacttcacagctggccacaacgagcctgtagccaacggcagtcacaaggcctgatggggggcccctgcttctcccggtggggcagaggacccggtgcctgcctggcagatgtgcccacggaggcccccagctgccctccgagcccaggcctgcagcactgaaagacgacctgccatgtcccatggatcaccgcttcctgcatcttgcccctggtccctgccccattcccagggcactccttacccctgctgccctgagccaacgccttcacggacctccctagcctcctaagcaaaggtagagctgcctttttaaacctaggtcttaccagggtttttactgtttggtttgaggcaccccagtcaactcctagatttcaaaaacctttttctaattgggagtaatggcgggcactttcaccaagatgttctagaaacttctgagccaggagtgaatggcccttccttagtagcctgggggatgtccagagactaggcctctcccctttacccctccagagaaggggcttccctgtcccggagggagacacggggaacgggattttccgtctctccctcttgccagctctgtgagtctggccagggcgggtagggagcgtggagggcatctgtctgccatcgcccgctgccaatctaagccagtctcactgtgaaccacacgaaacctcaactgggggagtgaggggctggccaggtctggaggggcctcaggggtgcccccagcccggcacccagcgctttcgcccctcgtccacccacccctggctggcagcctccctccccacacccgcccctgtgctctgctgtctggaggccacgtggatgttcatgagatgcattctcttctgtctttggtggatgggatggtggcaaagcccaggatctggctttgccagaggttgcaacatgttgagagaacccggtcaataaagtgtactacctctta

SEQ ID NO: 110133 - DNA, 3799 bp, Homo sapiens
  Payload ID: 1618
  Gene Symbol: ABCB9
  Gene Name: ATP-binding cassette, sub-family B (MDR/TAP), member 9
  ENST ID: ENST00000442028
  CDS Start-End: 579-2888
cacgcccccaaccgcgggaggcgcggaaccagcggccaaggggccgctctaagttcccaagggcggaaaaggacgaagacgcacctcgccaggaaacggtctgcggagaaagatgctcctgggccgggttgggaccggcggcctcctcgttccgcctcccagttttcccactacgaggcagggactaatggctccactttacagacagctgaactgggtcgtgccttcacaggacggggagaggaagggactcggagccccaaggcctttgacttaaacgccgacccaccccccgccgtctgcccggagctcgtggagaaccagccgagctgaggacagtttaaagagctcggaggtccgactagttcccgctggtgcttcaatcatccagccctgtacgtttcagtttggatttagcatctaccccgggtccctgcctggcgcttccggtccctccgccacagtctgttggattacctcagattgccccagcctggcctcgccctgtggatgatgatggccttgcccccgtgagctacaacctggccttcagcacccgcccacctccaaccagcaggatgcggctgtggaaggcggtggtggtgactttggccttcatgagtgtggacatctgcgtgaccacggccatctatgtcttcagccacctggaccgcagcctcctggaggacatccgccacttcaacatctttgactcggtgctggatctctgggcagcctgcctgtaccgcagctgcctgctgctgggagccaccattggtgtggccaagaacagtgcgctggggccccggcggctgcgggcctcgtggctggtcatcaccctcgtgtgcctcttcgtgggcatctatgccatggtgaagctgctgctcttctcagaggtgcgcaggcccatccgggacccctggttttgggccctgttcgtgtggacgtacatttcactcggcgcatccttcctgctctggtggctgctgtccaccgtgcggccaggcacccaggccctggagccaggggcggccaccgaggctgagggcttccctgggagcggccggccaccgcccgagcaggcgtctggggccacgctgcagaagctgctctcctacaccaagcccgacgtggccttcctcgtggccgcctccttcttcctcatcgtggcagctctgggagagaccttcctgccctactacacgggccgcgccattgatggcatcgtcatccagaaaagcatggatcagttcagcacggctgtcgtcatcgtgtgcctgctggccattggcagctcatttgccgcaggtattcggggcggcatttttaccctcatatttgccagactgaacattcgccttcgaaactgtctcttccgctcactggtgtcccaggagacaagcttctttgatgagaaccgcacaggggacctcatctcccgcctgacctcggacaccaccatggtcagcgacctggtctcccagaacatcaatgtcttcctgcggaacacagtcaaggtcacgggcgtggtggtcttcatgttcagcctctcatggcagctctccttggtcaccttcatgggcttccccatcatcatgatggtgtccaacatctacggcaagtactacaagaggctctccaaagaggtccagaatgccctggccagagcgagcaacacggcggaggagaccatcagtgccatgaagactgtccggagcttcgccaatgaggaggaggaggcagaggtgtacctgcggaagctgcagcaggtgtacaagctgaacaggaaggaggcagctgcctacatgtactacgtctggggcagcgggctcacactgctggtggtccaggtcagcatcctctactacgggggccaccttgtcatctcaggccagatgaccagcggcaacctcatcgccttcatcatctacgagtttgtcctgggagattgtatggagtccgtgggctccgtctacagtggcctgatgcagggagtgggggctgctgagaaggtgttcgagttcatcgaccggcagccgaccatggtgcacgatggcagcttggcccccgaccacctggagggccgggtggactttgagaatgtgaccttcacctaccgcactcggccccacacccaggtcctgcagaatgtctccttcagcctgtcccccggcaaggtgacggccctggtggggccctcgggcagtgggaagagctcctgtgtcaacatcctggagaacttctaccccctggaggggggccgggtgctgctggacggcaagcccatcagcgcctacgaccacaagtacttgcaccgtgtgatctccctggtgagccaggagcccgtgctgttcgcccgctccatcacggataacatctcctacggcctgcccactgtgcctttcgagatggtggtggaggccgcacagaaggccaatgcccacggcttcatcatggaactccaggacggctacagcacagagacaggggagaagggcgcccagctgtcaggtggccagaagcagcgggtggccatggcccgggctctggtgcggaaccccccagtcctcatcctggatgaagccaccagcgctttggatgccgagagcgagtatctgtccccgcagatccagcaggccatccatggcaacctgcagaagcacacggtactcatcatcgcgcaccggctgagcaccgtggagcacgcgcacctcattgtggtgctggacaagggccgcgtagtgcagcagggcacccaccagcagctgctggcccagggcggcctctacgccaagctggtgcagcggcagatgctggggcttcagcccgccgcagacttcacagctggccacaacgagcctgtagccaacggcagtcacaaggcctgatggggggcccctgcttctcccggtggggcagaggacccggtgcctgcctggcagatgtgcccacggaggcccccagctgccctccgagcccaggcctgcagcactgaaagacgacctgccatgtcccatggatcaccgcttcctgcatcttgcccctggtccctgccccattcccagggcactccttacccctgctgccctgagccaacgccttcacggacctccctagcctcctaagcaaaggtagagctgcctttttaaacctaggtcttaccagggtttttactgtttggtttgaggcaccccagtcaactcctagatttcaaaaacctttttctaattgggagtaatggcgggcactttcaccaagatgttctagaaacttctgagccaggagtgaatggcccttccttagtagcctgggggatgtccagagactaggcctctcccctttacccctccagagaaggggcttccctgtcccggagggagacacggggaacgggattttccgtctctccctcttgccagctctgtgagtctggccagggcgggtagggagcgtggagggcatctgtctgccatcgcccgctgccaatctaagccagtctcactgtgaaccacacgaaacctcaactgggggagtgaggggctggccaggtctggaggggcctcaggggtgcccccagcccggcacccagcgctttcgcccctcgtccacccacccctggctggcagcctccctccccacacccgcccctgtgctctgctgtctggaggccacgtggatgttcatgagatgcattctcttctgtctttggtggatgggatggtggcaaagcccaggatctggctttgccagaggttgcaacatgttgagagaacccggtcaataaagtgtactacctctt

SEQ ID NO: 110134 - DNA, 2134 bp, Homo sapiens
  Payload ID: 1618
  Gene Symbol: ABCB9
  Gene Name: ATP-binding cassette, sub-family B (MDR/TAP), member 9
  ENST ID: ENST00000426173
  CDS Start-End: 1-438
gggcggccaccgaggctgagggcttccctgggagcggccggccaccgcccgagcaggcgtctggggccacgctgcagaagctgctctcctacaccaagcccgacgtggccttcctcgtggccgcctccttcttcctcatcgtggcagctctgggagagaccttcctgccctactacacgggccgcgccattgatggcatcgtcatccagaaaagcatggatcagttcagcacggctgtcgtcatcgtgtgcctgctggccattggcaggtattcggggcggcatttttaccctcatatttgccagactgaacattcgccttcgaaactgtctcttccgctcactggtgtcccaggagacaagcttctttgatgagaaccgcacagcctctcatggcagctctccttggtcaccttcatgggcttccccatcatcatgatggtgtccaacatctacggcaagtactacaagaggctctccaaagaggtccagaatgccctggccagagcgagcaacacggcggaggagaccatcagtgccatgaagactgtccggagcttcgccaatgaggaggaggaggcagaggtgtacctgcggaagctgcagcaggtgtacaagctgaacaggaaggaggcagctgcctacatgtactacgtctggggcagcgggctcacactgctggtggtccaggtcagcatcctctactacgggggccaccttgtcatctcaggccagatgaccagcggcaacctcatcgccttcatcatctacgagtttgtcctgggagattgtatggagaatgtctccttcagcctgtcccccggcaaggtgacggccctggtggggccctcgggcagtgggaagagctcctgtgtcaacatcctggagaacttctaccccctggaggggggccgggtgctgctggacggcaagcccatcagcgcctacgaccacaagtacttgcaccgtgtgatctccctggtgagccaggagcccgtgctgttcgcccgctccatcacggataacatctcctacggcctgcccactgtgcctttcgagatggtggtggaggccgcacagaaggccaatgcccacggcttcatcatggaactccaggacggctacagcacagagacaggggagaagggcgcccagctgtcaggtggccagaagcagcgggtggccatggcccgggctctggtgcggaaccccccagtcctcatcctggatgaagccaccagcgctttggatgccgagagcgagtatctggtgagtcacagggtggtgggcaatgcgggggcaggagcggctccaggtggccagagcccccatcgcccagcagatggatgctgagaagagacgggccccaggagctctcccagactatcagcctcctgggctggtgaattcctggtgttgagagtggggagccaggagccactctggacccagcctccaggctccaggcagagctgtatggtgtggggcaagagaaggcatcagaatggggagacctgggtcatgagtggtggcttacacctgtaatcccagcactttgggaggccgaagcaggtggatcacctgaggtcaggagttgcagaccagcctggccaacatggtgaaaccccatctctactagaaatacaaaaactagccaggtgtggtagcacatgcctataatcccagctacttgggaggctgaggcaggagaattgcttgaacctgggaagtggaggttgcagtcagccgagattgtgccactgcactccagcctgggcgacagagccagactccatctggctcaaacaaacagacaaaacaaaacaaaataaaataggcccagtatgatggctcatgcctataatcccagcactttgggaggccaaggcaggtggatcacttgaggtccggagttcgagacaagcctggtcaatacagtgaaaccctgtctctactaaaaatacaaaaattagctgggcatggtggtgcatgcctgtaaccccagctactcgggaggctgaggcaggagactcacttgaacccgggagatggaggttgcagtgagctgagattgtgccactgcactctagcctgggcgacagagtgagactccatctacaaaaaaaaaaaaaaaa

SEQ ID NO: 110135 - DNA, 2591 bp, Homo sapiens
  Payload ID: 1618
  Gene Symbol: ABCB9
  Gene Name: ATP-binding cassette, sub-family B (MDR/TAP), member 9
  ENST ID: ENST00000537276
  CDS Start-End: 204-1022
agagcggagcgaggaccgcgtccggcgcagtcttcaatgagcagcgcggaaactgcaccccagacccgagcctgctgcgcgccccctcccagagctcacctggtgccaggtaacaggcctggcctcgccctgtggatgatgatggccttgcccccgtgagctacaacctggccttcagcacccgcccacctccaaccagcaggatgcggctgtggaaggcggtggtggtgactttggccttcatgagtgtggacatctgcgtgaccacggccatctatgtcttcagccacctggaccgcagcctcctggaggacatccgccacttcaacatctttgactcggtgctggatctctgggcagcctgcctgtaccgcagctgcctgctgctgggagccaccattggtgtggccaagaacagtgcgctggggccccggcggctgcgggcctcgtggctggtcatcaccctcgtgtgcctcttcgtgggcatctatgccatggtgaagctgctgctcttctcagaggtgcgcaggcccatccgggacccctggttttgggccctgttcgtgtggacgtacatttcactcggcgcatccttcctgctctggtggctgctgtccaccgtgcggccaggcacccaggccctggagccaggggcggccaccgaggctgagggcttccctgggagcggccggccaccgcccgagcaggcgtctggggccacgctgcagaagctgctctcctacaccaagcccgacgtggccttcctcgtggccgcctccttcttcctcatcgtggcagctctgggagagaccttcctgccctactacacgggccgcgccattgatggcatcgtcatccagaaaagcatggatcagttcagcacggctgtcgtcatcgtgtgcctgctggccattggcaggtattcggggcggcatttttaccctcatatttgccagactgaacattcgccttcgaaactgtctcttccgctcactggtgtcccaggagacaagcttctttgatgagaaccgcacaggggacctcatctcccgcctgacctcggacaccaccatggtcagcgacctggtctcccagaacatcaatgtcttcctgcggaacacagtcaaggtcacgggcgtggtggtcttcatgttcagcctctcatggcagctctccttggtcaccttcatgggcttccccatcatcatgatggtgtccaacatctacggcaagtactacaagaggctctccaaagaggtccagaatgccctggccagagcgagcaacacggcggaggagaccatcagtgccatgaagactgtccggagcttcgccaatgaggaggaggaggcagaggtgtacctgcggaagctgcagcaggtgtacaagctgaacaggaaggaggcagctgcctacatgtactacgtctggggcagcgggctcacactgctggtggtccaggtcagcatcctctactacgggggccaccttgtcatctcaggccagatgaccagcggcaacctcatcgccttcatcatctacgagtttgtcctgggagattgtatggagaatgtctccttcagcctgtcccccggcaaggtgacggccctggtggggccctcgggcagtgggaagagctcctgtgtcaacatcctggagaacttctaccccctggaggggggccgggtgctgctggacggcaagcccatcagcgcctacgaccacaagtacttgcaccgtgtgatctccctggtgagccaggagcccgtgctgttcgcccgctccatcacggataacatctcctacggcctgcccactgtgcctttcgagatggtggtggaggccgcacagaaggccaatgcccacggcttcatcatggaactccaggacggctacagcacagagacaggggagaagggcgcccagctgtcaggtggccagaagcagcgggtggccatggcccgggctctggtgcggaaccccccagtcctcatcctggatgaagccaccagcgctttggatgccgagagcgagtatctggtgagtcacagggtggtgggcaatgcgggggcaggagcggctccaggtggccagagcccccatcgcccagcagatggatgctgagaagagacgggccccaggagctctcccagactatcagcctcctgggctggtgaattcctggtgttgagagtggggagccaggagccactctggacccagcctccaggctccaggcagagctgtatggtgtggggcaagagaaggcatcagaatggggagacctgggtcatgagtggtggcttacacctgtaatcccagcactttgggaggccgaagcaggtggatcacctgaggtcaggagttgcagaccagcctggccaacatggtgaaaccccatctctactagaaatacaaaaactagccaggtgtggtagcacatgcctataatcccagctacttgggaggctgaggcaggagaattgcttgaacctgggaagtggaggttgcagtcagccgagattgtgccactgcactccagcctgggcgacagagccagactccatctggctcaaacaaacagacaaaac

SEQ ID NO: 110136 - DNA, 2108 bp, Homo sapiens
  Payload ID: 1618
  Gene Symbol: ABCB9
  Gene Name: ATP-binding cassette, sub-family B (MDR/TAP), member 9
  ENST ID: ENST00000541424
  CDS Start-End: 1672-2108
acaaaggtctctgctagcggctcaatcatgcaggtccttgtgggctattgtaaagactttggcttttaccatctcactggatgagaagggggatttggactgttttgagccaaggagcaacaagatctgaagttagttccaacaggatcctgccttctactgtgtggacaggctgatgtgagcaaagttgagagcaggctactgagatagtcccagtgaggttaatgacttggaccagggttggggcagtagaggcagtgaaagtggtcaggttctggaaatggtctgagtatttgctggtgcattggagagtttcacgtaattcttgtgcagattcagcaagagagtttgccggcatgctttgcacagcccctggtacccagtaaggcgattattagcattggtgcttgctggaatcagatattccagaatattctgtcacagctcatcgttgccctcttcttttctgtgggtaaactgaggcagaaactcaggctgggtggaactctgcagcctcagctggagacctcgtctggccaaggactgtggggacacaggccctctaggctgccacctcatggtcccagcagagggcaccagaactgcacagaaagtctcactacccaagtgtctgagccaggccagactgtgctagccagacctgcccggggttcattcactgacctttattgagcacctactgtatgcccagccccaaacctggctctgctcatggaaagaacttcagtggaaacaggtcctgggatgaacaagggcctggcctggcctggtgatgccactatttccttaagaggagagtggacattccggattattgtcgggggagtctcatttctgctgctgtaacaaaataccacagactgggtcatttagaaaccatagaaactgatttcgtactgttctagaggctgggaagtcccagatcaaggtgccagcaggtttggtgtcgtgagggccactctctgcttccaagatggtccctccttgctgtgtcctctggaggggaagactgctgtgtcctcacgctgcagaaggtggaagggcgagagatggcaaaccaggcttacaagccctttgaaaagggccctcatcccatcctggagagctctgccctatcacattggcgattatgtttcaatatgtaaattttgggagatgcattcagaccacaggaggaagggaaaagaaagagcccccaggttgaaagccagtttaggtttgagtcccagcctttccccttgctgtgtgacctggagtaaattcctcagcctctgtgagtctcccattccaccccaggattgttgtgaaaacacagtaaggcaagcgggtaagaaagcacccagcaaggtgtcaagtgccccaccaggaggggtggggtggcaatttccagcattgcttggaaccagaatagcaacgtcttctgaggttccagaatttggactctgaacccattgagaagaatgaaatcaactttggcgtcaatcagccactgattgccatgtggcctggacgagtcatctcattcaacttcactttcagccggacgctgtgactcaggcctgtaaccccagcactttgggaagctgaggagagaccttcctgccctactacacgggccgcgccattgatggcatcgtcatccagaaaagcatggatcagttcagcacggctgtcgtcatcgtgtgcctgctggccattggcagctcatttgccgcaggtattcggggcggcatttttaccctcatatttgccagactgaacattcgccttcgaaactgtctcttccgctcactggtgtcccaggagacaagcttctttgatgagaaccgcacaggggacctcatctcccgcctgacctcggacaccaccatggtcagcgacctggtctcccagaacatcaatgtcttcctgcggaacacagtcaaggtcacgggcgtggtggtcttcatgttcagcctctcatggcagctctccttggtcaccttcatgggcttccccatcatcatgatggtgtccaacatctacggcaagtactacaagaggctctccaaagaggtccagaatgccctggccagagcgagcaacac

SEQ ID NO: 110137 - DNA, 1104 bp, Homo sapiens
  Payload ID: 1618
  Gene Symbol: ABCB9
  Gene Name: ATP-binding cassette, sub-family B (MDR/TAP), member 9
  ENST ID: ENST00000542448
  CDS Start-End: 325-1104
cagcaccgtgccctatccttcaggagctgaaaccattgccccaagagcctctctggagttgactacctgagtgtgtcaaattgagccagaaggggatgggggagaaagggctagatcttgtctttttgtcctaggaacctcttgcatatagctggtgccagcgaagggtggaaaaacccagagaggcctgggggctccagtacatagtgaggctgttttggggtcttctccttcttgtccccctcctgtccatagaggctctccaaagaggtccagaatgccctggccagagcgagcaacacggcggaggagaccatcagtgccatgaagactgtccggagcttcgccaatgaggaggaggaggcagaggtgtacctgcggaagctgcagcaggtgtacaagctgaacaggaaggaggcagctgcctacatgtactacgtctggggcagcgggctcacactgctggtggtccaggtcagcatcctctactacgggggccaccttgtcatctcaggccagatgaccagcggcaacctcatcgccttcatcatctacgagtttgtcctgggagattgtatggagtccgtgggctccgtctacagtggcctgatgcagggagtgggggctgctgagaaggtgttcgagttcatcgaccggcagccgaccatggtgcacgatggcagcttggcccccgaccacctggagggccgggtggactttgagaatgtgaccttcacctaccgcactcggccccacacccaggtcctgcagaatgtctccttcagcctgtcccccggcaaggtgacggccctggtggggccctcgggcagtgggaagagctcctgtgtcaacatcctggagaacttctaccccctggaggggggccgggtgctgctggacggcaagcccatcagcgcctacgaccacaagtacttgcaccgtgtgatctccctggtgagccaggagcccgtgctgttcgcccgctccatcacggataacatctcctacggcctgcccactgtgcctttcgagatggtggtggaggccgcacagaaggccaatgcccacggcttcatcatggaactccaggacggctacagcaca

SEQ ID NO: 110138 - DNA, 6051 bp, Homo sapiens
  Payload ID: 1618
  Gene Symbol: ABCB9
  Gene Name: ATP-binding cassette, sub-family B (MDR/TAP), member 9
  Uniprot ID: Q9NP78
  ENST ID: ENST00000542678
  CDS Start-End: 2840-5140
gaagaggaggaggagctggatcttgttctcctccgggccttctgcttgcttctctctgtgatgcagggagaaggtgaggctggaaggccaggaggggaagaggtaaaccttcgtcccctgctctggcctggggcaggcacagaccggctacagggtgagcgcttcctgaggggctttccagaacagagatggagcttcccagaggagccccttcctggctcctgcggcgcctggccctcacatctcaggcccggctgcacagaggcatgactgagcgtccccgaccactgctcgcccgacttccccgggtagtaactgcgcctcctctccccgatgcctgtggtcctcaccctccgccccaggggccgtgctggccttgcgaccttgggatgtggaggccgagcagttcctcgaggtgtctttcctgctcttcttctttctcttttccgacccccgtccccgggaccggctgcgactcctcgagcgcttgcgggagccgacgtgagccatggcgccgcgggctggcgacgaagaagacgcgcttgagccgaagcccccaaggccggccgcgggcgggctccaagggtggctctagcggggccggggcctggcgacgcccagtacccgtcaccgtcccgggaaaatgagcgaccctcacccacccccagcgctggggaccccggttttctccgccgactccagtccccgcagcggtgcctgttaagggcccgccccgtgcccggaggccccacgcctgcgcacccggctccaaacccctgggaactggccgccgtccgccgcgagtggcgtctggggcgctttcccgcgctctcctaccctccagccccgcgcccttcgcggcctcgccgcctcaagggggcccccggggctgctccgttcccacctcgaccgccctgcgggccggacagcccgccccgcgccttctcgagaggaagcggcggcgaggaggcttccggccggggcgctgcgcgggaggctggccggctgggaagcgcggcgccgctgcctttcgttctgacgccccaggttccgtcccgggcgcgcccacctcccgcagaggcaagcaggggcgccggccctcgagctccgcagcccctcacgcctgtgtctgccgaagctgcgcccacttccaaggctgccctctcggcgcacgcccgcagcacccacgcccccggtgccctgggaagaaggcgaccctcgcgcgcgccgccctcctccccggctggtcctgccctctccatacgactgcgagctccagactgaggcgccctggtctttccgacgcgcccacccagtgactcagaggtcgcaaactcgtgtccgtaggggccagaaagatcttggcagtgagcgcgggcatggaccccaggcccatccggaaggaagccaggattctgctccagctgatacgtgcaacgtggcatggggctggtgccccaccttcccagggagaccaaactcaagactgcaatatggaagccccctgagtttcaaatgtgtaacccaaagcgtggctgtgcgcttcatccaatctcgggcccccaagttgcaactcttccacaatgacagccgcaaacacaaagggatcttgcaaagcactttatatacgtcagcgcatttgactcccaaaacagctctaggaggtaggtgctaaatgaggaaacgaaggcaccaaaaggtgaaggctcacctaaagccacacagctggaagtggcagaagcagaatgggaacccgggcagcctggttcctggccctgccattcacccctctgccatctagaagatgctactggtggcccacccgagtccactggggggtgatgcctgctgctgagggttcacatctgtgctctctggaggcttcccttggctactggaaggcaccctgccctggagataagtgtctgggaagttattcactcctctctggccccctcatccaggagccagtaaccggtggtgtgggcacactgtggtactgtgggctctgcctggagctctccgtggggccagctgaggctggacgtcctctgaagccacttccttgcccagctgctccctcccctcccctgcttccctgactccctcgctgaagccccattccagaccctgcttctgacaaacctgaactaaggcagcatctttgcccatagaatgacccagaagctggcacaccgttgagccaagaagtgcagtaggctgcggggattttatttctgcccccagaccaaggcaacggagccctcacctgcctgccacccccacactgggcccaagcaagctcaggtgagcgcacatacatccaccgtggcgggctcctctcgggtgaagccatcaccgaagccctcatcgtccaccaggtcgggctcacggcagcacatgggacagaggctgttgcgcacagcagaggctcggagccagacgacaaggttccaacgctcaccagtgcccaagggccgggctccatgcagctggccgccacggtggaggacaccctggcccaccacgtgctccacctccaggggctccgtcagggctgtgggtgcctgcagatggcacgactcaggcctgggcactcacagctgccccaggccctgccgcatgggtcacacactcacctggaagaggcccccaaaatacagggcgccccctgtgaagaccttgcccaaggccacattgagggtgagctcggcattatcatagtggcagcccagctccaggtcctggcccggcctggcctcgccctgtggatgatgatggccttgcccccgtgagctacaacctggccttcagcacccgcccacctccaaccagcaggatgcggctgtggaaggcggtggtggtgactttggccttcatgagtgtggacatctgcgtgaccacggccatctatgtcttcagccacctggaccgcagcctcctggaggacatccgccacttcaacatctttgactcggtgctggatctctgggcagcctgcctgtaccgcagctgcctgctgctgggagccaccattggtgtggccaagaacagtgcgctggggccccggcggctgcgggcctcgtggctggtcatcaccctcgtgtgcctcttcgtgggcatctatgccatggtgaagctgctgctcttctcagaggtgcgcaggcccatccgggacccctggttttgggccctgttcgtgtggacgtacatttcactcggcgcatccttcctgctctggtggctgctgtccaccgtgcggccaggcacccaggccctggagccaggggcggccaccgaggctgagggcttccctgggagcggccggccaccgcccgagcaggcgtctggggccacgctgcagaagctgctctcctacaccaagcccgacgtggccttcctcgtggccgcctccttcttcctcatcgtggcagctctgggagagaccttcctgccctactacacgggccgcgccattgatggcatcgtcatccagaaaagcatggatcagttcagcacggctgtcgtcatcgtgtgcctgctggccattggcagctcatttgccgcaggtattcggggcggcatttttaccctcatatttgccagactgaacattcgccttcgaaactgtctcttccgctcactggtgtcccaggagacaagcttctttgatgagaaccgcacaggggacctcatctcccgcctgacctcggacaccaccatggtcagcgacctggtctcccagaacatcaatgtcttcctgcggaacacagtcaaggtcacgggcgtggtggtcttcatgttcagcctctcatggcagctctccttggtcaccttcatgggcttccccatcatcatgatggtgtccaacatctacggcaagtactacaagaggctctccaaagaggtccagaatgccctggccagagcgagcaacacggcggaggagaccatcagtgccatgaagactgtccggagcttcgccaatgaggaggaggaggcagaggtgtacctgcggaagctgcagcaggtgtacaagctgaacaggaaggaggcagctgcctacatgtactacgtctggggcagcgggctcacactgctggtggtccaggtcagcatcctctactacgggggccaccttgtcatctcaggccagatgaccagcggcaacctcatcgccttcatcatctacgagtttgtcctgggagattgtatggagtccgtgggctccgtctacagtggcctgatgcagggagtgggggctgctgagaaggtgttcgagttcatcgaccggcagccgaccatggtgcacgatggcagcttggcccccgaccacctggagggccgggtggactttgagaatgtgaccttcacctaccgcactcggccccacacccaggtcctgcagaatgtctccttcagcctgtcccccggcaaggtgacggccctggtggggccctcgggcagtgggaagagctcctgtgtcaacatcctggagaacttctaccccctggaggggggccgggtgctgctggacggcaagcccatcagcgcctacgaccacaagtacttgcaccgtgtgatctccctggtgagccaggagcccgtgctgttcgcccgctccatcacggataacatctcctacggcctgcccactgtgcctttcgagatggtggtggaggccgcacagaaggccaatgcccacggcttcatcatggaactccaggacggctacagcacagagacaggggagaagggcgcccagctgtcaggtggccagaagcagcgggtggccatggcccgggctctggtgcggaaccccccagtcctcatcctggatgaagccaccagcgctttggatgccgagagcgagtatctgatccagcaggccatccatggcaacctgcagaagcacacggtactcatcatcgcgcaccggctgagcaccgtggagcacgcgcacctcattgtggtgctggacaagggccgcgtagtgcagcagggcacccaccagcagctgctggcccagggcggcctctacgccaagctggtgcagcggcagatgctggggcttcagcccgccgcagacttcacagctggccacaacgagcctgtagccaacggcagtcacaaggcctgatggggggcccctgcttctcccggtggggcagaggacccggtgcctgcctggcagatgtgcccacggaggcccccagctgccctccgagcccaggcctgcagcactgaaagacgacctgccatgtcccatggatcaccgcttcctgcatcttgcccctggtccctgccccattcccagggcactccttacccctgctgccctgagccaacgccttcacggacctccctagcctcctaagcaaaggtagagctgcctttttaaacctaggtcttaccagggtttttactgtttggtttgaggcaccccagtcaactcctagatttcaaaaacctttttctaattgggagtaatggcgggcactttcaccaagatgttctagaaacttctgagccaggagtgaatggcccttccttagtagcctgggggatgtccagagactaggcctctcccctttacccctccagagaaggggcttccctgtcccggagggagacacggggaacgggattttccgtctctccctcttgccagctctgtgagtctggccagggcgggtagggagcgtggagggcatctgtctgccatcgcccgctgccaatctaagccagtctcactgtgaaccacacgaaacctcaactgggggagtgaggggctggccaggtctggaggggcctcaggggtgcccccagcccggcacccagcgctttcgcccctcgtccacccacccctggctggcagcctccctccccacacccgcccctgtgctctgctgtctggaggccacgtggatgttcatgagatgcattctcttctgtctttggtggatgggatggtggcaaagcccaggatctggctttgccagaggttgcaacatgttgagagaacccggtcaataaagtgtactacctctt

SEQ ID NO: 110139 - DNA, 1066 bp, Homo sapiens
  Payload ID: 1618
  Gene Symbol: ABCB9
  Gene Name: ATP-binding cassette, sub-family B (MDR/TAP), member 9
  ENST ID: ENST00000540971
  CDS Start-End: 519-1066
cttgtctgtaaaatgggaacacggatagtagccaccccatggggtccttacacagctcttagcacaatgtccaacttaggtaagaagtgtctgcgctttcctgcccgccaccagccaggttgttatttccctagaagggaagaggagttaccccctctgccagtgacagggaggagacatgggtttgaagtctggctcagtcacggacaggctgtgtgactctacgggggccttcctgttctgagccccagcctcctccgctgtacagcgggatgtcatgaagcttaagcaagatgctgatgactgggattggctcagagtagccctcgaggggtatctgctcttctcccccaccccccaaccccgcccacaggtagggaggcccggcttcccagtgtctgtctcagaggccccttagcatcccccaccgccacccccaaggcccgggttgctgtggtgagagctgagccgcgtgtgttccaggggacctcatctcccgcctgacctcggacaccaccatggtcagcgacctggtctcccagaacatcaatgtcttcctgcggaacacagtcaaggtcacgggcgtggtggtcttcatgttcagcctctcatggcagctctccttggtcaccttcatgggcttccccatcatcatgatggtgtccaacatctacggcaagtactacaagaggctctccaaagaggtccagaatgccctggccagagcgagcaacacggcggaggagaccatcagtgccatgaagactgtccggagcttcgccaatgaggaggaggaggcagaggtgtacctgcggaagctgcagcaggtgtacaagctgaacaggaaggaggcagctgcctacatgtactacgtctggggcagcgggctcacactgctggtggtccaggtcagcatcctctactacgggggccaccttgtcatctcaggccagatgaccagcggcaacctcatcgccttcatcatctacgagtttgtcctgggagattgtatggagtccgtgggctccgtctacagtggcctgatgcagggagtgggggctgctga

SEQ ID NO: 110140 - DNA, 3330 bp, Homo sapiens
  Payload ID: 1618
  Gene Symbol: ABCB9
  Gene Name: ATP-binding cassette, sub-family B (MDR/TAP), member 9
  Uniprot ID: Q9NP78
  ENST ID: ENST00000540285
  CDS Start-End: 302-2413
gccccgccccgtccatcagcctgtctcaacgcacgccagtctcagctccgaccttgcagcggcgcagcgcgggtgggaggcggggaggagcagcgggaagagcggagcgaggaccgcgtccggcgcagtcttcaatgagcagcgcggaaactgcaccccagacccgagcctgctgcgcgccccctcccagagctcacctggtgccaggtaacaggcctggcctcgccctgtggatgatgatggccttgcccccgtgagctacaacctggccttcagcacccgcccacctccaaccagcaggatgcggctgtggaaggcggtggtggtgactttggccttcatgagtgtggacatctgcgtgaccacggccatctatgtcttcagccacctggaccgcagcctcctggaggacatccgccacttcaacatctttgactcggtgctggatctctgggcagcctgcctgtaccgcagctgcctgctgctgggagccaccattggtgtggccaagaacagtgcgctggggccccggcggctgcgggcctcgtggctggtcatcaccctcgtgtgcctcttcgtgggcatctatgccatggtgaagctgctgctcttctcagaggtgcgcaggcccatccgggacccctggttttgggccctgttcgtgtggacgtacatttcactcggcgcatccttcctgctctggtggctgctgtccaccgtgcggccaggcacccaggccctggagccaggggcggccaccgaggctgagggcttccctgggagcggccggccaccgcccgagcaggcgtctggggccacgctgcagaagctgctctcctacaccaagcccgacgtggccttcctcgtggccgcctccttcttcctcatcgtggcagctctgggagagaccttcctgccctactacacgggccgcgccattgatggcatcgtcatccagaaaagcatggatcagttcagcacggctgtcgtcatcgtgtgcctgctggccattggcagctcatttgccgcaggtattcggggcggcatttttaccctcatatttgccagactgaacattcgccttcgaaactgtctcttccgctcactggtgtcccaggagacaagcttctttgatgagaaccgcacaggggacctcatctcccgcctgacctcggacaccaccatggtcagcgacctggtctcccagaacatcaatgtcttcctgcggaacacagtcaaggtcacgggcgtggtggtcttcatgttcagcctctcatggcagctctccttggtcaccttcatgggcttccccatcatcatgatggtgtccaacatctacggcaagtactacaagaggctctccaaagaggtccagaatgccctggccagagcgagcaacacggcggaggagaccatcagtgccatgaagactgtccggagcttcgccaatgaggaggaggaggcagaggtgtacctgcggaagctgcagcaggtgtacaagctgaacaggaaggaggcagctgcctacatgtactacgtctggggcagcgggctcacactgctggtggtccaggtcagcatcctctactacgggggccaccttgtcatctcaggccagatgaccagcggcaacctcatcgccttcatcatctacgagtttgtcctgggagattgtatggagaatgtctccttcagcctgtcccccggcaaggtgacggccctggtggggccctcgggcagtgggaagagctcctgtgtcaacatcctggagaacttctaccccctggaggggggccgggtgctgctggacggcaagcccatcagcgcctacgaccacaagtacttgcaccgtgtgatctccctggtgagccaggagcccgtgctgttcgcccgctccatcacggataacatctcctacggcctgcccactgtgcctttcgagatggtggtggaggccgcacagaaggccaatgcccacggcttcatcatggaactccaggacggctacagcacagagacaggggagaagggcgcccagctgtcaggtggccagaagcagcgggtggccatggcccgggctctggtgcggaaccccccagtcctcatcctggatgaagccaccagcgctttggatgccgagagcgagtatctgatccagcaggccatccatggcaacctgcagaagcacacggtactcatcatcgcgcaccggctgagcaccgtggagcacgcgcacctcattgtggtgctggacaagggccgcgtagtgcagcagggcacccaccagcagctgctggcccagggcggcctctacgccaagctggtgcagcggcagatgctggggcttcagcccgccgcagacttcacagctggccacaacgagcctgtagccaacggcagtcacaaggcctgatggggggcccctgcttctcccggtggggcagaggacccggtgcctgcctggcagatgtgcccacggaggcccccagctgccctccgagcccaggcctgcagcactgaaagacgacctgccatgtcccatggatcaccgcttcctgcatcttgcccctggtccctgccccattcccagggcactccttacccctgctgccctgagccaacgccttcacggacctccctagcctcctaagcaaaggtagagctgcctttttaaacctaggtcttaccagggtttttactgtttggtttgaggcaccccagtcaactcctagatttcaaaaacctttttctaattgggagtaatggcgggcactttcaccaagatgttctagaaacttctgagccaggagtgaatggcccttccttagtagcctgggggatgtccagagactaggcctctcccctttacccctccagagaaggggcttccctgtcccggagggagacacggggaacgggattttccgtctctccctcttgccagctctgtgagtctggccagggcgggtagggagcgtggagggcatctgtctgccatcgcccgctgccaatctaagccagtctcactgtgaaccacacgaaacctcaactgggggagtgaggggctggccaggtctggaggggcctcaggggtgcccccagcccggcacccagcgctttcgcccctcgtccacccacccctggctggcagcctccctccccacacccgcccctgtgctctgctgtctggaggccacgtggatgttcatgagatgcattctcttctgtctttggtggatgggatggtggcaaagcccaggatctggctttgccagaggttgcaacatgttgagagaacccggtcaataaagtgtactacctcttacccct

SEQ ID NO: 110141 - DNA, 917 bp, Homo sapiens
  Payload ID: 1618
  Gene Symbol: ABCB9
  Gene Name: ATP-binding cassette, sub-family B (MDR/TAP), member 9
  ENST ID: ENST00000546289
  CDS Start-End: 85-917
gacaagccttggaagacacccctgccaacggccggcatttcagtttgtggctgggtctgccctcacctccccctgcagcctgggatgggtcagggaatggggatggtgggggatctaaggtcccctcgacccacatcccctctccctctgccccagctcacactgctggtggtccaggtcagcatcctctactacgggggccaccttgtcatctcaggccagatgaccagcggcaacctcatcgccttcatcatctacgagtttgtcctgggagattgtatggagaatgtctccttcagcctgtcccccggcaaggtgacggccctggtggggccctcgggcagtgggaagagctcctgtgtcaacatcctggagaacttctaccccctggaggggggccgggtgctgctggacggcaagcccatcagcgcctacgaccacaagtacttgcaccgtgtgatctccctggtgagccaggagcccgtgctgttcgcccgctccatcacggataacatctcctacggcctgcccactgtgcctttcgagatggtggtggaggccgcacagaaggccaatgcccacggcttcatcatggaactccaggacggctacagcacagagacaggggagaagggcgcccagctgtcaggtggccagaagcagcgggtggccatggcccgggctctggtgcggaaccccccagtcctcatcctggatgaagccaccagcgctttggatgccgagagcgagtatctgatccagcaggccatccatggcaacctgcagaagcacacggtactcatcatcgcgcaccggctgagcaccgtggagcacgcgcacctcattgtggtgctggacaagggccgcgtagtgcagcagggcacccaccagcagctgctggcccagggcggcctcta

SEQ ID NO: 110142 - DNA, 1419 bp, Homo sapiens
  Payload ID: 1618
  Gene Symbol: ABCB9
  Gene Name: ATP-binding cassette, sub-family B (MDR/TAP), member 9
  ENST ID: ENST00000546077
  CDS Start-End: 1073-1419
atccccttaggaggggctcagggggccactaagggctagtgaaggacaggtcttgaggctgtgtttgcattcattcattcatttcttcgctcattcaataaataattattgaccacctgctatgtcccaggcactgggatacatcagtgaaaaagacaaggcccctgccttcctggaacttgtatctagtgtcagagacagatactaggtaccaacagcataaagaatgagaatccacaatacagtaaaagatggtcagtgctaaggagaaacatgaagtgagcagagggattgggagcattgggtgtagctgcaattttaaattggatttactggctgggcccggtggctcatgcctgtaatcccagaactttgggaggcacaggcaggaggaccacttgagcctaggagttcgagacaagattggacaatatagcaagaccccatctctacaaaaaaaaattttttttagttagctgggcttggtggcgcatgcctgtggtcccagctacctgggatgctgaggtggaggatcgcctgagcccaggaggtcgaggctgtagtgagcaatgatcgtgccactatactctagcctgggtgacacagcaagaccctgtctctaaaatgaatgaataaatacaagttaaataggtcttgctgagaaggggacatctgaataagggtctgaaggaggcgggcatcttgggaggtatgtgctgagcagagggcacagccagtgaaaaggccctgggttggaacgtgcctggtgtgtatgtgggggtggtgcgggcccgctgtgatgccatcgcgggcccgctgtgatgccatcatgggcaggctgctgtcccctctggccaccccacggcactgcttctgcttccgagctagggccgtgagccaggtttgacctcaccctcctcctgcttcctgaatgggcgggtgcccccgagccctaagggacagacaggctgggttcagacaggcagggctgtgaccctgtgacaggtacaggcaaccccctcacagtcacccaggcccacgtggggtacttctagagcaggggcttggatgcatgacggcctccaggtggtgccggaggctctccaaagaggtccagaatgccctggccagagcgagcaacacggcggaggagaccatcagtgccatgaagactgtccggagcttcgccaatgaggaggaggaggcagaggtgtacctgcggaagctgcagcaggtgtacaagctgaacaggaaggaggcagctgcctacatgtactacgtctggggcagcgggctcacactgctggtggtccaggtcagcatcctctactacgggggccaccttgtcatctcaggccagatgaccagcggcaacctcatcgccttcatcatctacgagtttgtcctgggagattgtat

SEQ ID NO: 110143 - DNA, 568 bp, Homo sapiens
  Payload ID: 1618
  Gene Symbol: ABCB9
  Gene Name: ATP-binding cassette, sub-family B (MDR/TAP), member 9
  ENST ID: ENST00000543935
  CDS Start-End: 372-568
attacttccggtggcgttcccaatggacgcgggagggcggggtcaggtgtgggagggcgacggggcgtggtctcaccgcagccaacaaatgacaactcttgcagaccgagcctcttctctccccggacctttgctcaggaatctaccagcattaaacctttgagctagacactctgggctcagtcaccgaagggagcagcagcaagaagaatatttaccagcaagtactgaatcaacatgtgctgccagccagcgctgacatgtatctttgttgactgcttaaggcctggcctcgccctgtggatgatgatggccttgcccccgtgagctacaacctggccttcagcacccgcccacctccaaccagcaggatgcggctgtggaaggcggtggtggtgactttggccttcatgagtgtggacatctgcgtgaccacggccatctatgtcttcagccacctggaccgcagcctcctggaggacatccgccacttcaacatctttgactcggtgctggatctctgggcagcctgcctgtaccgcagctgcctgctgctgggagccaccat

SEQ ID NO: 110144 - DNA, 1168 bp, Homo sapiens
  Payload ID: 1618
  Gene Symbol: ABCB9
  Gene Name: ATP-binding cassette, sub-family B (MDR/TAP), member 9
  ENST ID: ENST00000536976
  CDS Start-End: 503-1168
gcctggcatggtggcacatgcctgtattccctactcaggaggctgagacaggaggatcacctgagcccaggagtttgatgctgcagtgagctatgattacaccactgcactccagcccgggggacacagcgagaccctgtctcaaaaaacaagagaatgaagcatcctgcaggagccctggctcgatgcctggtagccactataaataaagaagaaccagcaggctgtgtggatgcaaggcccagtgctcccctgttctctgaggaggggggcattaagcaccctggggccccacgatgggcagcaagagtttgccgagggaggaaagcccaccggtggagtgggcagaggggttggtgtgtggacttctggagcctcaggaggaagggtgcgggttcccctggctgcagacgtccctgaggctgccctgcctcccccaggagagaccttcctgccctactacacgggccgcgccattgatggcatcgtcatccagaaaagcatggatcagttcagcacggctgtcgtcatcgtgtgcctgctggccattggcagactgaacattcgccttcgaaactgtctcttccgctcactggtgtcccaggagacaagcttctttgatgagaaccgcacaggggacctcatctcccgcctgacctcggacaccaccatggtcagcgacctggtctcccagaacatcaatgtcttcctgcggaacacagtcaaggtcacgggcgtggtggtcttcatgttcagcctctcatggcagctctccttggtcaccttcatgggcttccccatcatcatgatggtgtccaacatctacggcaagtactacaagaggctctccaaagaggtccagaatgccctggccagagcgagcaacacggcggaggagaccatcagtgccatgaagactgtccggagcttcgccaatgaggaggaggaggcagaggtgtacctgcggaagctgcagcaggtgtacaagctgaacaggaaggaggcagctgcctacatgtactacgtctggggcagcgggctcacactgctggtggtccaggtcagcatcctctactacgggggccaccttgtcatctcaggccagatgaccagcggcaacctcatcgccttcatcatctacgagtttgtcctgggagattgtatggag

SEQ ID NO: 110145 - DNA, 549 bp, Homo sapiens
  Payload ID: 1618
  Gene Symbol: ABCB9
  Gene Name: ATP-binding cassette, sub-family B (MDR/TAP), member 9
  ENST ID: ENST00000545373
  CDS Start-End: 82-549
aagccttggaagacacccctgccaacggccggcatttcagtttgtggctgggtctgccctcacctccccctgcagcctgggatgggtcagggaatggggatggtgggggatctaaggtcccctcgacccacatcccctctccctctgccccagctcacactgctggtggtccaggtcagcatcctctactacgggggccaccttgtcatctcaggccagatgaccagcggcaacctcatcgccttcatcatctacgagtttgtcctgggagattgtatggagtccgtgggctccgtctacagtggcctgatgcagggagtgggggctgctgagaaggtgttcgagttcatcgaccggcagccgaccatggtgcacgatggcagcttggcccccgaccacctggagggccgggtggactttgagaatgtgaccttcacctaccgcactcggccccacacccaggtcctgcagaatgtctccttcagcctgtcccccggcaaggtgacggccctggtggggccctcgggcagtgggaagagctcctgtgtc

SEQ ID NO: 110146 - DNA, 2587 bp, Homo sapiens
  Payload ID: 1618
  Gene Symbol: ABCB9
  Gene Name: ATP-binding cassette, sub-family B (MDR/TAP), member 9
  Uniprot ID: Q9NP78
  ENST ID: ENST00000442833
  CDS Start-End: 262-2313
ctcagctccgaccttgcagcggcgcagcgcgggtgggaggcggggaggagcagcgggaagagcggagcgaggaccgcgtccggcgcagtcttcaatgagcagcgcggaaactgcaccccagacccgagcctgctgcgcgccccctcccagagctcacctggtgccaggtaacaggcctggcctcgccctgtggatgatgatggccttgcccccgtgagctacaacctggccttcagcacccgcccacctccaaccagcaggatgcggctgtggaaggcggtggtggtgactttggccttcatgagtgtggacatctgcgtgaccacggccatctatgtcttcagccacctggaccgcagcctcctggaggacatccgccacttcaacatctttgactcggtgctggatctctgggcagcctgcctgtaccgcagctgcctgctgctgggagccaccattggtgtggccaagaacagtgcgctggggccccggcggctgcgggcctcgtggctggtcatcaccctcgtgtgcctcttcgtgggcatctatgccatggtgaagctgctgctcttctcagaggtgcgcaggcccatccgggacccctggttttgggccctgttcgtgtggacgtacatttcactcggcgcatccttcctgctctggtggctgctgtccaccgtgcggccaggcacccaggccctggagccaggggcggccaccgaggctgagggcttccctgggagcggccggccaccgcccgagcaggcgtctggggccacgctgcagaagctgctctcctacaccaagcccgacgtggccttcctcgtggccgcctccttcttcctcatcgtggcagctctgggagagaccttcctgccctactacacgggccgcgccattgatggcatcgtcatccagaaaagcatggatcagttcagcacggctgtcgtcatcgtgtgcctgctggccattggcagctcatttgccgcaggtattcggggcggcatttttaccctcatatttgccagactgaacattcgccttcgaaactgtctcttccgctcactggtgtcccaggagacaagcttctttgatgagaaccgcacaggggacctcatctcccgcctgacctcggacaccaccatggtcagcgacctggtctcccagaacatcaatgtcttcctgcggaacacagtcaaggtcacgggcgtggtggtcttcatgttcagcctctcatggcagctctccttggtcaccttcatgggcttccccatcatcatgatggtgtccaacatctacggcaagtactacaagaggctctccaaagaggtccagaatgccctggccagagcgagcaacacggcggaggagaccatcagtgccatgaagactgtccggagcttcgccaatgaggaggaggaggcagaggtgtacctgcggaagctgcagcaggtgtacaagctgaacaggaaggaggcagctgcctacatgtactacgtctggggcagcgggctcacactgctggtggtccaggtcagcatcctctactacgggggccaccttgtcatctcaggccagatgaccagcggcaacctcatcgccttcatcatctacgagtttgtcctgggagattgtatggagtccgtgggctccgtctacagtggcctgatgcagggagtgggggctgctgagaaggtgttcgagttcatcgaccggcagccgaccatggtgcacgatggcagcttggcccccgaccacctggagggccgggtggactttgagaatgtgaccttcacctaccgcactcggccccacacccaggtcctgcagaatgtctccttcagcctgtcccccggcaaggtgacggccctggtggggccctcgggcagtgggaagagctcctgtgtcaacatcctggagaacttctaccccctggaggggggccgggtgctgctggacggcaagcccatcagcgcctacgaccacaagtacttgcaccgtgtgatctccctggtgagccaggagcccgtgctgttcgcccgctccatcacggataacatctcctacggcctgcccactgtgcctttcgagatggtggtggaggccgcacagaaggccaatgcccacggcttcatcatggaactccaggacggctacagcacagagacaggggagaagggcgcccagctgtcaggtggccagaagcagcgggtggccatggcccgggctctggtgcggaaccccccagtcctcatcctggatgaagccaccagcgctttggatgccgagagcgagtatctgtgtgctgggtaaaccaggagaaagtaattgcagtcgagggctttgggaacagcacagttggccagagagacagatgaggaaaacaagcagggatgagagagaatgaagaggagcacggcaccccagggctggcttagtcctggcgccaggacttagtttactctgtcattgtttctttcccacattagagtttgtcttcatcactgctgtattccccagtgcctagaacagtggctgacacatagtatgtgctcagtaaacagccattaaagaaatgtttgagctg

SEQ ID NO: 110147 - DNA, 2394 bp, Homo sapiens
  Payload ID: 1618
  Gene Symbol: ABCB9
  Gene Name: ATP-binding cassette, sub-family B (MDR/TAP), member 9
  Uniprot ID: Q9NP78
  ENST ID: ENST00000344275
  CDS Start-End: 262-2307
ctcagctccgaccttgcagcggcgcagcgcgggtgggaggcggggaggagcagcgggaagagcggagcgaggaccgcgtccggcgcagtcttcaatgagcagcgcggaaactgcaccccagacccgagcctgctgcgcgccccctcccagagctcacctggtgccaggtaacaggcctggcctcgccctgtggatgatgatggccttgcccccgtgagctacaacctggccttcagcacccgcccacctccaaccagcaggatgcggctgtggaaggcggtggtggtgactttggccttcatgagtgtggacatctgcgtgaccacggccatctatgtcttcagccacctggaccgcagcctcctggaggacatccgccacttcaacatctttgactcggtgctggatctctgggcagcctgcctgtaccgcagctgcctgctgctgggagccaccattggtgtggccaagaacagtgcgctggggccccggcggctgcgggcctcgtggctggtcatcaccctcgtgtgcctcttcgtgggcatctatgccatggtgaagctgctgctcttctcagaggtgcgcaggcccatccgggacccctggttttgggccctgttcgtgtggacgtacatttcactcggcgcatccttcctgctctggtggctgctgtccaccgtgcggccaggcacccaggccctggagccaggggcggccaccgaggctgagggcttccctgggagcggccggccaccgcccgagcaggcgtctggggccacgctgcagaagctgctctcctacaccaagcccgacgtggccttcctcgtggccgcctccttcttcctcatcgtggcagctctgggagagaccttcctgccctactacacgggccgcgccattgatggcatcgtcatccagaaaagcatggatcagttcagcacggctgtcgtcatcgtgtgcctgctggccattggcagctcatttgccgcaggtattcggggcggcatttttaccctcatatttgccagactgaacattcgccttcgaaactgtctcttccgctcactggtgtcccaggagacaagcttctttgatgagaaccgcacaggggacctcatctcccgcctgacctcggacaccaccatggtcagcgacctggtctcccagaacatcaatgtcttcctgcggaacacagtcaaggtcacgggcgtggtggtcttcatgttcagcctctcatggcagctctccttggtcaccttcatgggcttccccatcatcatgatggtgtccaacatctacggcaagtactacaagaggctctccaaagaggtccagaatgccctggccagagcgagcaacacggcggaggagaccatcagtgccatgaagactgtccggagcttcgccaatgaggaggaggaggcagaggtgtacctgcggaagctgcagcaggtgtacaagctgaacaggaaggaggcagctgcctacatgtactacgtctggggcagcgggctcacactgctggtggtccaggtcagcatcctctactacgggggccaccttgtcatctcaggccagatgaccagcggcaacctcatcgccttcatcatctacgagtttgtcctgggagattgtatggagtccgtgggctccgtctacagtggcctgatgcagggagtgggggctgctgagaaggtgttcgagttcatcgaccggcagccgaccatggtgcacgatggcagcttggcccccgaccacctggagggccgggtggactttgagaatgtgaccttcacctaccgcactcggccccacacccaggtcctgcagaatgtctccttcagcctgtcccccggcaaggtgacggccctggtggggccctcgggcagtgggaagagctcctgtgtcaacatcctggagaacttctaccccctggaggggggccgggtgctgctggacggcaagcccatcagcgcctacgaccacaagtacttgcaccgtgtgatctccctggtgagccaggagcccgtgctgttcgcccgctccatcacggataacatctcctacggcctgcccactgtgcctttcgagatggtggtggaggccgcacagaaggccaatgcccacggcttcatcatggaactccaggacggctacagcacagagacaggggagaagggcgcccagctgtcaggtggccagaagcagcgggtggccatggcccgggctctggtgcggaaccccccagtcctcatcctggatgaagccaccagcgctttggatgccgagagcgagtatctgatctgaatgaccagcctgcagatatcagaaccgagatggattgatgatgatgacaatgataaccattcaggtataaaacattttcagtgcagc

SEQ ID NO: 110148 - DNA, 6594 bp, Homo sapiens
  Payload ID: 1619
  Gene Symbol: ABCC1
  Gene Name: ATP-binding cassette, sub-family C (CFTR/MRP), member 1
  ENST ID: ENST00000399408
  CDS Start-End: 1154-4801
ccaggcggcgttgcggccccggccccggctccctgcgccgccgccgccgccgccgccagcgctagcgccagcagccgggcccgatcacccgccgcccggtgcccgccgccgcccgcgccagcaaccgggcccgatcacccgccgcccggtgcccgccgccgcccgcgccaccggcatggcgctccggggcttctgcagcgccgatggctccgacccgctctgggactggaatgtcacgtggaataccagcaaccccgacttcaccaagtgctttcagaacacggtcctcgtgtgggtgccttgtttttacctctgggcctgtttccccttctacttcctctatctctcccgacatgaccgaggctacattcagatgacacctctcaacaaaaccaaaactgccttgggatttttgctgtggatcgtctgctgggcagacctcttctactctttctgggaaagaagtcggggcatattcctggccccagtgtttctggtcagcccaactctcttgggcatcaccatgctgcttgctacctttttaattcagctggagaggaggaagggagttcagtcttcagggatcatgctcactttctggctggtagccctagtgtgtgccctagccatcctgagatccaaaattatgacagccttaaaagaggatgcccaggtggacctgtttcgtgacatcactttctacgtctacttttccctcttactcattcagctcgtcttgtcctgtttctcagatcgctcacccctgttctcggaaaccatccacgaccctaatccctgcccagagtccagcgcttccttcctgtcgaggatcaccttctggtggatcacagggttgattgtccggggctaccgccagcccctggagggcagtgacctctggtccttaaacaaggaggacacgtcggaacaagtcgtgcctgttttggtaaagaactggaagaaggaatgcgccaagactaggaagcagccggtgaaggttgtgtactcctccaaggatcctgcccagccgaaagagagttccaaggtggatgcgaatgaggaggtggaggctttgatcgtcaagtccccacagaaggagtggaacccctctctgtttaaggtgttatacaagacctttgggccctacttcctcatgagcttcttcttcaaggccatccacgacctgatgatgttttccgggccgcagatcttaaagttgctcatcaagttcgtgaatgacacgaaggccccagactggcagggctacttctacaccgtgctgctgtttgtcactgcctgcctgcagaccctcgtgctgcaccagtacttccacatctgcttcgtcagtggcatgaggatcaagaccgctgtcattggggctgtctatcggaaggccctggtgatcaccaattcagccagaaaatcctccacggtcggggagattgtcaacctcatgtctgtggacgctcagaggttcatggacttggccacgtacattaacatgatctggtcagcccccctgcaagtcatccttgctctctacctcctgtggctgaatctgggcccttccgtcctggctggagtggcggtgatggtcctcatggtgcccgtcaatgctgtgatggcgatgaagaccaagacgtatcaggtggcccacatgaagagcaaagacaatcggatcaagctgatgaacgaaattctcaatgggatcaaagtgctaaagctttatgcctgggagctggcattcaaggacaaggtgctggccatcaggcaggaggagctgaaggtgctgaagaagtctgcctacctgtcagccgtgggcaccttcacctgggtctgcacgccctttctggtggccttgtgcacatttgccgtctacgtgaccattgacgagaacaacatcctggatgcccagacagccttcgtgtctttggccttgttcaacatcctccggtttcccctgaacattctccccatggtcatcagcagcatcgtgcaggcgagtgtctccctcaaacgcctgaggatctttctctcccatgaggagctggaacctgacagcatcgagcgacggcctgtcaaagacggcgggggcacgaacagcatcaccgtgaggaatgccacattcacctgggccaggagcgaccctcccacactgaatggcatcaccttctccatccccgaaggtgctttggtggccgtggtgggccaggtgggctgcggaaagtcgtccctgctctcagccctcttggctgagatggacaaagtggaggggcacgtggctatcaagggctccgtggcctatgtgccacagcaggcctggattcagaatgattctctccgagaaaacatcctttttggatgtcagctggaggaaccatattacaggtccgtgatacaggcctgtgccctcctcccagacctggaaatcctgcccagtggggatcggacagagattggcgagaagggcgtgaacctgtctgggggccagaagcagcgcgtgagcctggcccgggccgtgtactccaacgctgacatttacctcttcgatgatcccctctcagcagtggatgcccatgtgggaaaacacatctttgaaaatgtgattggccccaaggggatgctgaagaacaagacgcggatcttggtcacgcacagcatgagctacttgccgcaggtggacgtcatcatcgtcatgagtggcggcaagatctctgagatgggctcctaccaggagctgctggctcgagacggcgccttcgctgagttcctgcgtacctatgccagcacagagcaggagcaggatgcagaggagaacggcagcacagtgatggacgaggaggaagcaggggtcacgggcgtcagcggtccagggaaggaagcaaagcaaatggagaatggcatgctggtgacggacagtgcagggaagcaactgcagagacagctcagcagctcctcctcctatagtggggacatcagcaggcaccacaacagcaccgcagaactgcagaaagctgaggccaagaaggaggagacctggaagctgatggaggctgacaaggcgcagacagggcaggtcaagctttccgtgtactgggactacatgaaggccatcggactcttcatctccttcctcagcatcttccttttcatgtgtaaccatgtgtccgcgctggcttccaactattggctcagcctctggactgatgaccccatcgtcaacgggactcaggagcacacgaaagtccggctgagcgtctatggagccctgggcatttcacaagggatcgccgtgtttggctactccatggccgtgtccatcggggggatcttggcttcccgctgtctgcacgtggacctgctgcacagcatcctgcggtcacccatgagcttctttgagcggacccccagtgggaacctggtgaaccgcttctccaaggagctggacacagtggactccatgatcccggaggtcatcaagatgttcatgggctccctgttcaacgtcattggtgcctgcatcgttatcctgctggccacgcccatcgccgccatcatcatcccgccccttggcctcatctacttcttcgtccagaggttctacgtggcttcctcccggcagctgaagcgcctcgagtcggtcagccgctccccggtctattcccatttcaacgagaccttgctgggggtcagcgtcattcgagccttcgaggagcaggagcgcttcatccaccagagtgacctgaaggtggacgagaaccagaaggcctattaccccagcatcgtggccaacaggtggctggccgtgcggctggagtgtgtgggcaactgcatcgttctgtttgctgccctgtttgcggtgatctccaggcacagcctcagtgctggcttggtgggcctctcagtgtcttactcattgcaggtcaccacgtacttgaactggctggttcggatgtcatctgaaatggaaaccaacatcgtggccgtggagaggctcaaggagtattcagagactgagaaggaggcgccctggcaaatccaggagacagctccgcccagcagctggccccaggtgggccgagtggaattccggaactactgcctgcgctaccgagaggacctggacttcgttctcaggcacatcaatgtcacgatcaatgggggagaaaaggtcggcatcgtggggcggacgggagctgggaagtcgtccctgaccctgggcttatttcggatcaacgagtctgccgaaggagagatcatcatcgatggcatcaacatcgccaagatcggcctgcacgacctccgcttcaagatcaccatcatcccccaggaccctgttttgttttcgggttccctccgaatgaacctggacccattcagccagtactcggatgaagaagtctggacgtccctggagctggcccacctgaaggacttcgtgtcagcccttcctgacaagctagaccatgaatgtgcagaaggcggggagaacctcagtgtcgggcagcgccagcttgtgtgcctagcccgggccctgctgaggaagacgaagatccttgtgttggatgaggccacggcagccgtggacctggaaacggacgacctcatccagtccaccatccggacacagttcgaggactgcaccgtcctcaccatcgcccaccggctcaacaccatcatggactacacaagggtgatcgtcttggacaaaggagaaatccaggagtacggcgccccatcggacctcctgcagcagagaggtcttttctacagcatggccaaagacgccggcttggtgtgagccccagagctggcatatctggtcagaactgcagggcctatatgccagcgcccagggaggagtcagtacccctggtaaaccaagcctcccacactgaaaccaaaacataaaaaccaaacccagacaaccaaaacatattcaaagcagcagccaccgccatccggtcccctgcctggaactggctgtgaagacccaggagagacagagatgcgaaccacccaaaacacgcacaccctgcccctggtgccctgagacagacacacagcctcacgcccccaggaatgcaagtggtttcctggtgcttcccacggaggagttttggcagccagacttctggaggaattggttgtatagaagatcctagtgaccaaattcagcctactgcctcggatctctccagccgaagtctgtggactgcaagtctttgagatgcttctggctcccatcacctctaacatccttgtctgggtctaccaggaacgcttcatttccttggggctgcagttttgtggttgaggggcctggagaaaatcattttctccccttggcagtgtcccagggccctggatggtcctcttaccaacatctggtcttccaggcactcaaaagctgggaaccagcatctcagcgccagctctaccagttctcgttttgggccagaggcagcctctgcactcccacgcctgtcctcctggaagggacctggttggactaacggctaacctggacctggaactgtagggccaggggattgtctcagggccgacgttccacctggggcttccctccccacccaccccgactccaggctttcccttttttcttttgttcaacattgtaagaacaatcaatgctgttattactgttcccaccatgattgatgtggggtaaatattaaggagatggcctcatgggaatttgaccttgactagaaatagagactgagagtgagcaaccagctggaaggtactatgccagtcctagcagaaaaatgtgttaggggcctggcccaaagcagtgttggttgcttacagtgttgattgattttgttcttttttcttaccacctcttttctttccctctcatggtacctgctcatggttatgaagctttcaaagtaaagaacacgaaatacctcccaagtattaccagtgggtaccaaaaaaatgtccccttgagtcttttccttgtttttagatgttaattctctcccttggcatccggttagccccccagggggggcagcattgtggagaacttgatatttagttactgatgctcttccaggacacgaaaagaacccatctttgaatatcaatgattttttttttttaagtactgttccggggagaaaaacagtctcaaaacttgaacttcttgggaatagaagtgttgggctgagaagtaacattcccaggaaatagtgagaagctcgccctgtgtttgaaaccgtgttggtctctgtgttcctggaagaaaacagggaagcagcatcttttaaagcctgttctttaaggtgtctcgttagagcccaaagtggaatccggaaggcagccagagctgaggctgccccaagactcagacttgctaagaattacgccgccgacttcaaacccagagagcatctttcttttaggcgaaaacgcatatatttattttttgtaagttataccattctttcacattagataaactaagttttgggggatccttttgtaatgacttacactggaaatgcgaacatttgcagtaaaaaaatatatatatatctatatattttatttctttctaaa

SEQ ID NO: 110149 - DNA, 6552 bp, Homo sapiens
  Payload ID: 1619
  Gene Symbol: ABCC1
  Gene Name: ATP-binding cassette, sub-family C (CFTR/MRP), member 1
  Uniprot ID: P33527
  ENST ID: ENST00000399410
  CDS Start-End: 176-4771
ccaggcggcgttgcggccccggccccggctccctgcgccgccgccgccgccgccgccagcgctagcgccagcagccgggcccgatcacccgccgcccggtgcccgccgccgcccgcgccagcaaccgggcccgatcacccgccgcccggtgcccgccgccgcccgcgccaccggcatggcgctccggggcttctgcagcgccgatggctccgacccgctctgggactggaatgtcacgtggaataccagcaaccccgacttcaccaagtgctttcagaacacggtcctcgtgtgggtgccttgtttttacctctgggcctgtttccccttctacttcctctatctctcccgacatgaccgaggctacattcagatgacacctctcaacaaaaccaaaactgccttgggatttttgctgtggatcgtctgctgggcagacctcttctactctttctgggaaagaagtcggggcatattcctggccccagtgtttctggtcagcccaactctcttgggcatcaccatgctgcttgctacctttttaattcagctggagaggaggaagggagttcagtcttcagggatcatgctcactttctggctggtagccctagtgtgtgccctagccatcctgagatccaaaattatgacagccttaaaagaggatgcccaggtggacctgtttcgtgacatcactttctacgtctacttttccctcttactcattcagctcgtcttgtcctgtttctcagatcgctcacccctgttctcggaaaccatccacgaccctaatccctgcccagagtccagcgcttccttcctgtcgaggatcaccttctggtggatcacagggttgattgtccggggctaccgccagcccctggagggcagtgacctctggtccttaaacaaggaggacacgtcggaacaagtcgtgcctgttttggtaaagaactggaagaaggaatgcgccaagactaggaagcagccggtgaaggttgtgtactcctccaaggatcctgcccagccgaaagagagttccaaggtggatgcgaatgaggaggtggaggctttgatcgtcaagtccccacagaaggagtggaacccctctctgtttaaggtgttatacaagacctttgggccctacttcctcatgagcttcttcttcaaggccatccacgacctgatgatgttttccgggccgcagatcttaaagttgctcatcaagttcgtgaatgacacgaaggccccagactggcagggctacttctacaccgtgctgctgtttgtcactgcctgcctgcagaccctcgtgctgcaccagtacttccacatctgcttcgtcagtggcatgaggatcaagaccgctgtcattggggctgtctatcggaaggccctggtgatcaccaattcagccagaaaatcctccacggtcggggagattgtcaacctcatgtctgtggacgctcagaggttcatggacttggccacgtacattaacatgatctggtcagcccccctgcaagtcatccttgctctctacctcctgtggctgaatctgggcccttccgtcctggctggagtggcggtgatggtcctcatggtgcccgtcaatgctgtgatggcgatgaagaccaagacgtatcaggtggcccacatgaagagcaaagacaatcggatcaagctgatgaacgaaattctcaatgggatcaaagtgctaaagctttatgcctgggagctggcattcaaggacaaggtgctggccatcaggcaggaggagctgaaggtgctgaagaagtctgcctacctgtcagccgtgggcaccttcacctgggtctgcacgccctttctggtggccttgtgcacatttgccgtctacgtgaccattgacgagaacaacatcctggatgcccagacagccttcgtgtctttggccttgttcaacatcctccggtttcccctgaacattctccccatggtcatcagcagcatcgtgcaggcgagtgtctccctcaaacgcctgaggatctttctctcccatgaggagctggaacctgacagcatcgagcgacggcctgtcaaagacggcgggggcacgaacagcatcaccgtgaggaatgccacattcacctgggccaggagcgaccctcccacactgaatggcatcaccttctccatccccgaaggtgctttggtggccgtggtgggccaggtgggctgcggaaagtcgtccctgctctcagccctcttggctgagatggacaaagtggaggggcacgtggctatcaagggctccgtggcctatgtgccacagcaggcctggattcagaatgattctctccgagaaaacatcctttttggatgtcagctggaggaaccatattacaggtccgtgatacaggcctgtgccctcctcccagacctggaaatcctgcccagtggggatcggacagagattggcgagaagggcgtgaacctgtctgggggccagaagcagcgcgtgagcctggcccgggccgtgtactccaacgctgacatttacctcttcgatgatcccctctcagcagtggatgcccatgtgggaaaacacatctttgaaaatgtgattggccccaaggggatgctgaagaacaagacgcggatcttggtcacgcacagcatgagctacttgccgcaggtggacgtcatcatcgtcatgagtggcggcaagatctctgagatgggctcctaccaggagctgctggctcgagacggcgccttcgctgagttcctgcgtacctatgccagcacagagcaggagcaggatgcagaggagaacggggtcacgggcgtcagcggtccagggaaggaagcaaagcaaatggagaatggcatgctggtgacggacagtgcagggaagcaactgcagagacagctcagcagctcctcctcctatagtggggacatcagcaggcaccacaacagcaccgcagaactgcagaaagctgaggccaagaaggaggagacctggaagctgatggaggctgacaaggcgcagacagggcaggtcaagctttccgtgtactgggactacatgaaggccatcggactcttcatctccttcctcagcatcttccttttcatgtgtaaccatgtgtccgcgctggcttccaactattggctcagcctctggactgatgaccccatcgtcaacgggactcaggagcacacgaaagtccggctgagcgtctatggagccctgggcatttcacaagggatcgccgtgtttggctactccatggccgtgtccatcggggggatcttggcttcccgctgtctgcacgtggacctgctgcacagcatcctgcggtcacccatgagcttctttgagcggacccccagtgggaacctggtgaaccgcttctccaaggagctggacacagtggactccatgatcccggaggtcatcaagatgttcatgggctccctgttcaacgtcattggtgcctgcatcgttatcctgctggccacgcccatcgccgccatcatcatcccgccccttggcctcatctacttcttcgtccagaggttctacgtggcttcctcccggcagctgaagcgcctcgagtcggtcagccgctccccggtctattcccatttcaacgagaccttgctgggggtcagcgtcattcgagccttcgaggagcaggagcgcttcatccaccagagtgacctgaaggtggacgagaaccagaaggcctattaccccagcatcgtggccaacaggtggctggccgtgcggctggagtgtgtgggcaactgcatcgttctgtttgctgccctgtttgcggtgatctccaggcacagcctcagtgctggcttggtgggcctctcagtgtcttactcattgcaggtcaccacgtacttgaactggctggttcggatgtcatctgaaatggaaaccaacatcgtggccgtggagaggctcaaggagtattcagagactgagaaggaggcgccctggcaaatccaggagacagctccgcccagcagctggccccaggtgggccgagtggaattccggaactactgcctgcgctaccgagaggacctggacttcgttctcaggcacatcaatgtcacgatcaatgggggagaaaaggtcggcatcgtggggcggacgggagctgggaagtcgtccctgaccctgggcttatttcggatcaacgagtctgccgaaggagagatcatcatcgatggcatcaacatcgccaagatcggcctgcacgacctccgcttcaagatcaccatcatcccccaggaccctgttttgttttcgggttccctccgaatgaacctggacccattcagccagtactcggatgaagaagtctggacgtccctggagctggcccacctgaaggacttcgtgtcagcccttcctgacaagctagaccatgaatgtgcagaaggcggggagaacctcagtgtcgggcagcgccagcttgtgtgcctagcccgggccctgctgaggaagacgaagatccttgtgttggatgaggccacggcagccgtggacctggaaacggacgacctcatccagtccaccatccggacacagttcgaggactgcaccgtcctcaccatcgcccaccggctcaacaccatcatggactacacaagggtgatcgtcttggacaaaggagaaatccaggagtacggcgccccatcggacctcctgcagcagagaggtcttttctacagcatggccaaagacgccggcttggtgtgagccccagagctggcatatctggtcagaactgcagggcctatatgccagcgcccagggaggagtcagtacccctggtaaaccaagcctcccacactgaaaccaaaacataaaaaccaaacccagacaaccaaaacatattcaaagcagcagccaccgccatccggtcccctgcctggaactggctgtgaagacccaggagagacagagatgcgaaccacccaaaacacgcacaccctgcccctggtgccctgagacagacacacagcctcacgcccccaggaatgcaagtggtttcctggtgcttcccacggaggagttttggcagccagacttctggaggaattggttgtatagaagatcctagtgaccaaattcagcctactgcctcggatctctccagccgaagtctgtggactgcaagtctttgagatgcttctggctcccatcacctctaacatccttgtctgggtctaccaggaacgcttcatttccttggggctgcagttttgtggttgaggggcctggagaaaatcattttctccccttggcagtgtcccagggccctggatggtcctcttaccaacatctggtcttccaggcactcaaaagctgggaaccagcatctcagcgccagctctaccagttctcgttttgggccagaggcagcctctgcactcccacgcctgtcctcctggaagggacctggttggactaacggctaacctggacctggaactgtagggccaggggattgtctcagggccgacgttccacctggggcttccctccccacccaccccgactccaggctttcccttttttcttttgttcaacattgtaagaacaatcaatgctgttattactgttcccaccatgattgatgtggggtaaatattaaggagatggcctcatgggaatttgaccttgactagaaatagagactgagagtgagcaaccagctggaaggtactatgccagtcctagcagaaaaatgtgttaggggcctggcccaaagcagtgttggttgcttacagtgttgattgattttgttcttttttcttaccacctcttttctttccctctcatggtacctgctcatggttatgaagctttcaaagtaaagaacacgaaatacctcccaagtattaccagtgggtaccaaaaaaatgtccccttgagtcttttccttgtttttagatgttaattctctcccttggcatccggttagccccccagggggggcagcattgtggagaacttgatatttagttactgatgctcttccaggacacgaaaagaacccatctttgaatatcaatgattttttttttttaagtactgttccggggagaaaaacagtctcaaaacttgaacttcttgggaatagaagtgttgggctgagaagtaacattcccaggaaatagtgagaagctcgccctgtgtttgaaaccgtgttggtctctgtgttcctggaagaaaacagggaagcagcatcttttaaagcctgttctttaaggtgtctcgttagagcccaaagtggaatccggaaggcagccagagctgaggctgccccaagactcagacttgctaagaattacgccgccgacttcaaacccagagagcatctttcttttaggcgaaaacgcatatatttattttttgtaagttataccattctttcacattagataaactaagttttgggggatccttttgtaatgacttacactggaaatgcgaacatttgcagtaaaaaaatatatatatatctatatatttta

SEQ ID NO: 110150 - DNA, 744 bp, Homo sapiens
  Payload ID: 1619
  Gene Symbol: ABCC1
  Gene Name: ATP-binding cassette, sub-family C (CFTR/MRP), member 1
  ENST ID: ENST00000572053
  CDS Start-End: 1-69
ctggtgacggacagtgcagggaagcaactgcagagatttgagggccacttccacctcactaggccttaactaaagacctttgcacagatctcatggacagctcagcagctcctcctcctatagtggggacatcagcaggcaccacaacagcaccgcagaactgcagaaagctgaggccaagaaggaggagacctggaagctgatggaggctgacaaggcgcagacagggcaggtcaagctttccgtgtactgggactacatgaaggccatcggactcttcatctccttcctcagcatcttccttttcatgtgtaaccatgtgtccgcgctggcttccaactattggctcagcctctggactgatgaccccatcgtcaacgggactcaggagcacacgaaagtccggctgagcgtctatggagccctgggcatttcacaagggatcgccgtgtttggctactccatggccgtgtccatcggggggatcttggcttcccgctgtctgcacgtggacctgctgcacagcatcctgcggtcacccatgagcttctttgagcggacccccagtgggaacctggtgaaccgcttctccaaggagctggacacagtggactccatgatcccggaggtcatcaagatgttcatgggctccctgttcaacgtcattggtgcctgcatcgttatcctgctggccacgcccatcgccgccatcatcatcccgccccttggcctcatctacttctt

SEQ ID NO: 110151 - DNA, 4565 bp, Homo sapiens
  Payload ID: 1619
  Gene Symbol: ABCC1
  Gene Name: ATP-binding cassette, sub-family C (CFTR/MRP), member 1
  ENST ID: ENST00000572882
  CDS Start-End: 1-4321
ggccccagtgtttctggtcagcccaactctcttgggcatcaccatgctgcttgctacctttttaattcagctggagaggaggaagggagttcagtcttcagggatcatgctcactttctggctggtagccctagtgtgtgccctagccatcctgagatccaaaattatgacagccttaaaagaggatgcccaggtggacctgtttcgtgacatcactttctacgtctacttttccctcttactcattcagctcgtcttgtcctgtttctcagatcgctcacccctgttctcggaaaccatccacgaccctaatccctgcccagagtccagcgcttccttcctgtcgaggatcaccttctggtggatcacagggttgattgtccggggctaccgccagcccctggagggcagtgacctctggtccttaaacaaggaggacacgtcggaacaagtcgtgcctgttttggtaaagaactggaagaaggaatgcgccaagactaggaagcagccggtgaaggttgtgtactcctccaaggatcctgcccagccgaaagagagttccaaggtggatgcgaatgaggaggtggaggctttgatcgtcaagtccccacagaaggagtggaacccctctctgtttaaggtgttatacaagacctttgggccctacttcctcatgagcttcttcttcaaggccatccacgacctgatgatgttttccgggccgcagatcttaaagttgctcatcaagttcgtgaatgacacgaaggccccagactggcagggctacttctacaccgtgctgctgtttgtcactgcctgcctgcagaccctcgtgctgcaccagtacttccacatctgcttcgtcagtggcatgaggatcaagaccgctgtcattggggctgtctatcggaaggccctggtgatcaccaattcagccagaaaatcctccacggtcggggagattgtcaacctcatgtctgtggacgctcagaggttcatggacttggccacgtacattaacatgatctggtcagcccccctgcaagtcatccttgctctctacctcctgtggctgaatctgggcccttccgtcctggctggagtggcggtgatggtcctcatggtgcccgtcaatgctgtgatggcgatgaagaccaagacgtatcaggtggcccacatgaagagcaaagacaatcggatcaagctgatgaacgaaattctcaatgggatcaaagtgctaaagctttatgcctgggagctggcattcaaggacaaggtgctggccatcaggcaggaggagctgaaggtgctgaagaagtctgcctacctgtcagccgtgggcaccttcacctgggtctgcacgccctttctggtggccttgtgcacatttgccgtctacgtgaccattgacgagaacaacatcctggatgcccagacagccttcgtgtctttggccttgttcaacatcctccggtttcccctgaacattctccccatggtcatcagcagcatcgtgcaggcgagtgtctccctcaaacgcctgaggatctttctctcccatgaggagctggaacctgacagcatcgagcgacggcctgtcaaagacggcgggggcacgaacagcatcaccgtgaggaatgccacattcacctgggccaggagcgaccctcccacactgaatggcatcaccttctccatccccgaaggtgctttggtggccgtggtgggccaggtgggctgcggaaagtcgtccctgctctcagccctcttggctgagatggacaaagtggaggggcacgtggctatcaagggctccgtggcctatgtgccacagcaggcctggattcagaatgattctctccgagaaaacatcctttttggatgtcagctggaggaaccatattacaggtccgtgatacaggcctgtgccctcctcccagacctggaaatcctgcccagtggggatcggacagagattggcgagaagggcgtgaacctgtctgggggccagaagcagcgcgtgagcctggcccgggccgtgtactccaacgctgacatttacctcttcgatgatcccctctcagcagtggatgcccatgtgggaaaacacatctttgaaaatgtgattggccccaaggggatgctgaagaacaagacgcggatcttggtcacgcacagcatgagctacttgccgcaggtggacgtcatcatcgtcatgagtggcggcaagatctctgagatgggctcctaccaggagctgctggctcgagacggcgccttcgctgagttcctgcgtacctatgccagcacagagcaggagcaggatgcagaggagaacggcagcacagtgatggacgaggaggaagcaggggtcacgggcgtcagcggtccagggaaggaagcaaagcaaatggagaatggcatgctggtgacggacagtgcagggaagcaactgcagagacagctcagcagctcctcctcctatagtggggacatcagcaggcaccacaacagcaccgcagaactgcagaaagctgaggccaagaaggaggagacctggaagctgatggaggctgacaaggcgcagacagggcaggtcaagctttccgtgtactgggactacatgaaggccatcggactcttcatctccttcctcagcatcttccttttcatgtgtaaccatgtgtccgcgctggcttccaactattggctcagcctctggactgatgaccccatcgtcaacgggactcaggagcacacgaaagtccggctgagcgtctatggagccctgggcatttcacaagggatcgccgtgtttggctactccatggccgtgtccatcggggggatcttggcttcccgctgtctgcacgtggacctgctgcacagcatcctgcggtcacccatgagcttctttgagcggacccccagtgggaacctggtgaaccgcttctccaaggagctggacacagtggactccatgatcccggaggtcatcaagatgttcatgggctccctgttcaacgtcattggtgcctgcatcgttatcctgctggccacgcccatcgccgccatcatcatcccgccccttggcctcatctacttcttcgtccagaggttctacgtggcttcctcccggcagctgaagcgcctcgagtcggtcagccgctccccggtctattcccatttcaacgagaccttgctgggggtcagcgtcattcgagccttcgaggagcaggagcgcttcatccaccagagtgacctgaaggtggacgagaaccagaaggcctattaccccagcatcgtggccaacaggtggctggccgtgcggctggagtgtgtgggcaactgcatcgttctgtttgctgccctgtttgcggtgatctccaggcacagcctcagtgctggcttggtgggcctctcagtgtcttactcattgcaggtcaccacgtacttgaactggctggttcggatgtcatctgaaatggaaaccaacatcgtggccgtggagaggctcaaggagtattcagagactgagaaggaggcgccctggcaaatccaggagacagctccgcccagcagctggccccaggtgggccgagtggaattccggaactactgcctgcgctaccgagaggacctggacttcgttctcaggcacatcaatgtcacgatcaatgggggagaaaaggtcggcatcgtggggcggacgggagctgggaagtcgtccctgaccctgggcttatttcggatcaacgagtctgccgaaggagagatcatcatcgatggcatcaacatcgccaagatcggcctgcacgacctccgcttcaagatcaccatcatcccccaggaccctgttttgttttcgggttccctccgaatgaacctggacccattcagccagtactcggatgaagaagtctggacgtccctggagctggcccacctgaaggacttcgtgtcagcccttcctgacaagctagaccatgaatgtgcagaaggcggggagaacctcagtgtcgggcagcgccagcttgtgtgcctagcccgggccctgctgaggaagacgaagatccttgtgttggatgaggccacggcagccgtggacctggaaacggacgacctcatccagtccaccatccggacacagttcgaggactgcaccgtcctcaccatcgcccaccggctcaacaccatcatggactacacaagggtgatcgtcttggacaaaggagaaatccaggagtacggcgccccatcggacctcctgcagcagagaggtcttttctacagcatggccaaagacgccggcttggtgtgagccccagagctggcatatctggtcagaactgcagggcctatatgccagcgcccagggaggagtcagtacccctggtaaaccaagcctcccacactgaaaccaaaacataaaaaccaaacccagacaaccaaaacatattcaaagcagcagccaccgccatccggtcccctgcctggaactggctgtgaagacccaggagagacagagatgcgaaccacccaaaacacgcacaccctgcccctgg

SEQ ID NO: 110152 - DNA, 6607 bp, Homo sapiens
  Payload ID: 1619
  Gene Symbol: ABCC1
  Gene Name: ATP-binding cassette, sub-family C (CFTR/MRP), member 1
  ENST ID: ENST00000622828
  CDS Start-End: 1166-4813
ccaggcggcgttgcggccccggccccggctccctgcgccgccgccgccgccgccgccgccgccgccgccagcgctagcgccagcagccgggcccgatcacccgccgcccggtgcccgccgccgcccgcgccagcaaccgggcccgatcacccgccgcccggtgcccgccgccgcccgcgccaccggcatggcgctccggggcttctgcagcgccgatggctccgacccgctctgggactggaatgtcacgtggaataccagcaaccccgacttcaccaagtgctttcagaacacggtcctcgtgtgggtgccttgtttttacctctgggcctgtttccccttctacttcctctatctctcccgacatgaccgaggctacattcagatgacacctctcaacaaaaccaaaactgccttgggatttttgctgtggatcgtctgctgggcagacctcttctactctttctgggaaagaagtcggggcatattcctggccccagtgtttctggtcagcccaactctcttgggcatcaccatgctgcttgctacctttttaattcagctggagaggaggaagggagttcagtcttcagggatcatgctcactttctggctggtagccctagtgtgtgccctagccatcctgagatccaaaattatgacagccttaaaagaggatgcccaggtggacctgtttcgtgacatcactttctacgtctacttttccctcttactcattcagctcgtcttgtcctgtttctcagatcgctcacccctgttctcggaaaccatccacgaccctaatccctgcccagagtccagcgcttccttcctgtcgaggatcaccttctggtggatcacagggttgattgtccggggctaccgccagcccctggagggcagtgacctctggtccttaaacaaggaggacacgtcggaacaagtcgtgcctgttttggtaaagaactggaagaaggaatgcgccaagactaggaagcagccggtgaaggtcgtgtactcctccaaggatcctgcccagccgaaagagagttccaaggtggatgcgaatgaggaggtggaggctttgatcgtcaagtccccacagaaggagtggaacccctctctgtttaaggtgttatacaagacctttgggccctacttcctcatgagcttcttcttcaaggccatccacgacctgatgatgttttccgggccgcagatcttaaagttgctcatcaagttcgtgaatgacacgaaggccccagactggcagggctacttctacaccgtgctgctgtttgtcactgcctgcctgcagaccctcgtgctgcaccagtacttccacatctgcttcgtcagtggcatgaggatcaagaccgctgtcattggggctgtctatcggaaggccctggtgatcaccaattcagccagaaaatcctccacggtcggggagattgtcaacctcatgtctgtggacgctcagaggttcatggacttggccacgtacattaacatgatctggtcagcccccctgcaagtcatccttgctctctacctcctgtggctgaatctgggcccttccgtcctggctggagtggcggtgatggtcctcatggtgcccgtcaatgctgtgatggcgatgaagaccaagacgtatcaggtggcccacatgaagagcaaagacaatcggatcaagctgatgaacgaaattctcaatgggatcaaagtgctaaagctttatgcctgggagctggcattcaaggacaaggtgctggccatcaggcaggaggagctgaaggtgctgaagaagtctgcctacctgtcagccgtgggcaccttcacctgggtctgcacgccctttctggtggccctgtgcacatttgccgtctacgtgaccattgacgagaacaacatcctggatgcccagacagccttcgtgtctttggccttgttcaacatcctccggtttcccctgaacattctccccatggtcatcagcagcatcgtgcaggcgagtgtctccctcaaacgcctgaggatctttctctcccatgaggagctggaacctgacagcatcgagcgacggcctgtcaaagacggcgggggcacgaacagcatcaccgtgaggaatgccacattcacctgggccaggagcgaccctcccacactgaatggcatcaccttctccatccccgaaggtgctttggtggccgtggtgggccaggtgggctgcggaaagtcgtccctgctctcagccctcttggctgagatggacaaagtggaggggcacgtggctatcaagggctccgtggcctatgtgccacagcaggcctggattcagaatgattctctccgagaaaacatcctttttggatgtcagctggaggaaccatattacaggtccgtgatacaggcctgtgccctcctcccagacctggaaatcctgcccagtggggatcggacagagattggcgagaagggcgtgaacctgtctgggggccagaagcagcgcgtgagcctggcccgggccgtgtactccaacgctgacatttacctcttcgatgatcccctctcagcagtggatgcccatgtgggaaaacacatctttgaaaatgtgattggccccaaggggatgctgaagaacaagacgcggatcttggtcacgcacagcatgagctacttgccgcaggtggacgtcatcatcgtcatgagtggcggcaagatctctgagatgggctcctaccaggagctgctggctcgagacggcgccttcgctgagttcctgcgtacctatgccagcacagagcaggagcaggatgcagaggagaacggcagcacagtgatggacgaggaggaagcaggggtcacgggcgtcagcggtccagggaaggaagcaaagcaaatggagaatggcatgctggtgacggacagtgcagggaagcaactgcagagacagctcagcagctcctcctcctatagtggggacatcagcaggcaccacaacagcaccgcagaactgcagaaagctgaggccaagaaggaggagacctggaagctgatggaggctgacaaggcgcagacagggcaggtcaagctttccgtgtactgggactacatgaaggccatcggactcttcatctccttcctcagcatcttccttttcatgtgtaaccatgtgtccgcgctggcttccaactattggctcagcctctggactgatgaccccatcgtcaacgggactcaggagcacacgaaagtccggctgagcgtctatggagccctgggcatttcacaagggatcgccgtgtttggctactccatggccgtgtccatcggggggatcttggcttcccgctgtctgcacgtggacctgctgcacagcatcctgcggtcacccatgagcttctttgagcggacccccagtgggaacctggtgaaccgcttctccaaggagctggacacagtggactccatgatcccggaggtcatcaagatgttcatgggctccctgttcaacgtcattggtgcctgcatcgttatcctgctggccacgcccatcgccgccatcatcatcccgccccttggcctcatctacttcttcgtccagaggttctacgtggcttcctcccggcagctgaagcgcctcgagtcggtcagccgctccccggtctattcccatttcaacgagaccttgctgggggtcagcgtcattcgagccttcgaggagcaggagcgcttcatccaccagagtgacctgaaggtggacgagaaccagaaggcctattaccccagcatcgtggccaacaggtggctggccgtgcggctggagtgtgtgggcaactgcatcgttctgtttgctgccctgtttgcggtgatctccaggcacagcctcagtgctggcttggtgggcctctcagtgtcttactcattgcaggtcaccacgtacttgaactggctggttcggatgtcatctgaaatggaaaccaacatcgtggccgtggagaggctcaaggagtattcagagactgagaaggaggcgccctggcaaatccaggagacagctccgcccagcagctggccccaggtgggccgagtggaattccggaactactgcctgcgctaccgagaggacctggacttcgttctcaggcacatcaatgtcacgatcaatgggggagaaaaggtcggcatcgtggggcggacgggagctgggaagtcatccctgaccctgggcttatttcggatcaacgagtctgccgaaggagagatcatcatcgatggcatcaacatcgccaagatcggcctgcacgacctccgcttcaagatcaccatcatcccccaggaccctgttttgttttcgggttccctccgaatgaacctggacccattcagccagtactcggatgaagaagtctggacgtccctggagctggcccacctgaaggacttcgtgtcagcccttcctgacaagctagaccatgaatgtgcagaaggcggggagaacctcagtgtcgggcagcgccagcttgtgtgcctagcccgggccctgctgaggaagacgaagatccttgtgttggatgaggccacggcagccgtggacctggaaacggacgacctcatccagtccaccatccggacacagttcgaggactgcaccgtcctcaccatcgcccaccggctcaacaccatcatggactacacaagggtgatcgtcttggacaaaggagaaatccaggagtacggcgccccatcggacctcctgcagcagagaggtcttttctacagcatggccaaagacgccggcttggtgtgagccccagagctggcatatctggtcagaactgcagggcctatatgccagcgcccagggaggagtcagtacccctggtaaaccaagcctcccacactgaaaccaaaacataaaaaccaaacccagacaaccaaaacatattcaaagcagcagccaccgccatccggtcccctgcctggaactggctgtgaagacccaggagagacagagatgcgaaccacccaaaacacgcacaccctgcccctggtgccctgagacagacacacagcctcacgcccccaggaatgcaagtggtttcctggtgcttcccacggaggagttttggcagccagacttctggaggaattggttgtatagaagatcctagtgaccaaattcagcctactgcctcggatctctccagccgaagtctgtggactgcaagtctttgagatgcttctggctcccatcacctctaacatccttgtctgggtctaccaggaacgcttcatttccttggggctgcagttttgtggttgaggggcctggagaaaatcattttctccccttggcagtgtcccagggccctggatggtcctcttaccaacatctggtcttccaggcactcaaaagctgggaaccagcatctcagcgccagctctaccagttctcgttttgggccagaggcagcctctgcactcccacgcctgtcctcctggaagggacctggttggactaacggctaacctggacctggaactgtagggccaggggattgtctcagggccgacgttccacctggggcttccctccccacccaccccgactccaggctttcccttttttcttttgttcaacattgtaagaacaatcaatgctgttattactgatcccaccatgattgatgtggggtaaatattaaggagatggcctcatgggaatttgaccttgactagaaatagagactgagagtgagcaaccagctggaaggtactatgccagtcctagcagaaaaatgtgttaggggcctggcccaaagcagtgttggttgcttacagtgttgattgattttgttcttttttcttaccacctcttttctttccctctcatggtacctgctcatggttatgaagctttcaaagtaaagaacacgaaatacctcccaagtattaccagtgggtaccaaaaaaatgtccccttgagtcttttccttgtttttagatgttaattctctcccttggcatccggttagccccccagggggggcagcattgtggagaacttgatatttagttactgatgctcttccaggacacgaaaagaacccatctttgaatatcaatgatttttttttttttaagtactgttccggggagaaaaacagtctcaaaacttgaacttcttgggaagagaagtgttgggctgagaagtaacattcccaggaaatagtgagaagctcgccctgtgtttgaaaccgtgttggtctctgtgttcctggaagaaaacagggaagcagcatcttttaaagcctgttctttaaggtgtctcgttagagcccaaagtggaatccggaaggcagccagagctgaggctgccccaagactcagacttgctaagaattacgccgccgacttcaaacccagagagcatctttcttttaggcgaaaacgcatatatttattttttgtaagttataccattctttcacattagataaactaagttttgggggatccttttgtaatgacttacactggaaatgcgaacatttgcagtaaaaaaatatatatatatctatatattttatttctttctaaa

SEQ ID NO: 110153 - DNA, 4565 bp, Homo sapiens
  Payload ID: 1619
  Gene Symbol: ABCC1
  Gene Name: ATP-binding cassette, sub-family C (CFTR/MRP), member 1
  ENST ID: ENST00000621659
  CDS Start-End: 1-4321
ggccccagtgtttctggtcagcccaactctcttgggcatcaccatgctgcttgctacctttttaattcagctggagaggaggaagggagttcagtcttcagggatcatgctcactttctggctggtagccctagtgtgtgccctagccatcctgagatccaaaattatgacagccttaaaagaggatgcccaggtggacctgtttcgtgacatcactttctacgtctacttttccctcttactcattcagctcgtcttgtcctgtttctcagatcgctcacccctgttctcggaaaccatccacgaccctaatccctgcccagagtccagcgcttccttcctgtcgaggatcaccttctggtggatcacagggttgattgtccggggctaccgccagcccctggagggcagtgacctctggtccttaaacaaggaggacacgtcggaacaagtcgtgcctgttttggtaaagaactggaagaaggaatgcgccaagactaggaagcagccggtgaaggtcgtgtactcctccaaggatcctgcccagccgaaagagagttccaaggtggatgcgaatgaggaggtggaggctttgatcgtcaagtccccacagaaggagtggaacccctctctgtttaaggtgttatacaagacctttgggccctacttcctcatgagcttcttcttcaaggccatccacgacctgatgatgttttccgggccgcagatcttaaagttgctcatcaagttcgtgaatgacacgaaggccccagactggcagggctacttctacaccgtgctgctgtttgtcactgcctgcctgcagaccctcgtgctgcaccagtacttccacatctgcttcgtcagtggcatgaggatcaagaccgctgtcattggggctgtctatcggaaggccctggtgatcaccaattcagccagaaaatcctccacggtcggggagattgtcaacctcatgtctgtggacgctcagaggttcatggacttggccacgtacattaacatgatctggtcagcccccctgcaagtcatccttgctctctacctcctgtggctgaatctgggcccttccgtcctggctggagtggcggtgatggtcctcatggtgcccgtcaatgctgtgatggcgatgaagaccaagacgtatcaggtggcccacatgaagagcaaagacaatcggatcaagctgatgaacgaaattctcaatgggatcaaagtgctaaagctttatgcctgggagctggcattcaaggacaaggtgctggccatcaggcaggaggagctgaaggtgctgaagaagtctgcctacctgtcagccgtgggcaccttcacctgggtctgcacgccctttctggtggccctgtgcacatttgccgtctacgtgaccattgacgagaacaacatcctggatgcccagacagccttcgtgtctttggccttgttcaacatcctccggtttcccctgaacattctccccatggtcatcagcagcatcgtgcaggcgagtgtctccctcaaacgcctgaggatctttctctcccatgaggagctggaacctgacagcatcgagcgacggcctgtcaaagacggcgggggcacgaacagcatcaccgtgaggaatgccacattcacctgggccaggagcgaccctcccacactgaatggcatcaccttctccatccccgaaggtgctttggtggccgtggtgggccaggtgggctgcggaaagtcgtccctgctctcagccctcttggctgagatggacaaagtggaggggcacgtggctatcaagggctccgtggcctatgtgccacagcaggcctggattcagaatgattctctccgagaaaacatcctttttggatgtcagctggaggaaccatattacaggtccgtgatacaggcctgtgccctcctcccagacctggaaatcctgcccagtggggatcggacagagattggcgagaagggcgtgaacctgtctgggggccagaagcagcgcgtgagcctggcccgggccgtgtactccaacgctgacatttacctcttcgatgatcccctctcagcagtggatgcccatgtgggaaaacacatctttgaaaatgtgattggccccaaggggatgctgaagaacaagacgcggatcttggtcacgcacagcatgagctacttgccgcaggtggacgtcatcatcgtcatgagtggcggcaagatctctgagatgggctcctaccaggagctgctggctcgagacggcgccttcgctgagttcctgcgtacctatgccagcacagagcaggagcaggatgcagaggagaacggcagcacagtgatggacgaggaggaagcaggggtcacgggcgtcagcggtccagggaaggaagcaaagcaaatggagaatggcatgctggtgacggacagtgcagggaagcaactgcagagacagctcagcagctcctcctcctatagtggggacatcagcaggcaccacaacagcaccgcagaactgcagaaagctgaggccaagaaggaggagacctggaagctgatggaggctgacaaggcgcagacagggcaggtcaagctttccgtgtactgggactacatgaaggccatcggactcttcatctccttcctcagcatcttccttttcatgtgtaaccatgtgtccgcgctggcttccaactattggctcagcctctggactgatgaccccatcgtcaacgggactcaggagcacacgaaagtccggctgagcgtctatggagccctgggcatttcacaagggatcgccgtgtttggctactccatggccgtgtccatcggggggatcttggcttcccgctgtctgcacgtggacctgctgcacagcatcctgcggtcacccatgagcttctttgagcggacccccagtgggaacctggtgaaccgcttctccaaggagctggacacagtggactccatgatcccggaggtcatcaagatgttcatgggctccctgttcaacgtcattggtgcctgcatcgttatcctgctggccacgcccatcgccgccatcatcatcccgccccttggcctcatctacttcttcgtccagaggttctacgtggcttcctcccggcagctgaagcgcctcgagtcggtcagccgctccccggtctattcccatttcaacgagaccttgctgggggtcagcgtcattcgagccttcgaggagcaggagcgcttcatccaccagagtgacctgaaggtggacgagaaccagaaggcctattaccccagcatcgtggccaacaggtggctggccgtgcggctggagtgtgtgggcaactgcatcgttctgtttgctgccctgtttgcggtgatctccaggcacagcctcagtgctggcttggtgggcctctcagtgtcttactcattgcaggtcaccacgtacttgaactggctggttcggatgtcatctgaaatggaaaccaacatcgtggccgtggagaggctcaaggagtattcagagactgagaaggaggcgccctggcaaatccaggagacagctccgcccagcagctggccccaggtgggccgagtggaattccggaactactgcctgcgctaccgagaggacctggacttcgttctcaggcacatcaatgtcacgatcaatgggggagaaaaggtcggcatcgtggggcggacgggagctgggaagtcatccctgaccctgggcttatttcggatcaacgagtctgccgaaggagagatcatcatcgatggcatcaacatcgccaagatcggcctgcacgacctccgcttcaagatcaccatcatcccccaggaccctgttttgttttcgggttccctccgaatgaacctggacccattcagccagtactcggatgaagaagtctggacgtccctggagctggcccacctgaaggacttcgtgtcagcccttcctgacaagctagaccatgaatgtgcagaaggcggggagaacctcagtgtcgggcagcgccagcttgtgtgcctagcccgggccctgctgaggaagacgaagatccttgtgttggatgaggccacggcagccgtggacctggaaacggacgacctcatccagtccaccatccggacacagttcgaggactgcaccgtcctcaccatcgcccaccggctcaacaccatcatggactacacaagggtgatcgtcttggacaaaggagaaatccaggagtacggcgccccatcggacctcctgcagcagagaggtcttttctacagcatggccaaagacgccggcttggtgtgagccccagagctggcatatctggtcagaactgcagggcctatatgccagcgcccagggaggagtcagtacccctggtaaaccaagcctcccacactgaaaccaaaacataaaaaccaaacccagacaaccaaaacatattcaaagcagcagccaccgccatccggtcccctgcctggaactggctgtgaagacccaggagagacagagatgcgaaccacccaaaacacgcacaccctgcccctgg

SEQ ID NO: 110154 - DNA, 6518 bp, Homo sapiens
  Payload ID: 1619
  Gene Symbol: ABCC1
  Gene Name: ATP-binding cassette, sub-family C (CFTR/MRP), member 1
  Uniprot ID: P33527
  ENST ID: ENST00000621144
  CDS Start-End: 141-4736
cgccgccgccgccgccgccgccagcgctagcgccagcagccgggcccgatcacccgccgcccggtgcccgccgccgcccgcgccagcaaccgggcccgatcacccgccgcccggtgcccgccgccgcccgcgccaccggcatggcgctccggggcttctgcagcgccgatggctccgacccgctctgggactggaatgtcacgtggaataccagcaaccccgacttcaccaagtgctttcagaacacggtcctcgtgtgggtgccttgtttttacctctgggcctgtttccccttctacttcctctatctctcccgacatgaccgaggctacattcagatgacacctctcaacaaaaccaaaactgccttgggatttttgctgtggatcgtctgctgggcagacctcttctactctttctgggaaagaagtcggggcatattcctggccccagtgtttctggtcagcccaactctcttgggcatcaccatgctgcttgctacctttttaattcagctggagaggaggaagggagttcagtcttcagggatcatgctcactttctggctggtagccctagtgtgtgccctagccatcctgagatccaaaattatgacagccttaaaagaggatgcccaggtggacctgtttcgtgacatcactttctacgtctacttttccctcttactcattcagctcgtcttgtcctgtttctcagatcgctcacccctgttctcggaaaccatccacgaccctaatccctgcccagagtccagcgcttccttcctgtcgaggatcaccttctggtggatcacagggttgattgtccggggctaccgccagcccctggagggcagtgacctctggtccttaaacaaggaggacacgtcggaacaagtcgtgcctgttttggtaaagaactggaagaaggaatgcgccaagactaggaagcagccggtgaaggtcgtgtactcctccaaggatcctgcccagccgaaagagagttccaaggtggatgcgaatgaggaggtggaggctttgatcgtcaagtccccacagaaggagtggaacccctctctgtttaaggtgttatacaagacctttgggccctacttcctcatgagcttcttcttcaaggccatccacgacctgatgatgttttccgggccgcagatcttaaagttgctcatcaagttcgtgaatgacacgaaggccccagactggcagggctacttctacaccgtgctgctgtttgtcactgcctgcctgcagaccctcgtgctgcaccagtacttccacatctgcttcgtcagtggcatgaggatcaagaccgctgtcattggggctgtctatcggaaggccctggtgatcaccaattcagccagaaaatcctccacggtcggggagattgtcaacctcatgtctgtggacgctcagaggttcatggacttggccacgtacattaacatgatctggtcagcccccctgcaagtcatccttgctctctacctcctgtggctgaatctgggcccttccgtcctggctggagtggcggtgatggtcctcatggtgcccgtcaatgctgtgatggcgatgaagaccaagacgtatcaggtggcccacatgaagagcaaagacaatcggatcaagctgatgaacgaaattctcaatgggatcaaagtgctaaagctttatgcctgggagctggcattcaaggacaaggtgctggccatcaggcaggaggagctgaaggtgctgaagaagtctgcctacctgtcagccgtgggcaccttcacctgggtctgcacgccctttctggtggccctgtgcacatttgccgtctacgtgaccattgacgagaacaacatcctggatgcccagacagccttcgtgtctttggccttgttcaacatcctccggtttcccctgaacattctccccatggtcatcagcagcatcgtgcaggcgagtgtctccctcaaacgcctgaggatctttctctcccatgaggagctggaacctgacagcatcgagcgacggcctgtcaaagacggcgggggcacgaacagcatcaccgtgaggaatgccacattcacctgggccaggagcgaccctcccacactgaatggcatcaccttctccatccccgaaggtgctttggtggccgtggtgggccaggtgggctgcggaaagtcgtccctgctctcagccctcttggctgagatggacaaagtggaggggcacgtggctatcaagggctccgtggcctatgtgccacagcaggcctggattcagaatgattctctccgagaaaacatcctttttggatgtcagctggaggaaccatattacaggtccgtgatacaggcctgtgccctcctcccagacctggaaatcctgcccagtggggatcggacagagattggcgagaagggcgtgaacctgtctgggggccagaagcagcgcgtgagcctggcccgggccgtgtactccaacgctgacatttacctcttcgatgatcccctctcagcagtggatgcccatgtgggaaaacacatctttgaaaatgtgattggccccaaggggatgctgaagaacaagacgcggatcttggtcacgcacagcatgagctacttgccgcaggtggacgtcatcatcgtcatgagtggcggcaagatctctgagatgggctcctaccaggagctgctggctcgagacggcgccttcgctgagttcctgcgtacctatgccagcacagagcaggagcaggatgcagaggagaacggggtcacgggcgtcagcggtccagggaaggaagcaaagcaaatggagaatggcatgctggtgacggacagtgcagggaagcaactgcagagacagctcagcagctcctcctcctatagtggggacatcagcaggcaccacaacagcaccgcagaactgcagaaagctgaggccaagaaggaggagacctggaagctgatggaggctgacaaggcgcagacagggcaggtcaagctttccgtgtactgggactacatgaaggccatcggactcttcatctccttcctcagcatcttccttttcatgtgtaaccatgtgtccgcgctggcttccaactattggctcagcctctggactgatgaccccatcgtcaacgggactcaggagcacacgaaagtccggctgagcgtctatggagccctgggcatttcacaagggatcgccgtgtttggctactccatggccgtgtccatcggggggatcttggcttcccgctgtctgcacgtggacctgctgcacagcatcctgcggtcacccatgagcttctttgagcggacccccagtgggaacctggtgaaccgcttctccaaggagctggacacagtggactccatgatcccggaggtcatcaagatgttcatgggctccctgttcaacgtcattggtgcctgcatcgttatcctgctggccacgcccatcgccgccatcatcatcccgccccttggcctcatctacttcttcgtccagaggttctacgtggcttcctcccggcagctgaagcgcctcgagtcggtcagccgctccccggtctattcccatttcaacgagaccttgctgggggtcagcgtcattcgagccttcgaggagcaggagcgcttcatccaccagagtgacctgaaggtggacgagaaccagaaggcctattaccccagcatcgtggccaacaggtggctggccgtgcggctggagtgtgtgggcaactgcatcgttctgtttgctgccctgtttgcggtgatctccaggcacagcctcagtgctggcttggtgggcctctcagtgtcttactcattgcaggtcaccacgtacttgaactggctggttcggatgtcatctgaaatggaaaccaacatcgtggccgtggagaggctcaaggagtattcagagactgagaaggaggcgccctggcaaatccaggagacagctccgcccagcagctggccccaggtgggccgagtggaattccggaactactgcctgcgctaccgagaggacctggacttcgttctcaggcacatcaatgtcacgatcaatgggggagaaaaggtcggcatcgtggggcggacgggagctgggaagtcatccctgaccctgggcttatttcggatcaacgagtctgccgaaggagagatcatcatcgatggcatcaacatcgccaagatcggcctgcacgacctccgcttcaagatcaccatcatcccccaggaccctgttttgttttcgggttccctccgaatgaacctggacccattcagccagtactcggatgaagaagtctggacgtccctggagctggcccacctgaaggacttcgtgtcagcccttcctgacaagctagaccatgaatgtgcagaaggcggggagaacctcagtgtcgggcagcgccagcttgtgtgcctagcccgggccctgctgaggaagacgaagatccttgtgttggatgaggccacggcagccgtggacctggaaacggacgacctcatccagtccaccatccggacacagttcgaggactgcaccgtcctcaccatcgcccaccggctcaacaccatcatggactacacaagggtgatcgtcttggacaaaggagaaatccaggagtacggcgccccatcggacctcctgcagcagagaggtcttttctacagcatggccaaagacgccggcttggtgtgagccccagagctggcatatctggtcagaactgcagggcctatatgccagcgcccagggaggagtcagtacccctggtaaaccaagcctcccacactgaaaccaaaacataaaaaccaaacccagacaaccaaaacatattcaaagcagcagccaccgccatccggtcccctgcctggaactggctgtgaagacccaggagagacagagatgcgaaccacccaaaacacgcacaccctgcccctggtgccctgagacagacacacagcctcacgcccccaggaatgcaagtggtttcctggtgcttcccacggaggagttttggcagccagacttctggaggaattggttgtatagaagatcctagtgaccaaattcagcctactgcctcggatctctccagccgaagtctgtggactgcaagtctttgagatgcttctggctcccatcacctctaacatccttgtctgggtctaccaggaacgcttcatttccttggggctgcagttttgtggttgaggggcctggagaaaatcattttctccccttggcagtgtcccagggccctggatggtcctcttaccaacatctggtcttccaggcactcaaaagctgggaaccagcatctcagcgccagctctaccagttctcgttttgggccagaggcagcctctgcactcccacgcctgtcctcctggaagggacctggttggactaacggctaacctggacctggaactgtagggccaggggattgtctcagggccgacgttccacctggggcttccctccccacccaccccgactccaggctttcccttttttcttttgttcaacattgtaagaacaatcaatgctgttattactgatcccaccatgattgatgtggggtaaatattaaggagatggcctcatgggaatttgaccttgactagaaatagagactgagagtgagcaaccagctggaaggtactatgccagtcctagcagaaaaatgtgttaggggcctggcccaaagcagtgttggttgcttacagtgttgattgattttgttcttttttcttaccacctcttttctttccctctcatggtacctgctcatggttatgaagctttcaaagtaaagaacacgaaatacctcccaagtattaccagtgggtaccaaaaaaatgtccccttgagtcttttccttgtttttagatgttaattctctcccttggcatccggttagccccccagggggggcagcattgtggagaacttgatatttagttactgatgctcttccaggacacgaaaagaacccatctttgaatatcaatgatttttttttttttaagtactgttccggggagaaaaacagtctcaaaacttgaacttcttgggaagagaagtgttgggctgagaagtaacattcccaggaaatagtgagaagctcgccctgtgtttgaaaccgtgttggtctctgtgttcctggaagaaaacagggaagcagcatcttttaaagcctgttctttaaggtgtctcgttagagcccaaagtggaatccggaaggcagccagagctgaggctgccccaagactcagacttgctaagaattacgccgccgacttcaaacccagagagcatctttcttttaggcgaaaacgcatatatttattttttgtaagttataccattctttcacattagataaactaagttttgggggatccttttgtaatgacttacactggaaatgcgaacatttgcagtaaaaaaatatatatatatctatatatttta

SEQ ID NO: 110155 - DNA, 5088 bp, Homo sapiens
  Payload ID: 1620
  Gene Symbol: ABCC10
  Gene Name: ATP-binding cassette, sub-family C (CFTR/MRP), member 10
  Uniprot ID: Q5T3U5
  ENST ID: ENST00000244533
  CDS Start-End: 360-4754
ttctaatgatcccatcaccaaagtagcaaacgtagtacccaggattttttttttcctagttagtcttcatgttaagtacaatcttacctcaaaattgttaatgtctgtggtttaaaaaaaaacatgaatcagaaatggtgtgggtagtttagaaaatgagttaggttcaggtggccggttagctcagttggtcagaaaatgagttaggttcatctgggaagacttcctgggagaaaagaccctgggttctgaggtaaagtggagtagggataagatgtgcaaggcaggaagggagttgattccttaggtaagtgaattattggaggtgaggggtatgtctggctcctgagtcagccacgatgtgcctccttgtcttcccccttgtccccaggagtccagattacatcctaccctgcagtcctggatggcgcctccgacttgcagcttccttcctgctttccgtcttcccgctgctagaccttcttccagttgctttgccaccaggggcaggcccaggacccatagggctagaggtgttggcagggtgcgtggcagctgtggcctggatcagccacagcctggccctgtgggtgttggcacattcccctcatggccactcccggggtcccttggccttggccctggtagccttgctgccagctccagccctagtgctgaccgtgttgtggcattgccagcgaggcacacttctgcccccacttctcccagggcccatggcccgcctatgcttgctcatcctgcagctggctgcactcttggcctatgcactgggatgggcagctcctgggggaccacgagaaccctgggctcaggagcccctcctgcccgaggatcaagaacctgaggtggctgaagatggggagagttggctgtcacgcttttcctatgcctggctggcacccttgctggcccgtggggcctgtggagagctccggcagcctcaggacatttgccgcctcccccacagactgcagccaacctacctggctcgtgtcttccaggcacactggcaggagggggcacggctgtggagggccttgtatggggcctttggacggtgctatctggcacttggactgctgaagctggtggggaccatgttgggattctcagggcccctgttgctctccctactggtgggcttcctggaagaggggcaggagccactaagccacggcctgctctatgctctggggctagccggtggggctgtgctgggtgctgtgctgcagaatcagtatgggtatgaggtatataaggtaacacttcaggcacggggggctgtgctgaacatcctgtactgcaaggctttacagctggggcccagccgccctcctactggggaggccctgaacctactaggcactgactctgaacggctgcttaactttgctgggagcttccatgaagcctggggcctgcccctgcaactggccatcaccctctacctgctgtaccagcaggtaggcgtggccttcgtgggtggtctcatcttggcactgctgctggtacccgtcaacaaagtgattgccacccgcatcatggccagcaaccaggaaatgctacagcacaaggatgcgcgggttaagcttgtgacagagctgctgagtggcattcgggtcatcaagttctgcgggtgggagcaggcactgggagcccgagtagaggcctgccgggctcgagagctggggcgactccgggtcatcaaatacctggatgcggcctgtgtatacctgtgggctgccctaccggttgtcatctccatcgttatcttcatcacctatgtcctcatggggcaccagctcactgccaccaaggtgttcacggccctggcactggtgcgaatgctcattcttcctctcaacaacttcccttgggtgatcaatggtctcctggaggccaaagtgtccttggaccggatccagcttttcctcgaccttccaaaccacaacccccaggcctactacagcccagattgtggtagattaggagcccaaatcaagtggcttctctgttcagatccccctgcagagccatctacagtattggagctgcatggagccttgttctcctgggacccagttggaaccagcctggagaccttcatcagtcatctcgaagtgaaaaagggtatgctggtgggcatcgtggggaaggtcggctgtgggaagagctccctgctggctgccatcgctggagagctccacaggctgcgtgggcatgtggcagtgcgggggctgtccaagggctttggcctggccacccaggaaccctggatccagtttgccaccatccgagacaacatcctctttgggaagacatttgatgcacagctgtacaaggaggtgctagaagcctgcgccctcaatgatgacctcagtatcctgcctgctggagaccagacagaggtgggggagaagggtgtcacccttagcggaggacagcgtgcccggattgcccttgctcgtgctgtctaccaggaaaaggagctctatctcctcgatgaccctctggccgctgtggatgcagatgtggccaaccacctgctgcacaggtgcatcctgggcatgctgagctacaccacacggctgctctgcacccaccgcactgagtacctggagagggctgacgcggtgctgctgatggaggccgggcgcctcatccgggctggacctccctctgagattctgccactggtacaagctgtccccaaagcctgggctgagaatggacaagagtctgactcagccacagcccagtcagtacagaacccagagaaaacaaaggaggggctggaggaggagcagagcacatctggtcgcctgctgcaggaagaaagcaagaaggagggcgccgtggccttgcacgtgtaccaagcttactggaaggccgtgggccagggcttggccttagccatcctcttctctctgcttctcatgcaagccacgcggaacgctgctgactggtggctctcccactggatctctcagctgaaggctgagaatagctcccaggaggcgcaaccctccaccagcccagcttctatggggctcttctctccgcagctgctcctcttttcccctggaaacctctacatcccagtgttcccactgcccaaagctgcccccaatggctcctcagacatccgtttctacctcaccgtgtatgcgaccattgctggtgtaaattccctctgcacccttctccgggcagtgctctttgcagcaggcacccttcaagcagctgccactctgcatcgccgcctgctgcatcgagtccttatggcaccagtgactttcttcaatgccacacccacgggccggatcctaaaccgcttctcctctgatgtggcctgtgcggatgacagcctgcccttcatcctcaacatcctcctggccaacgcggcaggcctgctggggctcctggccgtgctgggctctggcctgccctggctgctgctcctgctgccgcctttgagcatcatgtactatcacgtgcagcgccactacagggcctcctcacgggagctgcggcgcctgggcagcctcaccctgtctccactgtatagccatctggccgataccttggctggcctctctgtgctccgggccacaggggccacctacaggtttgaggaggagaacctgcgactccttgagctaaaccagaggtgccagtttgccaccagtgccacaatgcagtggctggacattcggctacagctcatgggggcggcagtggtcagcgctatcgcaggcatcgctctggtgcagcaccagcagggcctcgctaacccagggctggtgggcttgtcgctgtcttatgccctgtccctgacgggcctgctctcgggcctggtgagcagcttcacacagacagaggccatgctggtgagcgtcgagcggctggaagagtacacctgtgacctgccccaggaaccccagggccagccactgcagctgggcaccggctggctgacccaggggggcgtggagttccaggacgtggtgttggcgtaccggccagggctgccgaatgccctggatggagtgaccttctgcgtgcagcctggagagaagttgggcatcgtgggccgcacaggctccggcaagtcttccctgttgttggtgctcttccggctgctagagcccagttcagggcgagtgctgctggacggcgtggacaccagccagctggagctggcccagctcagatcccagttggctatcatcccccaggagccctttttgttcagtgggactgttcgggaaaacctggacccccagggcctacataaggacagggccttgtggcaggccctgaagcagtgccacctgagtgaggtgattacatccatgggtggtctggatggtgagctgggtgaggggggccggagcttatctcttgggcagaggcagctgttgtgtttggccagggctctcctcacagatgccaagatcctgtgtatcgatgaggccacagcaagtgtggaccagaagacagaccagctgctccagcagaccatctgcaaacgctttgccaacaagacagtgctgaccattgcccataggctcaacacgatcctgaactcagaccgggtgctggtgctacaagcggggagagtggtagagctggactccccggccaccctgcgcaaccagccccactccctgttccagcagctgctgcagagcagccagcagggagtccctgcctcactcggaggtccctgagcccaatcccacaccctgcagagttctcccctctctctgatccaggccgggcctatacagaggtgctggctgcttgtttacattctcctctggggctctacctctccacacttccccagaagggaaaagggcaccctggattactctttggaaatcactccttggtgggcagcatcctgaggcttccccagaaccaggcctctgctctggccctcttgcatctggaacgccaggtgggtttttctggcataggagcccacttgcattttcatagttttatttgataaaattccatcttacattctgtgtattaaaaaaataatatttctggtgt

SEQ ID NO: 110156 - DNA, 933 bp, Homo sapiens
  Payload ID: 1620
  Gene Symbol: ABCC10
  Gene Name: ATP-binding cassette, sub-family C (CFTR/MRP), member 10
  ENST ID: ENST00000372515
  CDS Start-End: 103-933
gtgagcgaatactccacgtgagaggtaggcgtggccttcgtgggtggtctcatcttggcactgctgctggtacccgtcaacaaagtgattgccacccgcatcatggccagcaaccaggaaatgctacagcacaaggatgcgcgggttaagcttgtgacagagctgctgagtggcattcgggtcatcaagttctgcgggtgggagcaggcactgggagcccgagtagaggcctgccgggctcgagagctggggcgactccgggtcatcaaatacctggatgcggcctgtgtatacctgtgggctgccctaccggttgtcatctccatcgttatcttcatcacctatgtcctcatggggcaccagctcactgccaccaaggtgttcacggccctggcactggtgcgaatgctcattcttcctctcaacaacttcccttgggtgatcaatggtctcctggaggccaaagtgtccttggaccggatccagcttttcctcgaccttccaaaccacaacccccaggcctactacagcccagatccccctgcagagccatctacagtattggagctgcatggagccttgttctcctgggacccagttggaaccagcctggagaccttcatcagtcatctcgaagtgaaaaagggtatgctggtgggcatcgtggggaaggtcggctgtgggaagagctccctgctggctgccatcgctggagagctccacaggctgcgtgggcatgtggcagtgcgggggctgtccaagggctttggcctggccacccaggaaccctggatccagtttgccaccatccgagacaacatcctctttgggaagacatttgatgcacagctgtacaaggaggtgctagaagcctgcgccctcaatgatgacctcagtatcctgcctgctggagaccagacagaggtgggggag

SEQ ID NO: 110157 - DNA, 5033 bp, Homo sapiens
  Payload ID: 1620
  Gene Symbol: ABCC10
  Gene Name: ATP-binding cassette, sub-family C (CFTR/MRP), member 10
  Uniprot ID: Q5T3U5
  ENST ID: ENST00000372530
  CDS Start-End: 216-4694
ggcgaatagcgccggctaggtcttccaacctctaggtggggtgccagccggggcgggcccagcaccccggccgggcagtactttttttttttttgcatacaccagttctcaggatatcggaatccggtgcacagcagcttcttcaggtttgaggttccggatgcctgggggcggagaaacgggaggggaaaaacagatggcaaggtgaggcgtccatggaacgacttctggcccagctgtgcggcagcagcgcagcgtggccgctcccgctgtgggagggggacaccacaggccactgcttcacccagctggtgctcagcgccctgccccacgcgctcctcgccgtgctcagtgcctgttacttgggcaccccgaggagtccagattacatcctaccctgcagtcctggatggcgcctccgacttgcagcttccttcctgctttccgtcttcccgctgctagaccttcttccagttgctttgccaccaggggcaggcccaggacccatagggctagaggtgttggcagggtgcgtggcagctgtggcctggatcagccacagcctggccctgtgggtgttggcacattcccctcatggccactcccggggtcccttggccttggccctggtagccttgctgccagctccagccctagtgctgaccgtgttgtggcattgccagcgaggcacacttctgcccccacttctcccagggcccatggcccgcctatgcttgctcatcctgcagctggctgcactcttggcctatgcactgggatgggcagctcctgggggaccacgagaaccctgggctcaggagcccctcctgcccgaggatcaagaacctgaggtggctgaagatggggagagttggctgtcacgcttttcctatgcctggctggcacccttgctggcccgtggggcctgtggagagctccggcagcctcaggacatttgccgcctcccccacagactgcagccaacctacctggctcgtgtcttccaggcacactggcaggagggggcacggctgtggagggccttgtatggggcctttggacggtgctatctggcacttggactgctgaagctggtggggaccatgttgggattctcagggcccctgttgctctccctactggtgggcttcctggaagaggggcaggagccactaagccacggcctgctctatgctctggggctagccggtggggctgtgctgggtgctgtgctgcagaatcagtatgggtatgaggtatataaggtaacacttcaggcacggggggctgtgctgaacatcctgtactgcaaggctttacagctggggcccagccgccctcctactggggaggccctgaacctactaggcactgactctgaacggctgcttaactttgctgggagcttccatgaagcctggggcctgcccctgcaactggccatcaccctctacctgctgtaccagcaggtaggcgtggccttcgtgggtggtctcatcttggcactgctgctggtacccgtcaacaaagtgattgccacccgcatcatggccagcaaccaggaaatgctacagcacaaggatgcgcgggttaagcttgtgacagagctgctgagtggcattcgggtcatcaagttctgcgggtgggagcaggcactgggagcccgagtagaggcctgccgggctcgagagctggggcgactccgggtcatcaaatacctggatgcggcctgtgtatacctgtgggctgccctaccggttgtcatctccatcgttatcttcatcacctatgtcctcatggggcaccagctcactgccaccaaggtgttcacggccctggcactggtgcgaatgctcattcttcctctcaacaacttcccttgggtgatcaatggtctcctggaggccaaagtgtccttggaccggatccagcttttcctcgaccttccaaaccacaacccccaggcctactacagcccagatccccctgcagagccatctacagtattggagctgcatggagccttgttctcctgggacccagttggaaccagcctggagaccttcatcagtcatctcgaagtgaaaaagggtatgctggtgggcatcgtggggaaggtcggctgtgggaagagctccctgctggctgccatcgctggagagctccacaggctgcgtgggcatgtggcagtgcgggggctgtccaagggctttggcctggccacccaggaaccctggatccagtttgccaccatccgagacaacatcctctttgggaagacatttgatgcacagctgtacaaggaggtgctagaagcctgcgccctcaatgatgacctcagtatcctgcctgctggagaccagacagaggtgggggagaagggtgtcacccttagcggaggacagcgtgcccggattgcccttgctcgtgctgtctaccaggaaaaggagctctatctcctcgatgaccctctggccgctgtggatgcagatgtggccaaccacctgctgcacaggtgcatcctgggcatgctgagctacaccacacggctgctctgcacccaccgcactgagtacctggagagggctgacgcggtgctgctgatggaggccgggcgcctcatccgggctggacctccctctgagattctgccactggtacaagctgtccccaaagcctgggctgagaatggacaagagtctgactcagccacagcccagtcagtacagaacccagagaaaacaaaggaggggctggaggaggagcagagcacatctggtcgcctgctgcaggaagaaagcaagaaggagggcgccgtggccttgcacgtgtaccaagcttactggaaggccgtgggccagggcttggccttagccatcctcttctctctgcttctcatgcaagccacgcggaacgctgctgactggtggctctcccactggatctctcagctgaaggctgagaatagctcccaggaggcgcaaccctccaccagcccagcttctatggggctcttctctccgcagctgctcctcttttcccctggaaacctctacatcccagtgttcccactgcccaaagctgcccccaatggctcctcagacatccgtttctacctcaccgtgtatgcgaccattgctggtgtaaattccctctgcacccttctccgggcagtgctctttgcagcaggcacccttcaagcagctgccactctgcatcgccgcctgctgcatcgagtccttatggcaccagtgactttcttcaatgccacacccacgggccggatcctaaaccgcttctcctctgatgtggcctgtgcggatgacagcctgcccttcatcctcaacatcctcctggccaacgcggcaggcctgctggggctcctggccgtgctgggctctggcctgccctggctgctgctcctgctgccgcctttgagcatcatgtactatcacgtgcagcgccactacagggcctcctcacgggagctgcggcgcctgggcagcctcaccctgtctccactgtatagccatctggccgataccttggctggcctctctgtgctccgggccacaggggccacctacaggtttgaggaggagaacctgcgactccttgagctaaaccagaggtgccagtttgccaccagtgccacaatgcagtggctggacattcggctacagctcatgggggcggcagtggtcagcgctatcgcaggcatcgctctggtgcagcaccagcagggcctcgctaacccagggctggtgggcttgtcgctgtcttatgccctgtccctgacgggcctgctctcgggcctggtgagcagcttcacacagacagaggccatgctggtgagcgtcgagcggctggaagagtacacctgtgacctgccccaggaaccccagggccagccactgcagctgggcaccggctggctgacccaggggggcgtggagttccaggacgtggtgttggcgtaccggccagggctgccgaatgccctggatggagtgaccttctgcgtgcagcctggagagaagttgggcatcgtgggccgcacaggctccggcaagtcttccctgttgttggtgctcttccggctgctagagcccagttcagggcgagtgctgctggacggcgtggacaccagccagctggagctggcccagctcagatcccagttggctatcatcccccaggagccctttttgttcagtgggactgttcgggaaaacctggacccccagggcctacataaggacagggccttgtggcaggccctgaagcagtgccacctgagtgaggtgattacatccatgggtggtctggatggtgagctgggtgaggggggccggagcttatctcttgggcagaggcagctgttgtgtttggccagggctctcctcacagatgccaagatcctgtgtatcgatgaggccacagcaagtgtggaccagaagacagaccagctgctccagcagaccatctgcaaacgctttgccaacaagacagtgctgaccattgcccataggctcaacacgatcctgaactcagaccgggtgctggtgctacaagcggggagagtggtagagctggactccccggccaccctgcgcaaccagccccactccctgttccagcagctgctgcagagcagccagcagggagtccctgcctcactcggaggtccctgagcccaatcccacaccctgcagagttctcccctctctctgatccaggccgggcctatacagaggtgctggctgcttgtttacattctcctctggggctctacctctccacacttccccagaagggaaaagggcaccctggattactctttggaaatcactccttggtgggcagcatcctgaggcttccccagaaccaggcctctgctctggccctcttgcatctggaacgccaggtgggtttttctggcataggagcccacttgcattttcatagttttatttgataaaattccatcttacattctgtgtattaaaaaaataatatttctggtgtgaggc

SEQ ID NO: 110158 - DNA, 721 bp, Homo sapiens
  Payload ID: 1620
  Gene Symbol: ABCC10
  Gene Name: ATP-binding cassette, sub-family C (CFTR/MRP), member 10
  ENST ID: ENST00000505344
  CDS Start-End: 1-390
gaggagggcatagccaggaaggctttatataaactcacagcagccagggctgatcagggggctgaaatggaggacaggatgagcaggcaaggacagcgaactcctagtgcccagatcctgtgtatcgatgaggccacagcaagtgtggaccagaagacagaccagctgctccagcagaccatctgcaaacgctttgccaacaagacagtgctgaccattgcccataggctcaacacgatcctgaactcagaccgggtgctggtgctacaagcggggagagtggtagagctggactccccggccaccctgcgcaaccagccccactccctgttccagcagctgctgcagagcagccagcagggagtccctgcctcactcggaggtccctgagcccaatcccacaccctgcagagttctcccctctctctgatccaggccgggcctatacagaggtgctggctgcttgtttacattctcctctggggctctacctctccacacttccccagaagggaaaagggcaccctggattactctttggaaatcactccttggtgggcagcatcctgaggcttccccagaaccaggcctctgctctggccctcttgcatctggaacgccaggtgggtttttctggcataggagcccacttgcattttcatagttttatttgataaaattccatcttacattctgtgtattaaaaaaataatatttctgg

SEQ ID NO: 110159 - DNA, 4463 bp, Homo sapiens
  Payload ID: 1621
  Gene Symbol: ABCC11
  Gene Name: ATP-binding cassette, sub-family C (CFTR/MRP), member 11
  Uniprot ID: Q96J66
  ENST ID: ENST00000353782
  CDS Start-End: 65-4099
gtgtatttgaataaaccaggttggcaaatcatactatagctgaaagaattggcaggaactgaaaatgactaggaagaggacatactgggtgcccaactcttctggtggcctcgtgaatcgtggcatcgacataggcgatgacatggtttcaggacttatttataaaacctatactctccaagatggcccctggagtcagcaagagagaaatcctgaggctccagggagggcagctgtcccaccgtgggggaagtatgatgctgccttgagaaccatgattcccttccgtcccaagccgaggtttcctgccccccagcccctggacaatgctggcctgttctcctacctcaccgtgtcatggctcaccccgctcatgatccaaagcttacggagtcgcttagatgagaacaccatccctccactgtcagtccatgatgcctcagacaaaaatgtccaaaggcttcaccgcctttgggaagaagaagtctcaaggcgagggattgaaaaagcttcagtgcttctggtgatgctgaggttccagagaacaaggttgattttcgatgcacttctgggcatctgcttctgcattgccagtgtactcgggccaatattgattataccaaagatcctggaatattcagaagagcagttggggaatgttgtccatggagtgggactctgctttgccctttttctctccgaatgtgtgaagtctctgagtttctcctccagttggatcatcaaccaacgcacagccatcaggttccgagcagctgtttcctcctttgcctttgagaagctcatccaatttaagtctgtaatacacatcacctcaggagaggccatcagcttcttcaccggtgatgtaaactacctgtttgaaggggtgtgctatggacccctagtactgatcacctgcgcatcgctggtcatctgcagcatttcttcctacttcattattggatacactgcatttattgccatcttatgctatctcctggttttcccactggcggtattcatgacaagaatggctgtgaaggctcagcatcacacatctgaggtcagcgaccagcgcatccgtgtgaccagtgaagttctcacttgcattaagctgattaaaatgtacacatgggagaaaccatttgcaaaaatcattgaagacctaagaaggaaggaaaggaaactattggagaagtgcgggcttgtccagagcctgacaagtataaccttgttcatcatccccacagtggccacagcggtctgggttctcatccacacatccttaaagctgaaactcacagcgtcaatggccttcagcatgctggcctccttgaatctccttcggctgtcagtgttctttgtgcctattgcagtcaaaggtctcacgaattccaagtctgcagtgatgaggttcaagaagtttttcctccaggagagccctgttttctatgtccagacattacaagaccccagcaaagctctggtctttgaggaggccaccttgtcatggcaacagacctgtcccgggatcgtcaatggggcactggagctggagaggaacgggcatgcttctgaggggatgaccaggcctagagatgccctcgggccagaggaagaagggaacagcctgggcccagagttgcacaagatcaacctggtggtgtccaaggggatgatgttaggggtctgcggcaacacggggagtggtaagagcagcctgttgtcagccatcctggaggagatgcacttgctcgagggctcggtgggggtgcagggaagcctggcctatgtcccccagcaggcctggatcgtcagcgggaacatcagggagaacatcctcatgggaggcgcatatgacaaggcccgatacctccaggtgctccactgctgctccctgaatcgggacctggaacttctgccctttggagacatgacagagattggagagcggggcctcaacctctctggggggcagaaacagaggatcagcctggcccgcgccgtctattccgaccgtcagatctacctgctggacgaccccctgtctgctgtggacgcccacgtggggaagcacatttttgaggagtgcattaagaagacactcagggggaagacggtcgtcctggtgacccaccagctgcagtacttagaattttgtggccagatcattttgttggaaaatgggaaaatctgtgaaaatggaactcacagtgagttaatgcagaaaaaggggaaatatgcccaacttatccagaagatgcacaaggaagccacttcggacatgttgcaggacacagcaaagatagcagagaagccaaaggtagaaagtcaggctctggccacctccctggaagagtctctcaacggaaatgctgtgccggagcatcagctcacacaggaggaggagatggaagaaggctccttgagttggagggtctaccaccactacatccaggcagctggaggttacatggtctcttgcataattttcttcttcgtggtgctgatcgtcttcttaacgatcttcagcttctggtggctgagctactggttggagcagggctcggggaccaatagcagccgagagagcaatggaaccatggcagacctgggcaacattgcagacaatcctcaactgtccttctaccagctggtgtacgggctcaacgccctgctcctcatctgtgtgggggtctgctcctcagggattttcaccaaggtcacgaggaaggcatccacggccctgcacaacaagctcttcaacaaggttttccgctgccccatgagtttctttgacaccatcccaataggccggcttttgaactgcttcgcaggggacttggaacagctggaccagctcttgcccatcttttcagagcagttcctggtcctgtccttaatggtgatcgccgtcctgttgattgtcagtgtgctgtctccatatatcctgttaatgggagccataatcatggttatttgcttcatttattatatgatgttcaagaaggccatcggtgtgttcaagagactggagaactatagccggtctcctttattctcccacatcctcaattctctgcaaggcctgagctccatccatgtctatggaaaaactgaagacttcatcagccagtttaagaggctgactgatgcgcagaataactacctgctgttgtttctatcttccacacgatggatggcattgaggctggagatcatgaccaaccttgtgaccttggctgttgccctgttcgtggcttttggcatttcctccaccccctactcctttaaagtcatggctgtcaacatcgtgctgcagctggcgtccagcttccaggccactgcccggattggcttggagacagaggcacagttcacggctgtagagaggatactgcagtacatgaagatgtgtgtctcggaagctcctttacacatggaaggcacaagttgtccccaggggtggccacagcatggggaaatcatatttcaggattatcacatgaaatacagagacaacacacccaccgtgcttcacggcatcaacctgaccatccgcggccacgaagtggtgggcatcgtgggaaggacgggctctgggaagtcctccttgggcatggctctcttccgcctggtggagcccatggcaggccggattctcattgacggcgtggacatttgcagcatcggcctggaggacttgcggtccaagctctcagtgatccctcaagatccagtgctgctctcaggaaccatcagattcaacctagatccctttgaccgtcacactgaccagcagatctgggatgccttggagaggacattcctgaccaaggccatcatccttatcgatgaagccacagcctccattgacatggagacagacaccctgatccagcgcacaatccgtgaagccttccagggctgcaccgtgctcgtcattgcccaccgtgtcaccactgtgctgaactgtgaccacatcctggttatgggcaatgggaaggtggtagaatttgatcggccggaggtactgcggaagaagcctgggtcattgttcgcagccctcatggccacagccacttcttcactgagataaggagatgtggagacttcatggaggctggcagctgagctcagaggttcacacaggtgcagcttcgaggcccacagtctgcgaccttcttgtttggagatgagaacttctcctggaagcaggggtaaatgtagggggggtggggattgctggatggaaaccctggaataggctacttgatggctctcaagaccttagaaccccagaaccatctaagacatgggattcagtgatcatgtggttctccttttaacttacatgctgaataattttataataaggtaaaagcttatagttttctgatctgtgttagaagtgttgcaaatgctgtactgactttgtaaaatataaaactaaggaaaactca

SEQ ID NO: 110160 - DNA, 4612 bp, Homo sapiens
  Payload ID: 1621
  Gene Symbol: ABCC11
  Gene Name: ATP-binding cassette, sub-family C (CFTR/MRP), member 11
  Uniprot ID: Q96J66
  ENST ID: ENST00000356608
  CDS Start-End: 100-4248
gtcacctggatagcgcaaaggaaacaagagaaaggaacagagcccctcttctggcctctgggctaccatacagaaaagcagaattggcaggaactgaaaatgactaggaagaggacatactgggtgcccaactcttctggtggcctcgtgaatcgtggcatcgacataggcgatgacatggtttcaggacttatttataaaacctatactctccaagatggcccctggagtcagcaagagagaaatcctgaggctccagggagggcagctgtcccaccgtgggggaagtatgatgctgccttgagaaccatgattcccttccgtcccaagccgaggtttcctgccccccagcccctggacaatgctggcctgttctcctacctcaccgtgtcatggctcaccccgctcatgatccaaagcttacggagtcgcttagatgagaacaccatccctccactgtcagtccatgatgcctcagacaaaaatgtccaaaggcttcaccgcctttgggaagaagaagtctcaaggcgagggattgaaaaagcttcagtgcttctggtgatgctgaggttccagagaacaaggttgattttcgatgcacttctgggcatctgcttctgcattgccagtgtactcgggccaatattgattataccaaagatcctggaatattcagaagagcagttggggaatgttgtccatggagtgggactctgctttgccctttttctctccgaatgtgtgaagtctctgagtttctcctccagttggatcatcaaccaacgcacagccatcaggttccgagcagctgtttcctcctttgcctttgagaagctcatccaatttaagtctgtaatacacatcacctcaggagaggccatcagcttcttcaccggtgatgtaaactacctgtttgaaggggtgtgctatggacccctagtactgatcacctgcgcatcgctggtcatctgcagcatttcttcctacttcattattggatacactgcatttattgccatcttatgctatctcctggttttcccactggcggtattcatgacaagaatggctgtgaaggctcagcatcacacatctgaggtcagcgaccagcgcatccgtgtgaccagtgaagttctcacttgcattaagctgattaaaatgtacacatgggagaaaccatttgcaaaaatcattgaagacctaagaaggaaggaaaggaaactattggagaagtgcgggcttgtccagagcctgacaagtataaccttgttcatcatccccacagtggccacagcggtctgggttctcatccacacatccttaaagctgaaactcacagcgtcaatggccttcagcatgctggcctccttgaatctccttcggctgtcagtgttctttgtgcctattgcagtcaaaggtctcacgaattccaagtctgcagtgatgaggttcaagaagtttttcctccaggagagccctgttttctatgtccagacattacaagaccccagcaaagctctggtctttgaggaggccaccttgtcatggcaacagacctgtcccgggatcgtcaatggggcactggagctggagaggaacgggcatgcttctgaggggatgaccaggcctagagatgccctcgggccagaggaagaagggaacagcctgggcccagagttgcacaagatcaacctggtggtgtccaaggggatgatgttaggggtctgcggcaacacggggagtggtaagagcagcctgttgtcagccatcctggaggagatgcacttgctcgagggctcggtgggggtgcagggaagcctggcctatgtcccccagcaggcctggatcgtcagcgggaacatcagggagaacatcctcatgggaggcgcatatgacaaggcccgatacctccaggtgctccactgctgctccctgaatcgggacctggaacttctgccctttggagacatgacagagattggagagcggggcctcaacctctctggggggcagaaacagaggatcagcctggcccgcgccgtctattccgaccgtcagatctacctgctggacgaccccctgtctgctgtggacgcccacgtggggaagcacatttttgaggagtgcattaagaagacactcagggggaagacggtcgtcctggtgacccaccagctgcagtacttagaattttgtggccagatcattttgttggaaaatgggaaaatctgtgaaaatggaactcacagtgagttaatgcagaaaaaggggaaatatgcccaacttatccagaagatgcacaaggaagccacttcggacatgttgcaggacacagcaaagatagcagagaagccaaaggtagaaagtcaggctctggccacctccctggaagagtctctcaacggaaatgctgtgccggagcatcagctcacacaggaggaggagatggaagaaggctccttgagttggagggtctaccaccactacatccaggcagctggaggttacatggtctcttgcataattttcttcttcgtggtgctgatcgtcttcttaacgatcttcagcttctggtggctgagctactggttggagcagggctcggggaccaatagcagccgagagagcaatggaaccatggcagacctgggcaacattgcagacaatcctcaactgtccttctaccagctggtgtacgggctcaacgccctgctcctcatctgtgtgggggtctgctcctcagggattttcaccaaggtcacgaggaaggcatccacggccctgcacaacaagctcttcaacaaggttttccgctgccccatgagtttctttgacaccatcccaataggccggcttttgaactgcttcgcaggggacttggaacagctggaccagctcttgcccatcttttcagagcagttcctggtcctgtccttaatggtgatcgccgtcctgttgattgtcagtgtgctgtctccatatatcctgttaatgggagccataatcatggttatttgcttcatttattatatgatgttcaagaaggccatcggtgtgttcaagagactggagaactatagccggtctcctttattctcccacatcctcaattctctgcaaggcctgagctccatccatgtctatggaaaaactgaagacttcatcagccagtttaagaggctgactgatgcgcagaataactacctgctgttgtttctatcttccacacgatggatggcattgaggctggagatcatgaccaaccttgtgaccttggctgttgccctgttcgtggcttttggcatttcctccaccccctactcctttaaagtcatggctgtcaacatcgtgctgcagctggcgtccagcttccaggccactgcccggattggcttggagacagaggcacagttcacggctgtagagaggatactgcagtacatgaagatgtgtgtctcggaagctcctttacacatggaaggcacaagttgtccccaggggtggccacagcatggggaaatcatatttcaggattatcacatgaaatacagagacaacacacccaccgtgcttcacggcatcaacctgaccatccgcggccacgaagtggtgggcatcgtgggaaggacgggctctgggaagtcctccttgggcatggctctcttccgcctggtggagcccatggcaggccggattctcattgacggcgtggacatttgcagcatcggcctggaggacttgcggtccaagctctcagtgatccctcaagatccagtgctgctctcaggaaccatcagattcaacctagatccctttgaccgtcacactgaccagcagatctgggatgccttggagaggacattcctgaccaaggccatctcaaagttccccaaaaagctgcatacagatgtggtggaaaacggtggaaacttctctgtgggggagaggcagctgctctgcattgccagggctgtgcttcgcaactccaagatcatccttatcgatgaagccacagcctccattgacatggagacagacaccctgatccagcgcacaatccgtgaagccttccagggctgcaccgtgctcgtcattgcccaccgtgtcaccactgtgctgaactgtgaccacatcctggttatgggcaatgggaaggtggtagaatttgatcggccggaggtactgcggaagaagcctgggtcattgttcgcagccctcatggccacagccacttcttcactgagataaggagatgtggagacttcatggaggctggcagctgagctcagaggttcacacaggtgcagcttcgaggcccacagtctgcgaccttcttgtttggagatgagaacttctcctggaagcaggggtaaatgtagggggggtggggattgctggatggaaaccctggaataggctacttgatggctctcaagaccttagaaccccagaaccatctaagacatgggattcagtgatcatgtggttctccttttaacttacatgctgaataattttataataaggtaaaagcttatagttttctgatctgtgttagaagtgttgcaaatgctgtactgactttgtaaaatataaaactaaggaaaactca

SEQ ID NO: 110161 - DNA, 4862 bp, Homo sapiens
  Payload ID: 1621
  Gene Symbol: ABCC11
  Gene Name: ATP-binding cassette, sub-family C (CFTR/MRP), member 11
  Uniprot ID: Q96J66
  ENST ID: ENST00000394747
  CDS Start-End: 351-4499
actgggataaagcaagaagactgattttatgagcaggggtttgatacatcaaaggagattgcccaggatcaagggtgcggtgttgggggtgggttggggagggtggttagagaaggtttcactaagtgatttgggcctgaggcctgagaagatgtttaaaaagagggatcaagcacaggctaaggagaggaaagagcaggcacccaaacctctgcatggccccaatatgctccctgcagggtagtgccccctcttctggctgctcaaggcgagatctaagcttcttctaactcctgctgtcttttcatattctctgattctgggaaacgaagaattggcaggaactgaaaatgactaggaagaggacatactgggtgcccaactcttctggtggcctcgtgaatcgtggcatcgacataggcgatgacatggtttcaggacttatttataaaacctatactctccaagatggcccctggagtcagcaagagagaaatcctgaggctccagggagggcagctgtcccaccgtgggggaagtatgatgctgccttgagaaccatgattcccttccgtcccaagccgaggtttcctgccccccagcccctggacaatgctggcctgttctcctacctcaccgtgtcatggctcaccccgctcatgatccaaagcttacggagtcgcttagatgagaacaccatccctccactgtcagtccatgatgcctcagacaaaaatgtccaaaggcttcaccgcctttgggaagaagaagtctcaaggcgagggattgaaaaagcttcagtgcttctggtgatgctgaggttccagagaacaaggttgattttcgatgcacttctgggcatctgcttctgcattgccagtgtactcgggccaatattgattataccaaagatcctggaatattcagaagagcagttggggaatgttgtccatggagtgggactctgctttgccctttttctctccgaatgtgtgaagtctctgagtttctcctccagttggatcatcaaccaacgcacagccatcaggttccgagcagctgtttcctcctttgcctttgagaagctcatccaatttaagtctgtaatacacatcacctcaggagaggccatcagcttcttcaccggtgatgtaaactacctgtttgaaggggtgtgctatggacccctagtactgatcacctgcgcatcgctggtcatctgcagcatttcttcctacttcattattggatacactgcatttattgccatcttatgctatctcctggttttcccactggcggtattcatgacaagaatggctgtgaaggctcagcatcacacatctgaggtcagcgaccagcgcatccgtgtgaccagtgaagttctcacttgcattaagctgattaaaatgtacacatgggagaaaccatttgcaaaaatcattgaagacctaagaaggaaggaaaggaaactattggagaagtgcgggcttgtccagagcctgacaagtataaccttgttcatcatccccacagtggccacagcggtctgggttctcatccacacatccttaaagctgaaactcacagcgtcaatggccttcagcatgctggcctccttgaatctccttcggctgtcagtgttctttgtgcctattgcagtcaaaggtctcacgaattccaagtctgcagtgatgaggttcaagaagtttttcctccaggagagccctgttttctatgtccagacattacaagaccccagcaaagctctggtctttgaggaggccaccttgtcatggcaacagacctgtcccgggatcgtcaatggggcactggagctggagaggaacgggcatgcttctgaggggatgaccaggcctagagatgccctcgggccagaggaagaagggaacagcctgggcccagagttgcacaagatcaacctggtggtgtccaaggggatgatgttaggggtctgcggcaacacggggagtggtaagagcagcctgttgtcagccatcctggaggagatgcacttgctcgagggctcggtgggggtgcagggaagcctggcctatgtcccccagcaggcctggatcgtcagcgggaacatcagggagaacatcctcatgggaggcgcatatgacaaggcccgatacctccaggtgctccactgctgctccctgaatcgggacctggaacttctgccctttggagacatgacagagattggagagcggggcctcaacctctctggggggcagaaacagaggatcagcctggcccgcgccgtctattccgaccgtcagatctacctgctggacgaccccctgtctgctgtggacgcccacgtggggaagcacatttttgaggagtgcattaagaagacactcagggggaagacggtcgtcctggtgacccaccagctgcagtacttagaattttgtggccagatcattttgttggaaaatgggaaaatctgtgaaaatggaactcacagtgagttaatgcagaaaaaggggaaatatgcccaacttatccagaagatgcacaaggaagccacttcggacatgttgcaggacacagcaaagatagcagagaagccaaaggtagaaagtcaggctctggccacctccctggaagagtctctcaacggaaatgctgtgccggagcatcagctcacacaggaggaggagatggaagaaggctccttgagttggagggtctaccaccactacatccaggcagctggaggttacatggtctcttgcataattttcttcttcgtggtgctgatcgtcttcttaacgatcttcagcttctggtggctgagctactggttggagcagggctcggggaccaatagcagccgagagagcaatggaaccatggcagacctgggcaacattgcagacaatcctcaactgtccttctaccagctggtgtacgggctcaacgccctgctcctcatctgtgtgggggtctgctcctcagggattttcaccaaggtcacgaggaaggcatccacggccctgcacaacaagctcttcaacaaggttttccgctgccccatgagtttctttgacaccatcccaataggccggcttttgaactgcttcgcaggggacttggaacagctggaccagctcttgcccatcttttcagagcagttcctggtcctgtccttaatggtgatcgccgtcctgttgattgtcagtgtgctgtctccatatatcctgttaatgggagccataatcatggttatttgcttcatttattatatgatgttcaagaaggccatcggtgtgttcaagagactggagaactatagccggtctcctttattctcccacatcctcaattctctgcaaggcctgagctccatccatgtctatggaaaaactgaagacttcatcagccagtttaagaggctgactgatgcgcagaataactacctgctgttgtttctatcttccacacgatggatggcattgaggctggagatcatgaccaaccttgtgaccttggctgttgccctgttcgtggcttttggcatttcctccaccccctactcctttaaagtcatggctgtcaacatcgtgctgcagctggcgtccagcttccaggccactgcccggattggcttggagacagaggcacagttcacggctgtagagaggatactgcagtacatgaagatgtgtgtctcggaagctcctttacacatggaaggcacaagttgtccccaggggtggccacagcatggggaaatcatatttcaggattatcacatgaaatacagagacaacacacccaccgtgcttcacggcatcaacctgaccatccgcggccacgaagtggtgggcatcgtgggaaggacgggctctgggaagtcctccttgggcatggctctcttccgcctggtggagcccatggcaggccggattctcattgacggcgtggacatttgcagcatcggcctggaggacttgcggtccaagctctcagtgatccctcaagatccagtgctgctctcaggaaccatcagattcaacctagatccctttgaccgtcacactgaccagcagatctgggatgccttggagaggacattcctgaccaaggccatctcaaagttccccaaaaagctgcatacagatgtggtggaaaacggtggaaacttctctgtgggggagaggcagctgctctgcattgccagggctgtgcttcgcaactccaagatcatccttatcgatgaagccacagcctccattgacatggagacagacaccctgatccagcgcacaatccgtgaagccttccagggctgcaccgtgctcgtcattgcccaccgtgtcaccactgtgctgaactgtgaccacatcctggttatgggcaatgggaaggtggtagaatttgatcggccggaggtactgcggaagaagcctgggtcattgttcgcagccctcatggccacagccacttcttcactgagataaggagatgtggagacttcatggaggctggcagctgagctcagaggttcacacaggtgcagcttcgaggcccacagtctgcgaccttcttgtttggagatgagaacttctcctggaagcaggggtaaatgtagggggggtggggattgctggatggaaaccctggaataggctacttgatggctctcaagaccttagaaccccagaaccatctaagacatgggattcagtgatcatgtggttctccttttaacttacatgctgaataattttataataaggtaaaagcttatagttttctgatctgtgttagaagtgttgcaaatgctgtactgactttgtaaaatataaaactaaggaaaactc

SEQ ID NO: 110162 - DNA, 4576 bp, Homo sapiens
  Payload ID: 1621
  Gene Symbol: ABCC11
  Gene Name: ATP-binding cassette, sub-family C (CFTR/MRP), member 11
  Uniprot ID: Q96J66
  ENST ID: ENST00000394748
  CDS Start-End: 65-4213
gtgtatttgaataaaccaggttggcaaatcatactatagctgaaagaattggcaggaactgaaaatgactaggaagaggacatactgggtgcccaactcttctggtggcctcgtgaatcgtggcatcgacataggcgatgacatggtttcaggacttatttataaaacctatactctccaagatggcccctggagtcagcaagagagaaatcctgaggctccagggagggcagctgtcccaccgtgggggaagtatgatgctgccttgagaaccatgattcccttccgtcccaagccgaggtttcctgccccccagcccctggacaatgctggcctgttctcctacctcaccgtgtcatggctcaccccgctcatgatccaaagcttacggagtcgcttagatgagaacaccatccctccactgtcagtccatgatgcctcagacaaaaatgtccaaaggcttcaccgcctttgggaagaagaagtctcaaggcgagggattgaaaaagcttcagtgcttctggtgatgctgaggttccagagaacaaggttgattttcgatgcacttctgggcatctgcttctgcattgccagtgtactcgggccaatattgattataccaaagatcctggaatattcagaagagcagttggggaatgttgtccatggagtgggactctgctttgccctttttctctccgaatgtgtgaagtctctgagtttctcctccagttggatcatcaaccaacgcacagccatcaggttccgagcagctgtttcctcctttgcctttgagaagctcatccaatttaagtctgtaatacacatcacctcaggagaggccatcagcttcttcaccggtgatgtaaactacctgtttgaaggggtgtgctatggacccctagtactgatcacctgcgcatcgctggtcatctgcagcatttcttcctacttcattattggatacactgcatttattgccatcttatgctatctcctggttttcccactggcggtattcatgacaagaatggctgtgaaggctcagcatcacacatctgaggtcagcgaccagcgcatccgtgtgaccagtgaagttctcacttgcattaagctgattaaaatgtacacatgggagaaaccatttgcaaaaatcattgaagacctaagaaggaaggaaaggaaactattggagaagtgcgggcttgtccagagcctgacaagtataaccttgttcatcatccccacagtggccacagcggtctgggttctcatccacacatccttaaagctgaaactcacagcgtcaatggccttcagcatgctggcctccttgaatctccttcggctgtcagtgttctttgtgcctattgcagtcaaaggtctcacgaattccaagtctgcagtgatgaggttcaagaagtttttcctccaggagagccctgttttctatgtccagacattacaagaccccagcaaagctctggtctttgaggaggccaccttgtcatggcaacagacctgtcccgggatcgtcaatggggcactggagctggagaggaacgggcatgcttctgaggggatgaccaggcctagagatgccctcgggccagaggaagaagggaacagcctgggcccagagttgcacaagatcaacctggtggtgtccaaggggatgatgttaggggtctgcggcaacacggggagtggtaagagcagcctgttgtcagccatcctggaggagatgcacttgctcgagggctcggtgggggtgcagggaagcctggcctatgtcccccagcaggcctggatcgtcagcgggaacatcagggagaacatcctcatgggaggcgcatatgacaaggcccgatacctccaggtgctccactgctgctccctgaatcgggacctggaacttctgccctttggagacatgacagagattggagagcggggcctcaacctctctggggggcagaaacagaggatcagcctggcccgcgccgtctattccgaccgtcagatctacctgctggacgaccccctgtctgctgtggacgcccacgtggggaagcacatttttgaggagtgcattaagaagacactcagggggaagacggtcgtcctggtgacccaccagctgcagtacttagaattttgtggccagatcattttgttggaaaatgggaaaatctgtgaaaatggaactcacagtgagttaatgcagaaaaaggggaaatatgcccaacttatccagaagatgcacaaggaagccacttcggacatgttgcaggacacagcaaagatagcagagaagccaaaggtagaaagtcaggctctggccacctccctggaagagtctctcaacggaaatgctgtgccggagcatcagctcacacaggaggaggagatggaagaaggctccttgagttggagggtctaccaccactacatccaggcagctggaggttacatggtctcttgcataattttcttcttcgtggtgctgatcgtcttcttaacgatcttcagcttctggtggctgagctactggttggagcagggctcggggaccaatagcagccgagagagcaatggaaccatggcagacctgggcaacattgcagacaatcctcaactgtccttctaccagctggtgtacgggctcaacgccctgctcctcatctgtgtgggggtctgctcctcagggattttcaccaaggtcacgaggaaggcatccacggccctgcacaacaagctcttcaacaaggttttccgctgccccatgagtttctttgacaccatcccaataggccggcttttgaactgcttcgcaggggacttggaacagctggaccagctcttgcccatcttttcagagcagttcctggtcctgtccttaatggtgatcgccgtcctgttgattgtcagtgtgctgtctccatatatcctgttaatgggagccataatcatggttatttgcttcatttattatatgatgttcaagaaggccatcggtgtgttcaagagactggagaactatagccggtctcctttattctcccacatcctcaattctctgcaaggcctgagctccatccatgtctatggaaaaactgaagacttcatcagccagtttaagaggctgactgatgcgcagaataactacctgctgttgtttctatcttccacacgatggatggcattgaggctggagatcatgaccaaccttgtgaccttggctgttgccctgttcgtggcttttggcatttcctccaccccctactcctttaaagtcatggctgtcaacatcgtgctgcagctggcgtccagcttccaggccactgcccggattggcttggagacagaggcacagttcacggctgtagagaggatactgcagtacatgaagatgtgtgtctcggaagctcctttacacatggaaggcacaagttgtccccaggggtggccacagcatggggaaatcatatttcaggattatcacatgaaatacagagacaacacacccaccgtgcttcacggcatcaacctgaccatccgcggccacgaagtggtgggcatcgtgggaaggacgggctctgggaagtcctccttgggcatggctctcttccgcctggtggagcccatggcaggccggattctcattgacggcgtggacatttgcagcatcggcctggaggacttgcggtccaagctctcagtgatccctcaagatccagtgctgctctcaggaaccatcagattcaacctagatccctttgaccgtcacactgaccagcagatctgggatgccttggagaggacattcctgaccaaggccatctcaaagttccccaaaaagctgcatacagatgtggtggaaaacggtggaaacttctctgtgggggagaggcagctgctctgcattgccagggctgtgcttcgcaactccaagatcatccttatcgatgaagccacagcctccattgacatggagacagacaccctgatccagcgcacaatccgtgaagccttccagggctgcaccgtgctcgtcattgcccaccgtgtcaccactgtgctgaactgtgaccacatcctggttatgggcaatgggaaggtggtagaatttgatcggccggaggtactgcggaagaagcctgggtcattgttcgcagccctcatggccacagccacttcttcactgagataaggagatgtggagacttcatggaggctggcagctgagctcagaggttcacacaggtgcagcttcgaggcccacagtctgcgaccttcttgtttggagatgagaacttctcctggaagcaggggtaaatgtagggggggtggggattgctggatggaaaccctggaataggctacttgatggctctcaagaccttagaaccccagaaccatctaagacatgggattcagtgatcatgtggttctccttttaacttacatgctgaataattttataataaggtaaaagcttatagttttctgatctgtgttagaagtgttgcaaatgctgtactgactttgtaaaatataaaactaaggaaaactc

SEQ ID NO: 110163 - DNA, 582 bp, Homo sapiens
  Payload ID: 1621
  Gene Symbol: ABCC11
  Gene Name: ATP-binding cassette, sub-family C (CFTR/MRP), member 11
  ENST ID: ENST00000569991
  CDS Start-End: 106-582
ttaaaaaggctcctgcaggcaacatgcctgcacactaacgtgcagaaagggactgtactactcaaaaccaccaaggaagtggcagagaattggcaggaactgaaaatgactaggaagaggacatactgggtgcccaactcttctggtggcctcgtgaatcgtggcatcgacataggcgatgacatggtttcaggacttatttataaaacctatactctccaagatggcccctggagtcagcaagagagaaatcctgaggctccagggagggcagctgtcccaccgtgggggaagtatgatgctgccttgagaaccatgattcccttccgtcccaagccgaggtttcctgccccccagcccctggacaatgctggcctgttctcctacctcaccgtgtcatggctcaccccgctcatgatccaaagcttacggagtcgcttagatgagaacaccatccctccactgtcagtccatgatgcctcagacaaaaatgtccaaaggcttcaccgcctttgggaagaagaagtctcaaggcgagggattgaaaaagcttcagtgcttctggtgatgctgaggttccag

SEQ ID NO: 110164 - DNA, 5168 bp, Homo sapiens
  Payload ID: 1622
  Gene Symbol: ABCC12
  Gene Name: ATP-binding cassette, sub-family C (CFTR/MRP), member 12
  Uniprot ID: Q96J65
  ENST ID: ENST00000311303
  CDS Start-End: 347-4426
gccttggtcattggaccggctcccaaccaaaaccacaccatagggttttctgctcttggccaacccaacatgagaaaagaggaattaaatggtcctactaataagaaagcctcagcgtagcattaagggacgtagcaggtcttctggccacactcccctacaaatgtggaaagctcattggtgaaaacagttctcaggggtcaaagcaaaggaactgatctgggtaaagtagaggctgcctgatcccaatcagacatcctcacctctcaataacctttgccatttctctgccatagagtgaaagtgtccccaggccaaaagcccagggctccaggctgccatcaggatggtgggtgaaggaccctaccttatctcagatctggaccagcgaggccggcggagatcctttgcagaaagatatgaccccagcctgaagaccatgatcccagtgcgaccctgtgcaaggttagcacccaacccggtggatgatgccgggctactctccttcgccacattttcctggctcacgccggtgatggtgaaaggctaccggcaaaggctgaccgtagacaccctgcccccattgtcgacatatgactcatctgacaccaatgccaaaagatttcgagtcctttgggatgaagaggtagcaagggtgggtcctgagaaggcctctctgagccacgtggtgtggaaattccagaggacacgcgtgttgatggacatcgtggccaacatcctgtgcatcatcatggcagccatagggccggtgattctcattcaccaaatcctccagcagactgagaggacctctgggaaagtctgggttggcattggactgtgcatagccctttttgccaccgagtttaccaaagtcttcttttgggcccttgcctgggccatcaactaccgcacggccatccggttgaaggtggcgctctccaccttggtttttgaaaacctagtgtccttcaagacattgacccacatctctgttggcgaggtgctcaatatactgtcaagtgatagctattctttgtttgaagctgccttgttttgtcctttgccagccaccatcccgatcctaatggtcttttgtgcggcgtacgcctttttcattctggggcccacagctctcatcgggatatcagtgtatgtcatattcatacccgtccagatgtttatggccaagctcaattcagctttccgaaggtcagcaattttggtgacagacaagcgagttcagacaatgaatgagtttctgacctgcatcaggctgatcaaaatgtatgcctgggagaaatcttttaccaacactatccaagatataagaaggagggaaagaaaattactggaaaaagctggatttgtccaaagtggaaactctgccctggcccccatcgtgtccaccatagccatcgtgctgacattatcctgccacatcctcctgagacgcaaactcaccgcacccgtggcatttagtgtgattgccatgtttaatgtaatgaagttttccattgcaatcttgcccttctccatcaaagcaatggctgaagcgaatgtctctctaaggagaatgaagaaaattctcatagataaaagccccccatcttacatcacccaaccagaagacccagatactgtcttgcttttagcaaatgccaccttgacatgggagcatgaagccagcaggaaaagtaccccaaagaaattgcagaaccagaaaaggcatttatgcaagaaacagaggtcagaggcatacagtgagaggagtccaccagccaagggagccactggcccagaggagcaaagtgacagcctcaaatcggttctgcacagcataagctttgtggtgagaaaggggaagatcttgggaatatgtgggaatgtgggaagtggaaagagctccctccttgcagctctcctaggacagatgcagctgcagaaaggggtggtggcagtcaatggaactttggcctacgtttcacagcaggcatggatctttcatggaaatgtgagagaaaacatactctttggagaaaagtatgatcaccaaaggtatcagcacacagtccgcgtctgtggcctccagaaggacctgagcaacctcccctatggagacctgactgagattggggagcggggcctcaacctctctggggggcagaggcagaggattagcctggcccgcgctgtctactccgaccgtcagctctacctgctggacgaccccctgtcggccgtggacgcccacgtggggaagcacgtctttgaggagtgcattaagaagacgctcaggggaaagacagtcgtcctggtgacccaccagctacagttcttagagtcttgtgatgaagttattttattagaagatggagagatttgtgaaaagggaacccacaaggagttaatggaggagagagggcgctatgcaaaactgattcacaacctgcgaggattgcagttcaaggatcctgaacacctttacaatgcagcaatggtggaagccttcaaggagagccctgctgagagagaggaagatgctggtataatcgttttggctccaggaaatgagaaagatgaaggaaaagaatctgaaacaggctcagaatttgtagacacaaaagttcctgagcaccagctcatccagactgaatccccccaggaaggaaccgtgacctggaaaacatatcacacgtacattaaggcttctggagggtacctcctttctctcttcactgtgttcctcttcctcctgatgattggcagcgctgccttcagcaactggtggctgggtctctggttggacaagggctcacggatgacctgtgggccccagggcaacaggaccatgtgtgaggtcggcgcggtgctggcagacatcggtcagcatgtgtaccagtgggtgtacactgcaagcatggtgttcatgctggtgtttggcgtcaccaaaggcttcgtcttcaccaagaccacactgatggcatcctcctctctgcatgacacggtgtttgataagatcttaaagagcccaatgagtttctttgacacgactcccactggcaggctaatgaaccgtttttccaaggatatggacgagctggatgtgaggctgccgtttcacgcagagaactttctgcagcagttttttatggtggtgtttattctcgtgatcttggctgctgtgtttcctgctgtccttttagtcgtggccagccttgctgtaggcttcttcattctgttacgcattttccacagaggagtccaggagctcaagaaggtggagaatgtcagccggtcaccctggttcacccacatcacctcctccatgcagggcctgggcatcattcacgcctatggcaagaaggagagctgcatcacctatcacctcctctactttaactgtgctctcaggtggtttgcgctgagaatggatgtcctcatgaacatccttaccttcactgtggccttgttggtgaccctgagtttctcctccatcagtacttcatccaaaggcctgtcattgtcatacatcatccagctgagcggactgctccaagtgtgtgtgcgaacgggaacagagacgcaagccaaattcacctccgtggagctgctcagggaatacatttcgacctgtgttcctgaatgcactcatcccctcaaagtggggacctgtcccaaggactggcccagccgtggggagatcaccttcagagactatcagatgagatacagagacaacaccccccttgttctcgacagcctgaacttgaacatacaaagtgggcagacagtcgggattgttggaagaacaggttccggaaagtcatcgttaggaatggctttgtttcgtctggtggagccagccagtggcacaatctttattgatgaggtggatatctgcattctcagcttggaagacctcagaaccaagctgactgtgatcccacaggatcctgtcctgtttgtaggtacagtaaggtacaacttggatccctttgagagtcacaccgatgagatgctctggcaggttctggagagaacattcatgagagacacaataatgaaactcccagaaaaattacaggcagaagtcacagaaaatggagaaaacttctcagtaggggaacgtcagctgctttgtgtggcccgagctcttctccgtaattcaaagatcattctccttgatgaagccaccgcctctatggactccaagactgacaccctggttcagaacaccatcaaagatgccttcaagggctgcactgtgctgaccatcgcccaccgcctcaacacagttctcaactgcgatcacgtcctggttatggaaaatgggaaggtgattgagtttgacaagcctgaagtccttgcagagaagccagattctgcatttgcgatgttactagcagcagaagtcagattgtagaggtcctggcggctgattctagaggaggaagaggctctgtgagatgaataggaggagtcttcaggaggaggggctgtcctctccgcaggcagccctggtcttcagcccctcccatccacggagtgagctggggctgaagttgtccccactgccatactcagtccatgtcaccccacttggtgggcttggggttggttctgggtggtgaaccggggcagacccagctaatggattaaaaaactgcccttcacctcccaaatccccaagggttcctcatgtgttttcaccaaaaccaccccagtgcctgagattgaaaatattgtaactttcagttagaaatcagccacaataaacaacatgggaaaatgccttaggatggagtttgcaaggtttccttgcccattatcagaaggaaaaagagcagaattttcttctcgtttaaccccactcacttccatcttgactgggtgacaagtggtaatgacacagatttgtagcgtgaaagactgaatacagtgtttggccaaaaatttttttaaaaatcatattatatgtttcaattgatctgttagaataaccaagaaaacaaaatgctggagtttctctataaatgacacttttatatcttctttattcgtcgttaaaacgcggtaggaaattaccctgaaatgtcgccttgcaattatttcactgaagatattccaatttccatactatttcctccaatagacccttgttgcct

SEQ ID NO: 110165 - DNA, 4047 bp, Homo sapiens
  Payload ID: 1622
  Gene Symbol: ABCC12
  Gene Name: ATP-binding cassette, sub-family C (CFTR/MRP), member 12
  Uniprot ID: Q96J65
  ENST ID: ENST00000497206
  CDS Start-End: 7-3036
atcaggatggtgggtgaaggaccctaccttatctcagatctggaccagcgaggccggcggagatcctttgcagaaagatatgaccccagcctgaagaccatgatcccagtgcgaccctgtgcaaggttagcacccaacccggtggatgatgccgggctactctccttcgccacattttcctggctcacgccggtgatggtgaaaggctaccggcaaaggctgaccgtagacaccctgcccccattgtcgacatatgactcatctgacaccaatgccaaaagatttcgagtcctttgggatgaagaggtagcaagggtgggtcctgagaaggcctctctgagccacgtggtgtggaaattccagaggacacgcgtgttgatggacatcgtggccaacatcctgtgcatcatcatggcagccatagggccgacagttctcattcaccaaatcctccagcagactgagaggacctctgggaaagtctgggttggcattggactgtgcatagccctttttgccaccgagtttaccaaagtcttcttttgggcccttgcctgggccatcaactaccgcacggccatccggttgaaggtggcgctctccaccttggtttttgaaaacctagtgtccttcaagacattgacccacatctctgttggcgaggtgctcaatatactgtcaagtgatagctattctttgtttgaagctgccttgttttgtcctttgccagccaccatcccgatcctaatggtcttttgtgcggcgtacgcctttttcattctggggcccacagctctcatcgggatatcagtgtatgtcatattcatacccgtccagatgtttatggccaagctcaattcagctttccgaaggtcagcaattttggtgacagacaagcgagttcagacaatgaatgagtttctgacctgcatcaggctgatcaaaatgtatgcctgggagaaatcttttaccaacactatccaagatataagaaggagggaaagaaaattactggaaaaagctggatttgtccaaagtggaaactctgccctggcccccatcgtgtccaccatagccatcgtgctgacattatcctgccacatcctcctgagacgcaaactcaccgcacccgtggcatttagtgtgattgccatgtttaatgtaatgaagttttccattgcaatcttgcccttctccatcaaagcaatggctgaagcgaatgtctctctaaggagaatgaagaaaattctcatagataaaagccccccatcttacatcacccaaccagaagacccagatactgtcttgcttttagcaaatgccaccttgacatgggagcatgaagccagcaggaaaagtaccccaaagaaattgcagaaccagaaaaggcatttatgcaagaaacagaggtcagaggcatacagtgagaggagtccaccagccaagggagccactggcccagaggagcaaagtgacagcctcaaatcggttctgcacagcataagctttgtggtgagaaaggggaagatcttgggaatatgtgggaatgtgggaagtggaaagagctccctccttgcagctctcctaggacagatgcagctgcagaaaggggtggtggcagtcaatggaactttggcctacgtttcacagcaggcatggatctttcatggaaatgtgagagaaaacatactctttggagaaaagtatgatcaccaaaggtatcagcacacagtccgcgtctgtggcctccagaaggacctgagcaacctcccctatggagacctgactgagattggggagcggggcctcaacctctctggggggcagaggcagaggattagcctggcccgcgctgtctactccgaccgtcagctctacctgctggacgaccccctgtcggccgtggacgcccacgtggggaagcacgtctttgaggagtgcattaagaagacgctcaggggaaagacagtcgtcctggtgacccaccagctacagttcttagagtcttgtgatgaagttattttattagaagatggagagatttgtgaaaagggaacccacaaggagttaatggaggagagagggcgctatgcaaaactgattcacaacctgcgaggattgcagttcaaggatcctgaacacctttacaatgcagcaatggtggaagccttcaaggagagccctgctgagagagaggaagatgctgttttggctccaggaaatgagaaagatgaaggaaaagaatctgaaacaggctcagaatttgtagacacaaaagttcctgagcaccagctcatccagactgaatccccccaggaaggaaccgtgacctggaaaacatatcacacgtacattaaggcttctggagggtacctcctttctctcttcactgtgttcctcttcctcctgatgattggcagcgctgccttcagcaactggtggctgggtctctggttggacaagggctcacggatgacctgtgggccccagggcaacaggaccatgtgtgaggtcggcgcggtgctggcagacatcggtcagcatgtgtaccagtgggtgtacactgcaagcatggtgttcatgctggtgtttggcgtcaccaaaggcttcgtcttcaccaagaccacactgatggcatcctcctctctgcatgacacggtgtttgataagatcttaaagagcccaatgagtttctttgacacgactcccactggcaggctaatgaaccgtttttccaaggatatggacgagctggatgtgaggctgccgtttcacgcagagaactttctgcagcagttttttatggtggtgtttattctcgtgatcttggctgctgtgtttcctgctgtccttttagtcgtggccagccttgctgtaggcttcttcattctgttacgcattttccacagaggagtccaggagctcaagaaggtggagaatgtcagccggtcaccctggttcacccacatcacctcctccatgcagggcctgggcatcattcacgcctatggcaagaaggagagctgcatcacctagtttaagacgctaaacgacgaaaactccagtcacctcctctactttaactgtgctctcaggtggtttgcgctgagaatggatgtcctcatgaacatccttaccttcactgtggccttgttggtgaccctgagtttctcctccatcagtacttcatccaaaggcctgtcattgtcatacatcatccagctgagcggactgctccaagtgtgtgtgcgaacgggaacagagacgcaagccaaattcacctccgtggagctgctcagggaatacatttcgacctgtgttcctgaatgcactcatcccctcaaagtggggacctgtcccaaggactggcccagccgtggggagatcaccttcagagactatcagatgagatacagagacaacaccccccttgttctcgacagcctgaacttgaacatacaaagtgggcagacagtcgggattgttggaagaacaggttccggaaagtcatcgttaggaatggctttgtttcgtctggtggagccagccagtggcacaatctttattgatgaggtggatatctgcattctcagcttggaagacctcagaaccaagctgactgtgatcccacaggatcctgtcctgtttgtaggtacagtaagataatgaaactcccagaaaaattacaggcagaagtcacagaaaatggagaaaacttctcagtaggggaacgtcagctgctttgtgtggcccgagctcttctccgtaattcaaagatcattctccttgatgaagccaccgcctctatggactccaagactgacaccctggttcagaacaccatcaaagatgccttcaagggctgcactgtgctgaccatcgcccaccgcctcaacacagttctcaactgcgatcacgtcctggttatggaaaatgggaaggtgattgagtttgacaagcctgaagtccttgcagagaagccagattctgcatttgcgatgttactagcagcagaagtcagattgtagaggtcctggcggctgattc

SEQ ID NO: 110166 - DNA, 4379 bp, Homo sapiens
  Payload ID: 1622
  Gene Symbol: ABCC12
  Gene Name: ATP-binding cassette, sub-family C (CFTR/MRP), member 12
  Uniprot ID: Q96J65
  ENST ID: ENST00000534418
  CDS Start-End: 227-3019
cattaagggacgtagcaggtcttctggccacactcccctacaaatgtggaaagctcattggtgaaaacagttctcaggggtcaaagcaaaggaactgatctgggtaaagtagaggctgcctgatcccaatcagacatcctcacctctcaataacctttgccatttctctgccatagagtgaaagtgtccccaggccaaaagcccagggctccaggctgccatcaggatggtgggtgaaggaccctaccttatctcagatctggaccagcgaggccggcggagatcctttgcagaaagatatgaccccagcctgaagaccatgatcccagtgcgaccctgtgcaaggttagcacccaacccggtggatgatgccgggctactctccttcgccacattttcctggctcacgccggtgatggtgaaaggctaccggcaaaggctgaccgtagacaccctgcccccattgtcgacatatgactcatctgacaccaatgccaaaagatttcgagtcctttgggatgaagaggtagcaagggtgggtcctgagaaggcctctctgagccacgtggtgtggaaattccagaggacacgcgtgttgatggacatcgtggccaacatcctgtgcatcatcatggcagccatagggccgacagttctcattcaccaaatcctccagcagactgagaggacctctgggaaagtctgggttggcattggactgtgcatagccctttttgccaccgagtttaccaaagtcttcttttgggcccttgcctgggccatcaactaccgcacggccatccggttgaaggtggcgctctccaccttggtttttgaaaacctagtgtccttcaagacattgacccacatctctgttggcgagatgtttatggccaagctcaattcagctttccgaaggtcagcaattttggtgacagacaagcgagttcagacaatgaatgagtttctgacctgcatcaggctgatcaaaatgtatgcctgggagaaatcttttaccaacactatccaagatataagaaggagggaaagaaaattactggaaaaagctggatttgtccaaagtggaaactctgccctggcccccatcgtgtccaccatagccatcgtgctgacattatcctgccacatcctcctgagacgcaaactcaccgcacccgtggcatttagtgtgattgccatgtttaatgtaatgaagttttccattgcaatcttgcccttctccatcaaagcaatggctgaagcgaatgtctctctaaggagaatgaagaaaattctcatagataaaagccccccatcttacatcacccaaccagaagacccagatactgtcttgcttttagcaaatgccaccttgacatgggagcatgaagccagcaggaaaagtaccccaaagaaattgcagaaccagaaaaggcatttatgcaagaaacagaggtcagaggcatacagtgagaggagtccaccagccaagggagccactggcccagaggagcaaagtgacagcctcaaatcggttctgcacagcataagctttgtggtgagaaaggggaagatcttgggaatatgtgggaatgtgggaagtggaaagagctccctccttgcagctctcctaggacagatgcagctgcagaaaggggtggtggcagtcaatggaactttggcctacgtttcacagcaggcatggatctttcatggaaatgtgagagaaaacatactctttggagaaaagtatgatcaccaaaggtatcagcacacagtccgcgtctgtggcctccagaaggacctgagcaacctcccctatggagacctgactgagattggggagcggggcctcaacctctctggggggcagaggcagaggattagcctggcccgcgctgtctactccgaccgtcagctctacctgctggacgaccccctgtcggccgtggacgcccacgtggggaagcacgtctttgaggagtgcattaagaagacgctcaggggaaagacagtcgtcctggtgacccaccagctacagttcttagagtcttgtgatgaagttattttattagaagatggagagatttgtgaaaagggaacccacaaggagttaatggaggagagagggcgctatgcaaaactgattcacaacctgcgaggattgcagttcaaggatcctgaacacctttacaatgcagcaatggtggaagccttcaaggagagccctgctgagagagaggaagatgctggtataatcgttcctgagcaccagctcatccagactgaatccccccaggaaggaaccgtgacctggaaaacatatcacacgtacattaaggcttctggagggtacctcctttctctcttcactgtgttcctcttcctcctgatgattggcagcgctgccttcagcaactggtggctgggtctctggttggacaagggctcacggatgacctgtgggccccagggcaacaggaccatgtgtgaggtcggcgcggtgctggcagacatcggtcagcatgtgtaccagtgggtgtacactgcaagcatggtgttcatgctggtgtttggcgtcaccaaaggcttcgtcttcaccaagaccacactgatggcatcctcctctctgcatgacacggtgtttgataagatcttaaagagcccaatgagtttctttgacacgactcccactggcaggctaatgaaccgtttttccaaggatatggacgagctggatgtgaggctgccgtttcacgcagagaactttctgcagcagttttttatggtggtgtttattctcgtgatcttggctgctgtgtttcctgctgtccttttagtcgtggccagccttgctgtaggcttcttcattctgttacgcattttccacagaggagtccaggagctcaagaaggtggagaatgtcagccggtcaccctggttcacccacatcacctcctccatgcagggcctgggcatcattcacgcctatggcaagaaggagagctgcatcacctagtttaagacgctaaacgacgaaaactccagtcacctcctctactttaactgtgctctcaggtggtttgcgctgagaatggatgtcctcatgaacatccttaccttcactgtggccttgttggtgaccctgagtttctcctccatcagtacttcatccaaaggcctgtcattgtcatacatcatccagctgagcggactgctccaagtgtgtgtgcgaacgggaacagagacgcaagccaaattcacctccgtggagctgctcagggaatacatttcgacctgtgttcctgaatgcactcatcccctcaaagtggggacctgtcccaaggactggcccagccgtggggagatcaccttcagagactatcagatgagatacagagacaacaccccccttgttctcgacagcctgaacttgaacatacaaagtgggcagacagtcgggattgttggaagaacaggttccggaaagtcatcgttaggaatggctttgtttcgtctggtggagccagccagtggcacaatctttattgatgaggtggatatctgcattctcagcttggaagacctcagaaccaagctgactgtgatcccacaggatcctgtcctgtttgtaggtacagtaagataatgaaactcccagaaaaattacaggcagaagtcacagaaaatggagaaaacttctcagtaggggaacgtcagctgctttgtgtggcccgagctcttctccgtaattcaaagatcattctccttgatgaagccaccgcctctatggactccaagactgacaccctggttcagaacaccatcaaagatgccttcaagggctgcactgtgctgaccatcgcccaccgcctcaacacagttctcaactgcgatcacgtcctggttatggaaaatgggaaggtgattgagtttgacaagcctgaagtccttgcagagaagccagattctgcatttgcgatgttactagcagcagaagtcagattgtagaggtcctggcggctgattctagaggaggaagaggctctgtgagatgaataggaggagtcttcaggaggaggggctgtcctctccgcaggcagccctggtcttcagcccctcccatccacggagtgagctggggctgaagttgtccccactgccatactcagtccatgtcaccccacttggtgggcttggggttggttctgggtggtgaaccggggcagacccagctaatggattaaaaaactgcccttcacctcccaaatccccaagggttcctcatgtgttttcaccaaaaccaccccagtgcctgagattgaaaatattgtaactttcagttagaaatcagccacaataaacaacatgggaaaatg

SEQ ID NO: 110167 - DNA, 3885 bp, Homo sapiens
  Payload ID: 1622
  Gene Symbol: ABCC12
  Gene Name: ATP-binding cassette, sub-family C (CFTR/MRP), member 12
  Uniprot ID: Q96J65
  ENST ID: ENST00000529504
  CDS Start-End: 7-2814
atcaggatggtgggtgaaggaccctaccttatctcagatctggaccagcgaggccggcggagatcctttgcagaaagatatgaccccagcctgaagaccatgatcccagtgcgaccctgtgcaaggttagcacccaacccggtggatgatgccgggctactctccttcgccacattttcctggctcacgccggtgatggtgaaaggctaccggcaaaggctgaccgtagacaccctgcccccattgtcgacatatgactcatctgacaccaatgccaaaagatttcgagtcctttgggatgaagaggtagcaagggtgggtcctgagaaggcctctctgagccacgtggtgtggaaattccagaggacacgcgtgttgatggacatcgtggccaacatcctgtgcatcatcatggcagccatagggccgacagttctcattcaccaaatcctccagcagactgagaggacctctgggaaagtctgggttggcattggactgtgcatagccctttttgccaccgagtttaccaaagtcttcttttgggcccttgcctgggccatcaactaccgcacggccatccggttgaaggtggcgctctccaccttggtttttgaaaacctagtgtccttcaagacattgacccacatctctgttggcgaggtgctcaatatactgtcaagtgatagctattctttgtttgaagctgccttgttttgtcctttgccagccaccatcccgatcctaatggtcttttgtgcggcgtacgcctttttcattctggggcccacagctctcatcgggatatcagtgtatgtcatattcatacccgtccagatgtttatggccaagctcaattcagctttccgaaggtcagcaattttggtgacagacaagcgagttcagacaatgaatgagtttctgacctgcatcaggctgatcaaaatgtatgcctgggagaaatcttttaccaacactatccaagatataagaaggagggaaagaaaattactggaaaaagctggatttgtccaaagtggaaactctgccctggcccccatcgtgtccaccatagccatcgtgctgacattatcctgccacatcctcctgagacgcaaactcaccgcacccgtggcatttagtgtgattgccatgtttaatgtaatgaagttttccattgcaatcttgcccttctccatcaaagcaatggctgaagcgaatgtctctctaaggagaatgaagaaaattctcatagataaaagccccccatcttacatcacccaaccagaagacccagatactgtcttgcttttagcaaatgccaccttgacatgggagcatgaagccagcaggaaaagtaccccaaagaaattgcagaaccagaaaaggcatttatgcaagaaacagaggtcagaggcatacagtgagaggagtccaccagccaagggagccactggcccagaggagcaaagtgacagcctcaaatcggttctgcacagcataagctttgtggtgagaaaggggaagatcttgggaatatgtgggaatgtgggaagtggaaagagctccctccttgcagctctcctaggacagatgcagctgcagaaaggggtggtggcagtcaatggaactttggcctacgtttcacagcaggcatggatctttcatggaaatgtgagagaaaacatactctttggagaaaagtatgatcaccaaaggtatcagcacacagtccgcgtctgtggcctccagaaggacctgagcaacctcccctatggagacctgactgagattggggagcggggcctcaacctctctggggggcagaggcagaggattagcctggcccgcgctgtctactccgaccgtcagctctacctgctggacgaccccctgtcggccgtggacgcccacgtggggaagcacgtctttgaggagtgcattaagaagacgctcaggggaaagacagtcgtcctggtgacccaccagctacagttcttagagtcttgtgatgaagttattttattagaagatggagagatttgtgaaaagggaacccacaaggagttaatggaggagagagggcgctatgcaaaactgattcacaacctgcgaggattgcagttcaaggatcctgaacacctttacaatgcagcaatggtggaagccttcaaggagagccctgctgagagagaggaagatgctgttttggctccaggaaatgagaaagatgaaggaaaagaatctgaaacaggctcagaatttgtagacacaaaagttcctgagcaccagctcatccagactgaatccccccaggaaggaaccgtgacctggaaaacatatcacacgtacattaaggcttctggagggtacctcctttctctcttcactgtgttcctcttcctcctgatgattggcagcgctgccttcagcaactggtggctgggtctctggttggacaagggctcacggatgacctgtgggccccagggcaacaggaccatgtgtgaggtcggcgcggtgctggcagacatcggtcagcatgtgtaccagtgggtgtacactgcaagcatggtgttcatgctggtgtttggcgtcaccaaaggcttcgtcttcaccaagaccacactgatggcatcctcctctctgcatgacacggtgtttgataagcattttccacagaggagtccaggagctcaagaaggtggagaatgtcagccggtcaccctggttcacccacatcacctcctccatgcagggcctgggcatcattcacgcctatggcaagaaggagagctgcatcacctagtttaagacgctaaacgacgaaaactccagtcacctcctctactttaactgtgctctcaggtggtttgcgctgagaatggatgtcctcatgaacatccttaccttcactgtggccttgttggtgaccctgagtttctcctccatcagtacttcatccaaaggcctgtcattgtcatacatcatccagctgagcggactgctccaagtgtgtgtgcgaacgggaacagagacgcaagccaaattcacctccgtggagctgctcagggaatacatttcgacctgtgttcctgaatgcactcatcccctcaaagtggggacctgtcccaaggactggcccagccgtggggagatcaccttcagagactatcagatgagatacagagacaacaccccccttgttctcgacagcctgaacttgaacatacaaagtgggcagacagtcgggattgttggaagaacaggttccggaaagtcatcgttaggaatggctttgtttcgtctggtggagccagccagtggcacaatctttattgatgaggtggatatctgcattctcagcttggaagacctcagaaccaagctgactgtgatcccacaggatcctgtcctgtttgtacaacttggatccctttgagagtcacaccgatgagatgctctggcaggttctggagagaacattcatgagagacacaataatgaaactcccagaaaaattacaggcagaagtcacagaaaatggagaaaacttctcagtaggggaacgtcagctgctttgtgtggcccgagctcttctccgtaattcaaagatcattctccttgatgaagccaccgcctctatggactccaagactgacaccctggttcagaacaccatcaaagatgccttcaagggctgcactgtgctgaccatcgcccaccgcctcaacacagttctcaactgcgatcacgtcctggttatggaaaatgggaaggtgattgagtttgacaagcctgaagtccttgcagagaagccagattctgcatttgcgatgttactagcagcagaagtcagattgtagaggtcctggcggctgattc

SEQ ID NO: 110168 - DNA, 4814 bp, Homo sapiens
  Payload ID: 1622
  Gene Symbol: ABCC12
  Gene Name: ATP-binding cassette, sub-family C (CFTR/MRP), member 12
  Uniprot ID: Q96J65
  ENST ID: ENST00000529084
  CDS Start-End: 498-2399
ggtgggagtggcagttgaatggggcagttggagaggaggacttcaggcgggtgggacaagagaaactgaatctgaggtccttggggagaagcaggccctggagtcctgggcagcagatgccaggctctgagccccatgactgctgaccctcctcccctccctctcatcctcagcccagggctgccaaatttagcaaagtgccattccagctgcaatgcttccaagccgcctcagatcatcaaaacttcacatgccctggggagcactcaaggaaattaccttctagcaccaatttcctatgcgcgctgattactcaaacctggccagggaggcctggcctccagtgtttggcatctgggactcaggagcccttaagacaagctgatgacatcttgctgccagggtcccttaccattagaaaagggaaccaaaaaatagaagttatagagtgaaagtgtccccaggccaaaagcccagggctccaggctgccatcaggatggtgggtgaaggaccctaccttatctcagatctggaccagcgaggccggcggagatcctttgcagaaagatatgaccccagcctgaagaccatgatcccagtgcgaccctgtgcaaggttagcacccaacccggtggatgatgccgggctactctccttcgccacattttcctggctcacgccggtgatggtgaaaggctaccggcaaaggctgaccgtagacaccctgcccccattgtcgacatatgactcatctgacaccaatgccaaaagatttcgagtcctttgggatgaagaggtagcaagggtgggtcctgagaaggcctctctgagccacgtggtgtggaaattccagaggacacgcgtgttgatggacatcgtggccaacatcctgtgcatcatcatggcagccatagggccgacagttctcattcaccaaatcctccagcagactgagaggacctctgggaaagtctgggttggcattggactgtgcatagccctttttgccaccgagtttaccaaagtcttcttttgggcccttgcctgggccatcaactaccgcacggccatccggttgaaggtggcgctctccaccttggtttttgaaaacctagtgtccttcaagacattgacccacatctctgttggcgaggtgctcaatatactgtcaagtgatagctattctttgtttgaagctgccttgttttgtcctttgccagccaccatcccgatcctaatggtcttttgtgcggcgtacgcctttttcattctggggcccacagctctcatcgggatatcagtgtatgtcatattcatacccgtccagatgtttatggccaagctcaattcagctttccgaaggtcagcaattttggtgacagacaagcgagttcagacaatgaatgagtttctgacctgcatcaggctgatcaaaatgtatgcctgggagaaatcttttaccaacactatccaagatataagaaggagggaaagaaaattactggaaaaagctggatttgtccaaagtggaaactctgccctggcccccatcgtgtccaccatagccatcgtgctgacattatcctgccacatcctcctgagacgcaaactcaccgcacccgtggcatttagtgtgattgccatgtttaatgtaatgaagttttccattgcaatcttgcccttctccatcaaagcaatggctgaagcgaatgtctctctaaggagaatgaagaaaattctcatagataaaagccccccatcttacatcacccaaccagaagacccagatactgtcttgcttttagcaaatgccaccttgacatgggagcatgaagccagcaggaaaagtaccccaaagaaattgcagaaccagaaaaggcatttatgcaagaaacagaggtcagaggcatacagtgagaggagtccaccagccaagggagccactggcccagaggagcaaagtgacagcctcaaatcggttctgcacagcataagctttgtggtgagaaaggggaagatcttgggaatatgtgggaatgtgggaagtggaaagagctccctccttgcagctctcctaggacagatgcagctgcagaaaggggtggtggcagtcaatggaactttggcctacgtttcacagcaggcatggatctttcatggaaatgtgagagaaaacatactctttggagaaaagtatgatcaccaaagattggggagcggggcctcaacctctctggggggcagaggcagaggattagcctggcccgcgctgtctactccgaccgtcagctctacctgctggacgaccccctgtcggccgtggacgcccacgtggggaagcacgtctttgaggagtgcattaagaagacgctcaggggaaagacagtcgtcctggtgacccaccagctacagttcttagagtcttgtgatgaagttattttattagaagatggagagatttgtgaaaagggaacccacaaggagttaatggaggagagagggcgctatgcaaaactgattcacaacctgcgaggattgcagttcaaggatcctgaacacctttacaatgcagcaatggtggaagccttcaaggagagccctgctgagagagaggaagatgctgttttggctccaggaaatgagaaagatgaaggaaaagaatctgaaacaggctcagaatttgtagacacaaaagttcctgagcaccagctcatccagactgaatccccccaggaaggaaccgtgacctggaaaacatatcacacgtacattaaggcttctggagggtacctcctttctctcttcactgtgttcctcttcctcctgatgattggcagcgctgccttcagcaactggtggctgggtctctggttggacaagggctcacggatgacctgtgggccccagggcaacaggaccatgtgtgaggtcggcgcggtgctggcagacatcggtcagcatgtgtaccagtgggtgtacactgcaagcatggtgttcatgctggtgtttggcgtcaccaaaggcttcgtcttcaccaagaccacactgatggcatcctcctctctgcatgacacggtgtttgataagatcttaaagagcccaatgagtttctttgacacgactcccactggcaggctaatgaaccgtttttccaaggatatggacgagctggatgtgaggctgccgtttcacgcagagaactttctgcagcagttttttatggtggtgtttattctcgtgatcttggctgctgtgtttcctgctgtccttttagtcgtggccagccttgctgtaggcttcttcattctgttacgcattttccacagaggagtccaggagctcaagaaggtggagaatgtcagccggtcaccctggttcacccacatcacctcctccatgcagggcctgggcatcattcacgcctatggcaagaaggagagctgcatcacctagtttaagacgctaaacgacgaaaactccagtcacctcctctactttaactgtgctctcaggtggtttgcgctgagaatggatgtcctcatgaacatccttaccttcactgtggccttgttggtgaccctgagtttctcctccatcagtacttcatccaaaggcctgtcattgtcatacatcatccagctgagcggactgctccaagtgtgtgtgcgaacgggaacagagacgcaagccaaattcacctccgtggagctgctcagggaatacatttcgacctgtgttcctgaatgcactcatcccctcaaagtggggacctgtcccaaggactggcccagccgtggggagatcaccttcagagactatcagatgagatacagagacaacaccccccttgttctcgacagcctgaacttgaacatacaaagtgggcagacagtcgggattgttggaagaacaggttccggaaagtcatcgttaggaatggctttgtttcgtctggtggagccagccagtggcacaatctttattgatgaggtggatatctgcattctcagcttggaagacctcagaaccaagctgactgtgatcccacaggatcctgtcctgtttgtaggtacagtaagataatgaaactcccagaaaaattacaggcagaagtcacagaaaatggagaaaacttctcagtaggggaacgtcagctgctttgtgtggcccgagctcttctccgtaattcaaagatcattctccttgatgaagccaccgcctctatggactccaagactgacaccctggttcagaacaccatcaaagatgccttcaagggctgcactgtgctgaccatcgcccaccgcctcaacacagttctcaactgcgatcacgtcctggttatggaaaatgggaaggtgattgagtttgacaagcctgaagtccttgcagagaagccagattctgcatttgcgatgttactagcagcagaagtcagattgtagaggtcctggcggctgattctagaggaggaagaggctctgtgagatgaataggaggagtcttcaggaggaggggctgtcctctccgcaggcagccctggtcttcagcccctcccatccacggagtgagctggggctgaagttgtccccactgccatactcagtccatgtcaccccacttggtgggcttggggttggttctgggtggtgaaccggggcagacccagctaatggattaaaaaactgcccttcacctcccaaatccccaagggttcctcatgtgttttcaccaaaaccaccccagtgcctgagattgaaaatattgtaactttcagttagaaatcagccacaataaacaacatgggaaaatg

SEQ ID NO: 110169 - DNA, 1224 bp, Homo sapiens
  Payload ID: 1622
  Gene Symbol: ABCC12
  Gene Name: ATP-binding cassette, sub-family C (CFTR/MRP), member 12
  ENST ID: ENST00000533639
  CDS Start-End: 204-1061
agttggagaggaggacttcaggcgggtgggacaagagaaactgaatctgaggtccttggggagaagcaggccctggagtcctgggcagcagatgccaggctctgagccccatgactgctgaccctcctcccctccctctcatcctcagcccagagtgaaagtgtccccaggccaaaagcccagggctccaggctgccatcaggatggtgggtgaaggaccctaccttatctcagatctggaccagcgaggccggcggagatcctttgcagaaagatatgaccccagcctgaagaccatgatcccagtgcgaccctgtgcaaggttagcacccaacccggtggatgatgccgggctactctccttcgccacattttcctggctcacgccggtgatggtgaaaggctaccggcaaaggctgaccgtagacaccctgcccccattgtcgacatatgactcatctgacaccaatgccaaaagatttcgagtcctttgggatgaagaggtagcaagggtgggtcctgagaaggcctctctgagccacgtggtgtggaaattccagaggacacgcgtgttgatggacatcgtggccaacatcctgtgcatcatcatggcagccatagggccgacagttctcattcaccaaatcctccagcagactgagaggacctctgggaaagtctgggttggcattggactgtgcatagccctttttgccaccgagtttaccaaagtcttcttttgggcccttgcctgggccatcaactaccgcacggccatccggttgaaggtggcgctctccaccttggtttttgaaaacctagtgtccttcaagacattgacccacatctctgttggcgaggtgctcaatatactgtcaagtgatagctattctttgtttgaagctgccttgttttgtcctttgccagccaccatcccgatcctaatggtcttttgtgcggcgtacgcctttttcattctggggcccacagctctcatcgggatatcagtatgtttatggccaagctcaattcagctttccgaaggtcagcaattttggtgacagacaagcgagttcagacaatgaatgagtttctgacctgcatcaggctgatcaaaatgtatgcctgggagaaatcttttaccaacactatccaagatataagaaggagggaaagaaaattactggaaaaagctggatttgtccaaagtggaaactctgccct

SEQ ID NO: 110170 - DNA, 544 bp, Homo sapiens
  Payload ID: 1622
  Gene Symbol: ABCC12
  Gene Name: ATP-binding cassette, sub-family C (CFTR/MRP), member 12
  ENST ID: ENST00000527640
  CDS Start-End: 227-544
agttggagaggaggacttcaggcgggtgggacaagagaaactgaatctgaggtccttggggagaagcaggccctggagtcctgggcagcagatgccaggctctgagccccatgactgctgaccctcctcccctccctctcatcctcagcccaggtaaagcttcatttccagcccagagtgaaagtgtccccaggccaaaagcccagggctccaggctgccatcaggatggtgggtgaaggaccctaccttatctcagatctggaccagcgaggccggcggagatcctttgcagaaagatatgaccccagcctgaagaccatgatcccagtgcgaccctgtgcaaggttagcacccaacccggtggatgatgccgggctactctccttcgccacattttcctggctcacgccggtgatggtgaaaggctaccggcaaaggctgaccgtagacaccctgcccccattgtcgacatatgactcatctgacaccaatgccaaaagatttcgagtcctttgggatgaagaggtagcaagggtgggtcct

SEQ ID NO: 110171 - DNA, 4033 bp, Homo sapiens
  Payload ID: 1622
  Gene Symbol: ABCC12
  Gene Name: ATP-binding cassette, sub-family C (CFTR/MRP), member 12
  Uniprot ID: Q96J65
  ENST ID: ENST00000532494
  CDS Start-End: 7-3036
atcaggatggtgggtgaaggaccctaccttatctcagatctggaccagcgaggccggcggagatcctttgcagaaagatatgaccccagcctgaagaccatgatcccagtgcgaccctgtgcaaggttagcacccaacccggtggatgatgccgggctactctccttcgccacattttcctggctcacgccggtgatggtgaaaggctaccggcaaaggctgaccgtagacaccctgcccccattgtcgacatatgactcatctgacaccaatgccaaaagatttcgagtcctttgggatgaagaggtagcaagggtgggtcctgagaaggcctctctgagccacgtggtgtggaaattccagaggacacgcgtgttgatggacatcgtggccaacatcctgtgcatcatcatggcagccatagggccgacagttctcattcaccaaatcctccagcagactgagaggacctctgggaaagtctgggttggcattggactgtgcatagccctttttgccaccgagtttaccaaagtcttcttttgggcccttgcctgggccatcaactaccgcacggccatccggttgaaggtggcgctctccaccttggtttttgaaaacctagtgtccttcaagacattgacccacatctctgttggcgaggtgctcaatatactgtcaagtgatagctattctttgtttgaagctgccttgttttgtcctttgccagccaccatcccgatcctaatggtcttttgtgcggcgtacgcctttttcattctggggcccacagctctcatcgggatatcagtgtatgtcatattcatacccgtccagatgtttatggccaagctcaattcagctttccgaaggtcagcaattttggtgacagacaagcgagttcagacaatgaatgagtttctgacctgcatcaggctgatcaaaatgtatgcctgggagaaatcttttaccaacactatccaagatataagaaggagggaaagaaaattactggaaaaagctggatttgtccaaagtggaaactctgccctggcccccatcgtgtccaccatagccatcgtgctgacattatcctgccacatcctcctgagacgcaaactcaccgcacccgtggcatttagtgtgattgccatgtttaatgtaatgaagttttccattgcaatcttgcccttctccatcaaagcaatggctgaagcgaatgtctctctaaggagaatgaagaaaattctcatagataaaagccccccatcttacatcacccaaccagaagacccagatactgtcttgcttttagcaaatgccaccttgacatgggagcatgaagccagcaggaaaagtaccccaaagaaattgcagaaccagaaaaggcatttatgcaagaaacagaggtcagaggcatacagtgagaggagtccaccagccaagggagccactggcccagaggagcaaagtgacagcctcaaatcggttctgcacagcataagctttgtggtgagaaaggggaagatcttgggaatatgtgggaatgtgggaagtggaaagagctccctccttgcagctctcctaggacagatgcagctgcagaaaggggtggtggcagtcaatggaactttggcctacgtttcacagcaggcatggatctttcatggaaatgtgagagaaaacatactctttggagaaaagtatgatcaccaaaggtatcagcacacagtccgcgtctgtggcctccagaaggacctgagcaacctcccctatggagacctgactgagattggggagcggggcctcaacctctctggggggcagaggcagaggattagcctggcccgcgctgtctactccgaccgtcagctctacctgctggacgaccccctgtcggccgtggacgcccacgtggggaagcacgtctttgaggagtgcattaagaagacgctcaggggaaagacagtcgtcctggtgacccaccagctacagttcttagagtcttgtgatgaagttattttattagaagatggagagatttgtgaaaagggaacccacaaggagttaatggaggagagagggcgctatgcaaaactgattcacaacctgcgaggattgcagttcaaggatcctgaacacctttacaatgcagcaatggtggaagccttcaaggagagccctgctgagagagaggaagatgctgttttggctccaggaaatgagaaagatgaaggaaaagaatctgaaacaggctcagaatttgtagacacaaaagttcctgagcaccagctcatccagactgaatccccccaggaaggaaccgtgacctggaaaacatatcacacgtacattaaggcttctggagggtacctcctttctctcttcactgtgttcctcttcctcctgatgattggcagcgctgccttcagcaactggtggctgggtctctggttggacaagggctcacggatgacctgtgggccccagggcaacaggaccatgtgtgaggtcggcgcggtgctggcagacatcggtcagcatgtgtaccagtgggtgtacactgcaagcatggtgttcatgctggtgtttggcgtcaccaaaggcttcgtcttcaccaagaccacactgatggcatcctcctctctgcatgacacggtgtttgataagatcttaaagagcccaatgagtttctttgacacgactcccactggcaggctaatgaaccgtttttccaaggatatggacgagctggatgtgaggctgccgtttcacgcagagaactttctgcagcagttttttatggtggtgtttattctcgtgatcttggctgctgtgtttcctgctgtccttttagtcgtggccagccttgctgtaggcttcttcattctgttacgcattttccacagaggagtccaggagctcaagaaggtggagaatgtcagccggtcaccctggttcacccacatcacctcctccatgcagggcctgggcatcattcacgcctatggcaagaaggagagctgcatcacctagtttaagacgctaaacgacgaaaactccagtcacctcctctactttaactgtgctctcaggtggtttgcgctgagaatggatgtcctcatgaacatccttaccttcactgtggccttgttggtgaccctgagtttctcctccatcagtacttcatccaaaggcctgtcattgtcatacatcatccagctgagcggactgctccaagtgtgtgtgcgaacgggaacagagacgcaagccaaattcacctccgtggagctgctcagggaatacatttcgacctgtgttcctgaatgcactcatcccctcaaagtggggacctgtcccaaggactggcccagccgtggggagatcaccttcagagactatcagatgagatacagagacaacaccccccttgttctcgacagcctgaacttgaacatacaaagtgggcagacagtcgggattgttggaagaacaggttccggaaagtcatcgttaggaatggctttgtttcgtctggtggagccagccagtggcacaatctttattgatgaggtggatatctgcattctcagcttggaagacctcagaaccaagctgactgtgatcccacaggatcctgtcctgtttataatgaaactcccagaaaaattacaggcagaagtcacagaaaatggagaaaacttctcagtaggggaacgtcagctgctttgtgtggcccgagctcttctccgtaattcaaagatcattctccttgatgaagccaccgcctctatggactccaagactgacaccctggttcagaacaccatcaaagatgccttcaagggctgcactgtgctgaccatcgcccaccgcctcaacacagttctcaactgcgatcacgtcctggttatggaaaatgggaaggtgattgagtttgacaagcctgaagtccttgcagagaagccagattctgcatttgcgatgttactagcagcagaagtcagattgtagaggtcctggcggctgattc

SEQ ID NO: 110172 - DNA, 1714 bp, Homo sapiens
  Payload ID: 1623
  Gene Symbol: ABCC2
  Gene Name: ATP-binding cassette, sub-family C (CFTR/MRP), member 2
  ENST ID: ENST00000370434
  CDS Start-End: 83-964
tttctttgatgaaacaagtaaagaagaaacaacacaatcatattaatagaagagtcttcgttccagacgcagtccaggaatcatgctggagaagttctgcaactctactttttggaattcctcattcctggacagtccggaggcagacctgccactttgttttgagcaaactgttctggtgtggattcccttgggctacctatggctcctggccccctggcagcttctccacgtgtataaatccaggaccaagagatcctctaccaccaaactctatcttgctaagcaggtattcgttggttttcttcttattctagcagccatagagctggcccttgtactcacagaagactctggacaagccacagtccctgctgttcgatataccaatccaagcctctacctaggcacatggctcctggttttgctgatccaatacagcagacaatggtgtgtacagaaaaactcctggttcctgtccctattctggattctctcgatactctgtggcactttccaatttcagactctgatccggacactcttacagggtgacaattctaatctagcctactcctgcctgttcttcatctcctacggattccagatcctgatcctgatcttttcagcattttcagaaaataatgagtcatcaaataatccatcatccatagcttcattcctgagtagcattacctacagctggtatgacagcatcattctgaaaggctacaagcgtcctctgacactcgaggatgtctgggaagttgatgaagagatgaaaaccaagacattagtgagcaagtttgaaacgcacatgaagagagagctgcagaaagccaggcgggcactccagagacggcaggagaagagctcccagcagaactctggagccaggctgcctggcttgaacaagaatcagagtcaaagccaagatgcccttgtcctggtaactttcccttgagtgtctgtgtgagcgcgctgcatgtttcaggcaagggtacatcagcatcatggcgattctgtccttacatttttatagcacttcatacttctcagtgcacttcatattattaatggtattcacaatactgatactaccttagtgatggatacatggcgtgtaatgtactgttctctttcctttggggtacttttgaaattttccagaatgaaacgtggttttgaaaaaaataataccttagcatttctagattttgcaccttggtacaaattagcataagcaggcaatttgttgattcattcacttgaaaatatttattgagcacaactgtgtgtcagtgaccattctgggcactaaaagattgctcatcttttgtgagctagaaaatatgtagtaagcccatacataggttactctttgaaagtaataatagctattaagaaaataaaacaatagtgtatttggagtgaagtgcgacttgagacagggtaacaggggaagcttctcagaggagatgacatctgaacagacactcaaatgatgagatcaggccctctgagggacagtcagagggaagtgtgttccagtcagaaggagcaggcatgcgaggctgagaggggaacacatttggcttgctcagggaatggcaagaagatccaggacagggtgcgcatggggtgagatgggctcaaggaagtggacagggattaagctatgtggacccctgtgggccacaataaggaatctgga

SEQ ID NO: 110173 - DNA, 5312 bp, Homo sapiens
  Payload ID: 1623
  Gene Symbol: ABCC2
  Gene Name: ATP-binding cassette, sub-family C (CFTR/MRP), member 2
  Uniprot ID: Q92887
  ENST ID: ENST00000370449
  CDS Start-End: 114-4751
acatcagaatggtagataattcctgttccactttctttgatgaaacaagtaaagaagaaacaacacaatcatattaatagaagagtcttcgttccagacgcagtccaggaatcatgctggagaagttctgcaactctactttttggaattcctcattcctggacagtccggaggcagacctgccactttgttttgagcaaactgttctggtgtggattcccttgggctacctatggctcctggccccctggcagcttctccacgtgtataaatccaggaccaagagatcctctaccaccaaactctatcttgctaagcaggtattcgttggttttcttcttattctagcagccatagagctggcccttgtactcacagaagactctggacaagccacagtccctgctgttcgatataccaatccaagcctctacctaggcacatggctcctggttttgctgatccaatacagcagacaatggtgtgtacagaaaaactcctggttcctgtccctattctggattctctcgatactctgtggcactttccaatttcagactctgatccggacactcttacagggtgacaattctaatctagcctactcctgcctgttcttcatctcctacggattccagatcctgatcctgatcttttcagcattttcagaaaataatgagtcatcaaataatccatcatccatagcttcattcctgagtagcattacctacagctggtatgacagcatcattctgaaaggctacaagcgtcctctgacactcgaggatgtctgggaagttgatgaagagatgaaaaccaagacattagtgagcaagtttgaaacgcacatgaagagagagctgcagaaagccaggcgggcactccagagacggcaggagaagagctcccagcagaactctggagccaggctgcctggcttgaacaagaatcagagtcaaagccaagatgcccttgtcctggaagatgttgaaaagaaaaaaaagaagtctgggaccaaaaaagatgttccaaaatcctggttgatgaaggctctgttcaaaactttctacatggtgctcctgaaatcattcctactgaagctagtgaatgacatcttcacgtttgtgagtcctcagctgctgaaattgctgatctcctttgcaagtgaccgtgacacatatttgtggattggatatctctgtgcaatcctcttattcactgcggctctcattcagtctttctgccttcagtgttatttccaactgtgcttcaagctgggtgtaaaagtacggacagctatcatggcttctgtatataagaaggcattgaccctatccaacttggccaggaaggagtacaccgttggagaaacagtgaacctgatgtctgtggatgcccagaagctcatggatgtgaccaacttcatgcacatgctgtggtcaagtgttctacagattgtcttatctatcttcttcctatggagagagttgggaccctcagtcttagcaggtgttggggtgatggtgcttgtaatcccaattaatgcgatactgtccaccaagagtaagaccattcaggtcaaaaatatgaagaataaagacaaacgtttaaagatcatgaatgagattcttagtggaatcaagatcctgaaatattttgcctgggaaccttcattcagagaccaagtacaaaacctccggaagaaagagctcaagaacctgctggcctttagtcaactacagtgtgtagtaatattcgtcttccagttaactccagtcctggtatctgtggtcacattttctgtttatgtcctggtggatagcaacaatattttggatgcacaaaaggccttcacctccattaccctcttcaatatcctgcgctttcccctgagcatgcttcccatgatgatctcctccatgctccaggccagtgtttccacagagcggctagagaagtacttgggaggggatgacttggacacatctgccattcgacatgactgcaattttgacaaagccatgcagttttctgaggcctcctttacctgggaacatgattcggaagccacagtccgagatgtgaacctggacattatggcaggccaacttgtggctgtgataggccctgtcggctctgggaaatcctccttgatatcagccatgctgggagaaatggaaaatgtccacgggcacatcaccatcaagggcaccactgcctatgtcccacagcagtcctggattcagaatggcaccataaaggacaacatcctttttggaacagagtttaatgaaaagaggtaccagcaagtactggaggcctgtgctctcctcccagacttggaaatgctgcctggaggagatttggctgagattggagagaagggtataaatcttagtgggggtcagaagcagcggatcagcctggccagagctacctaccaaaatttagacatctatcttctagatgaccccctgtctgcagtggatgctcatgtaggaaaacatatttttaataaggtcttgggccccaatggcctgttgaaaggcaagactcgactcttggttacacatagcatgcactttcttcctcaagtggatgagattgtagttctggggaatggaacaattgtagagaaaggatcctacagtgctctcctggccaaaaaaggagagtttgctaagaatctgaagacatttctaagacatacaggccctgaagaggaagccacagtccatgatggcagtgaagaagaagacgatgactatgggctgatatccagtgtggaagagatccccgaagatgcagcctccataaccatgagaagagagaacagctttcgtcgaacacttagccgcagttctaggtccaatggcaggcatctgaagtccctgagaaactccttgaaaactcggaatgtgaatagcctgaaggaagacgaagaactagtgaaaggacaaaaactaattaagaaggaattcatagaaactggaaaggtgaagttctccatctacctggagtacctacaagcaataggattgttttcgatattcttcatcatccttgcgtttgtgatgaattctgtggcttttattggatccaacctctggctcagtgcttggaccagtgactctaaaatcttcaatagcaccgactatccagcatctcagagggacatgagagttggagtctacggagctctgggattagcccaaggtatatttgtgttcatagcacatttctggagtgcctttggtttcgtccatgcatcaaatatcttgcacaagcaactgctgaacaatatccttcgagcacctatgagattttttgacacaacacccacaggccggattgtgaacaggtttgccggcgatatttccacagtggatgacaccctgcctcagtccttgcgcagctggattacatgcttcctggggataatcagcacccttgtcatgatctgcatggccactcctgtcttcaccatcatcgtcattcctcttggcattatttatgtatctgttcagatgttttatgtgtctacctcccgccagctgaggcgtctggactctgtcaccaggtccccaatctactctcacttcagcgagaccgtatcaggtttgccagttatccgtgcctttgagcaccagcagcgatttctgaaacacaatgaggtgaggattgacaccaaccagaaatgtgtcttttcctggatcacctccaacaggtggcttgcaattcgcctggagctggttgggaacctgactgtcttcttttcagccttgatgatggttatttatagagataccctaagtggggacactgttggctttgttctgtccaatgcactcaatatcacacaaaccctgaactggctggtgaggatgacatcagaaatagagaccaacattgtggctgttgagcgaataactgagtacacaaaagtggaaaatgaggcaccctgggtgactgataagaggcctccgccagattggcccagcaaaggcaagatccagtttaacaactaccaagtgcggtaccgacctgagctggatctggtcctcagagggatcacttgtgacatcggtagcatggagaagattggtgtggtgggcaggacaggagctggaaagtcatccctcacaaactgcctcttcagaatcttagaggctgccggtggtcagattatcattgatggagtagatattgcttccattgggctccacgacctccgagagaagctgaccatcatcccccaggaccccatcctgttctctggaagcctgaggatgaatctcgaccctttcaacaactactcagatgaggagatttggaaggccttggagctggctcacctcaagtcttttgtggccagcctgcaacttgggttatcccacgaagtgacagaggctggtggcaacctgagcataggccagaggcagctgctgtgcctgggcagggctctgcttcggaaatccaagatcctggtcctggatgaggccactgctgcggtggatctagagacagacaacctcattcagacgaccatccaaaacgagttcgcccactgcacagtgatcaccatcgcccacaggctgcacaccatcatggacagtgacaaggtaatggtcctagacaacgggaagattatagagtgcggcagccctgaagaactgctacaaatccctggacccttttactttatggctaaggaagctggcattgagaatgtgaacagcacaaaattctagcagaaggccccatgggttagaaaaggactataagaataatttcttatttaattttattttttataaaatacagaatacatacaaaagtgtgtataaaatgtacgttttaaaaaaggataagtgaacacccatgaacctactacccaggttaagaaaataaatgtcaccaggtacttgagaaacccctcgattgtctacctcgatcgtacttccttgctacccacccctcccagggacaaccactgtcctgaatttcacgataattattcctttgcctttcatttctgttttatcacctttgtatgtatctttaaacaacatatacccttttttacttatgtaaatggactgactcatactgcatacatcttctatgacttgattcttttgttcaatattatatctgagattcatccatggtgatgcaaataggtgcattattttttttcactgctctgtagtctggcattgtatgaatacagcacaatgtatcagttttaatattggggatcattagcattattctcaggtttttaaaaattataagcagtactactatgg

SEQ ID NO: 110174 - DNA, 5716 bp, Homo sapiens
  Payload ID: 1624
  Gene Symbol: ABCC3
  Gene Name: ATP-binding cassette, sub-family C (CFTR/MRP), member 3
  Uniprot ID: O15438
  ENST ID: ENST00000285238
  CDS Start-End: 81-4664
gcggaggcggctccggcgcccgctctgcccgccgctgggtccgaccgcgctcgccttccttgcagccgcgcctcggccccatggacgccctgtgcggttccggggagctcggctccaagttctgggactccaacctgtctgtgcacacagaaaacccggacctcactccctgcttccagaactccctgctggcctgggtgccctgcatctacctgtgggtcgccctgccctgctacttgctctacctgcggcaccattgtcgtggctacatcatcctctcccacctgtccaagctcaagatggtcctgggtgtcctgctgtggtgcgtctcctgggcggaccttttttactccttccatggcctggtccatggccgggcccctgcccctgttttctttgtcacccccttggtggtgggggtcaccatgctgctggccaccctgctgatacagtatgagcggctgcagggcgtacagtcttcgggggtcctcattatcttctggttcctgtgtgtggtctgcgccatcgtcccattccgctccaagatccttttagccaaggcagagggtgagatctcagaccccttccgcttcaccaccttctacatccactttgccctggtactctctgccctcatcttggcctgcttcagggagaaacctccatttttctccgcaaagaatgtcgaccctaacccctaccctgagaccagcgctggctttctctcccgcctgtttttctggtggttcacaaagatggccatctatggctaccggcatcccctggaggagaaggacctctggtccctaaaggaagaggacagatcccagatggtggtgcagcagctgctggaggcatggaggaagcaggaaaagcagacggcacgacacaaggcttcagcagcacctgggaaaaatgcctccggcgaggacgaggtgctgctgggtgcccggcccaggccccggaagccctccttcctgaaggccctgctggccaccttcggctccagcttcctcatcagtgcctgcttcaagcttatccaggacctgctctccttcatcaatccacagctgctcagcatcctgatcaggtttatctccaaccccatggccccctcctggtggggcttcctggtggctgggctgatgttcctgtgctccatgatgcagtcgctgatcttacaacactattaccactacatctttgtgactggggtgaagtttcgtactgggatcatgggtgtcatctacaggaaggctctggttatcaccaactcagtcaaacgtgcgtccactgtgggggaaattgtcaacctcatgtcagtggatgcccagcgcttcatggaccttgcccccttcctcaatctgctgtggtcagcacccctgcagatcatcctggcgatctacttcctctggcagaacctaggtccctctgtcctggctggagtcgctttcatggtcttgctgattccactcaacggagctgtggccgtgaagatgcgcgccttccaggtaaagcaaatgaaattgaaggactcgcgcatcaagctgatgagtgagatcctgaacggcatcaaggtgctgaagctgtacgcctgggagcccagcttcctgaagcaggtggagggcatcaggcagggtgagctccagctgctgcgcacggcggcctacctccacaccacaaccaccttcacctggatgtgcagccccttcctggtgaccctgatcaccctctgggtgtacgtgtacgtggacccaaacaatgtgctggacgccgagaaggcctttgtgtctgtgtccttgtttaatatcttaagacttcccctcaacatgctgccccagttaatcagcaacctgactcaggccagtgtgtctctgaaacggatccagcaattcctgagccaagaggaacttgacccccagagtgtggaaagaaagaccatctccccaggctatgccatcaccatacacagtggcaccttcacctgggcccaggacctgccccccactctgcacagcctagacatccaggtcccgaaaggggcactggtggccgtggtggggcctgtgggctgtgggaagtcctccctggtgtctgccctgctgggagagatggagaagctagaaggcaaagtgcacatgaagggctccgtggcctatgtgccccagcaggcatggatccagaactgcactcttcaggaaaacgtgcttttcggcaaagccctgaaccccaagcgctaccagcagactctggaggcctgtgccttgctagctgacctggagatgctgcctggtggggatcagacagagattggagagaagggcattaacctgtctgggggccagcggcagcgggtcagtctggctcgagctgtttacagtgatgccgatattttcttgctggatgacccactgtccgcggtggactctcatgtggccaagcacatctttgaccacgtcatcgggccagaaggcgtgctggcaggcaagacgcgagtgctggtgacgcacggcattagcttcctgccccagacagacttcatcattgtgctagctgatggacaggtgtctgagatgggcccgtacccagccctgctgcagcgcaacggctcctttgccaactttctctgcaactatgcccccgatgaggaccaagggcacctggaggacagctggaccgcgttggaaggtgcagaggataaggaggcactgctgattgaagacacactcagcaaccacacggatctgacagacaatgatccagtcacctatgtggtccagaagcagtttatgagacagctgagtgccctgtcctcagatggggagggacagggtcggcctgtaccccggaggcacctgggtccatcagagaaggtgcaggtgacagaggcgaaggcagatggggcactgacccaggaggagaaagcagccattggcactgtggagctcagtgtgttctgggattatgccaaggccgtggggctctgtaccacgctggccatctgtctcctgtatgtgggtcaaagtgcggctgccattggagccaatgtgtggctcagtgcctggacaaatgatgccatggcagacagtagacagaacaacacttccctgaggctgggcgtctatgctgctttaggaattctgcaagggttcttggtgatgctggcagccatggccatggcagcgggtggcatccaggctgcccgtgtgttgcaccaggcactgctgcacaacaagatacgctcgccacagtccttctttgacaccacaccatcaggccgcatcctgaactgcttctccaaggacatctatgtcgttgatgaggttctggcccctgtcatcctcatgctgctcaattccttcttcaacgccatctccactcttgtggtcatcatggccagcacgccgctcttcactgtggtcatcctgcccctggctgtgctctacaccttagtgcagcgcttctatgcagccacatcacggcaactgaagcggctggaatcagtcagccgctcacctatctactcccacttttcggagacagtgactggtgccagtgtcatccgggcctacaaccgcagccgggattttgagatcatcagtgatactaaggtggatgccaaccagagaagctgctacccctacatcatctccaaccggtggctgagcatcggagtggagttcgtggggaactgcgtggtgctctttgctgcactatttgccgtcatcgggaggagcagcctgaacccggggctggtgggcctttctgtgtcctactccttgcaggtgacatttgctctgaactggatgatacgaatgatgtcagatttggaatctaacatcgtggctgtggagagggtcaaggagtactccaagacagagacagaggcgccctgggtggtggaaggcagccgccctcccgaaggttggcccccacgtggggaggtggagttccggaattattctgtgcgctaccggccgggcctagacctggtgctgagagacctgagtctgcatgtgcacggtggcgagaaggtggggatcgtgggccgcactggggctggcaagtcttccatgaccctttgcctgttccgcatcctggaggcggcaaagggtgaaatccgcattgatggcctcaatgtggcagacatcggcctccatgacctgcgctctcagctgaccatcatcccgcaggaccccatcctgttctcggggaccctgcgcatgaacctggaccccttcggcagctactcagaggaggacatttggtgggctttggagctgtcccacctgcacacgtttgtgagctcccagccggcaggcctggacttccagtgctcagagggcggggagaatctcagcgtgggccagaggcagctcgtgtgcctggcccgagccctgctccgcaagagccgcatcctggttttagacgaggccacagctgccatcgacctggagactgacaacctcatccaggctaccatccgcacccagtttgatacctgcactgtcctgaccatcgcacaccggcttaacactatcatggactacaccagggtcctggtcctggacaaaggagtagtagctgaatttgattctccagccaacctcattgcagctagaggcatcttctacgggatggccagagatgctggacttgcctaaaatatattcctgagatttcctcctggcctttcctggttttcatcaggaaggaaatgacaccaaatatgtccgcagaatggacttgatagcaaacactgggggcaccttaagattttgcacctgtaaagtgccttacagggtaactgtgctgaatgctttagatgaggaaatgatccccaagtggtgaatgacacgcctaaggtcacagctagtttgagccagttagactagtccccggtctcccgattcccaactgagtgttatttgcacactgcactgttttcaaataacgattttatgaaatgacctctgtcctccctctgatttttcatattttctaaagtttcgtttctgttttttaataaaaagctttttcctcctggaacagaagacagctgctgggtcaggccacccctaggaactcagtcctgtactctggggtgctgcctgaatccattaaaaatgggagtactgatgaaataaaactacatggtcaacagtatatacacagtagtctttttgcacttgttcacaaggtttggggattaggatctttggaggaggccaagaggaagactttctacacatgtacatggttgtagttacctgaacttcagacccaagagctcttggctgcaaatattgccttcacagccaaaattccctgggtaattgccagtagctcctgctctgctgtgcagatattgtaaaacggtgagaaaggccctgaaatctgacctggggcctcttgggaaagctgctgtgaacacctccacgttaatgtcatccctcagccctctatgcctgtttctctagggactgagaagtgcatgatgcttttacttccttgctcatttcgaagtctgttccagacagttcctataaccagtgaggcctccaagtcattcattttcctcagtctagccaaagctgaatgtgtgagcacaaagaagccgagaggccacctcctgcccagagagaagccacccacactcccaggttggcagacaagatgtgaggggtgaattaaatttgttttcttgagcaagcca

SEQ ID NO: 110175 - DNA, 1881 bp, Homo sapiens
  Payload ID: 1624
  Gene Symbol: ABCC3
  Gene Name: ATP-binding cassette, sub-family C (CFTR/MRP), member 3
  Uniprot ID: O15438
  ENST ID: ENST00000427699
  CDS Start-End: 81-1799
gcggaggcggctccggcgcccgctctgcccgccgctgggtccgaccgcgctcgccttccttgcagccgcgcctcggccccatggacgccctgtgcggttccggggagctcggctccaagttctgggactccaacctgtctgtgcacacagaaaacccggacctcactccctgcttccagaactccctgctggcctgggtgccctgcatctacctgtgggtcgccctgccctgctacttgctctacctgcggcaccattgtcgtggctacatcatcctctcccacctgtccaagctcaagatggtcctgggtgtcctgctgtggtgcgtctcctgggcggaccttttttactccttccatggcctggtccatggccgggcccctgcccctgttttctttgtcacccccttggtggtgggggtcaccatgctgctggccaccctgctgatacagtatgagcggctgcagggcgtacagtcttcgggggtcctcattatcttctggttcctgtgtgtggtctgcgccatcgtcccattccgctccaagatccttttagccaaggcagagggtgagatctcagaccccttccgcttcaccaccttctacatccactttgccctggtactctctgccctcatcttggcctgcttcagggagaaacctccatttttctccgcaaagaatgtcgaccctaacccctaccctgagaccagcgctggctttctctcccgcctgtttttctggtggttcacaaagatggccatctatggctaccggcatcccctggaggagaaggacctctggtccctaaaggaagaggacagatcccagatggtggtgcagcagctgctggaggcatggaggaagcaggaaaagcagacggcacgacacaaggcttcagcagcacctgggaaaaatgcctccggcgaggacgaggtgctgctgggtgcccggcccaggccccggaagccctccttcctgaaggccctgctggccaccttcggctccagcttcctcatcagtgcctgcttcaagcttatccaggacctgctctccttcatcaatccacagctgctcagcatcctgatcaggtttatctccaaccccatggccccctcctggtggggcttcctggtggctgggctgatgttcctgtgctccatgatgcagtcgctgatcttacaacactattaccactacatctttgtgactggggtgaagtttcgtactgggatcatgggtgtcatctacaggaaggctctggttatcaccaactcagtcaaacgtgcgtccactgtgggggaaattgtcaacctcatgtcagtggatgcccagcgcttcatggaccttgcccccttcctcaatctgctgtggtcagcacccctgcagatcatcctggcgatctacttcctctggcagaacctaggtccctctgtcctggctggagtcgctttcatggtcttgctgattccactcaacggagctgtggccgtgaagatgcgcgccttccaggtaaagcaaatgaaattgaaggactcgcgcatcaagctgatgagtgagatcctgaacggcatcaaggtgctgaagctgtacgcctgggagcccagcttcctgaagcaggtggagggcatcaggcagggtgagctccagctgctgcgcacggcggcctacctccacaccacaaccaccttcacctggatgtgcagccccttcctggtgaggcttggcacagggctgggtccctgcctccagggctctgggtgcccaggcatggccagggctcattggactctaccctgacaccacctccacgctgctcaggtgaccctgatcaccctctgggtgtacgtgtacgtggacccaaacaatgtgctggacgccg

SEQ ID NO: 110176 - DNA, 898 bp, Homo sapiens
  Payload ID: 1624
  Gene Symbol: ABCC3
  Gene Name: ATP-binding cassette, sub-family C (CFTR/MRP), member 3
  ENST ID: ENST00000513745
  CDS Start-End: 1-898
tgcccccgatgaggaccaagggcacctggaggacagctggaccgcgttggaaggtgcagaggataaggaggcactgctgattgaagacacactcagcaaccacacggatctgacagacaatgatccagtcacctatgtggtccagaagcagtttatgagacagctgagtgccctgtcctcagatggggagggacagggtcggcctgtaccccggaggcacctgggtccatcagagaaggtgcaggtgacagaggcgaaggcagatggggcactgacccaggaggagaaagcagccattggcactgtggagctcagtgtgttctgggattatgccaaggccgtggggctctgtaccacgctggccatctgtctcctgtatgtgggtcaaagtgcggctgccattggagccaatgtgtggctcagtgcctggacaaatgatgccatggcagacagtagacagaacaacacttccctgaggctgggcgtctatgctgctttaggaattctgcaagggttcttggtgatgctggcagccatggccatggcagcgggtggcatccaggctgcccgtgtgttgcaccaggcactgctgcacaacaagatacgctcgccacagtccttctttgacaccacaccatcaggccgcatcctgaactgcttctccaaggacatctatgtcgttgatgagcgcttctatgcagccacatcacggcaactgaagcggctggaatcagtcagccgctcacctatctactcccacttttcggagacagtgactggtgccagtgtcatccgggcctacaaccgcagccgggattttgagatcatcagtgatactaaggtggatgccaaccagagaagctgctacccctacatcatctccaaccggtggctgagc

SEQ ID NO: 110177 - DNA, 856 bp, Homo sapiens
  Payload ID: 1624
  Gene Symbol: ABCC3
  Gene Name: ATP-binding cassette, sub-family C (CFTR/MRP), member 3
  ENST ID: ENST00000510633
  CDS Start-End: 1-171
gcattaacctgtctgggggccagcggcagcgggtcagtctggctcgagctgtttacagtgatgccgatattttcttgctggatgacccactgtccgcggtggactctcatgtggccaagcacatctttgaccacgtcatcgggccagaaggcgtgctggcaggcaaggtgaggcctgccagaggctaagggggctaagacgcgagtgctggtgacgcacggcattagcttcctgccccagacagacttcatcattgtgctagctgatggacaggtgtctgagatgggcccgtacccagccctgctgcagcgcaacggctcctttgccaactttctctgcaactatgcccccgatgaggaccaagggcacctggaggacagctggaccgcgttggaaggtgcagaggataaggaggcactgctgattgaagacacactcagcaaccacacggatctgacagacaatgatccagtcacctatgtggtccagaagcagtttatgagacagctgagtgccctgtcctcagatggggagggacagggtcggcctgtaccccggaggcacctgggtccatcagagaaggtgcaggtgacagaggcgaaggcagatggggcactgacccaggaggagaaagcagccattggcactgtggagctcagtgtgttctgggattatgccaaggccgtggggctctgtaccacgctggccatctgtctcctgtatgtgggtcaaagtgcggctgccattggagccaatgtgtggctcagtgcctggacaaatgatgccatggcagacagtagacagaacaacacttccctgaggctgggcgtctatgctgctttaggaattctgcaag

SEQ ID NO: 110178 - DNA, 656 bp, Homo sapiens
  Payload ID: 1624
  Gene Symbol: ABCC3
  Gene Name: ATP-binding cassette, sub-family C (CFTR/MRP), member 3
  ENST ID: ENST00000515707
  CDS Start-End: 50-280
cgggggcagggagaccggacccagaggcactgggccgcgcctcggccccatggacgccctgtgcggttccggggagctcggctccaagttctggcactggggagcccgggaaagtgaggaagagtgcgcggctggggcgcaaaggcacagtgcgtggctgggtgagtcggctccatcccagcccctccgtcgggtgcggaaggggcgtttcgcaatcagccgcgggttcctgatggagggtcttccctcagcatctgcctcaggtaagactgaggtctgagagcaggccatccccaccactccggactcagaagggagaagcagaccccagtctggagacaggtgcagggtgtcaggattcctgtagtccaactcccttctcacagatggagaaagggaggcccagagagaggaagggacttgcccaaagttacccagttcaatgaaggcagagctgggatagaaaaacaggctacaggccaggtgcagtggttcacgcctgtaatcccaccctttgggaggcagaggtgggaggatcacttcagcccaggagttttagattactgtgagctatgatcgcaccactgcactgtggcctgggcgaaagagtgagaccctgtctctaaaaaaataaataaataagaaaagaaaatcaa

SEQ ID NO: 110179 - DNA, 484 bp, Homo sapiens
  Payload ID: 1624
  Gene Symbol: ABCC3
  Gene Name: ATP-binding cassette, sub-family C (CFTR/MRP), member 3
  ENST ID: ENST00000515585
  CDS Start-End: 1-131
ctgccctcatcttggcctgcttcagggagaaacctccatttttctccgcaaagaatgtcgaccctaacccctaccctgagaccagcgctggctttctctcccgcctgtttttctggtggttcacaaagtgagttggctcttccaccagccaggccagagggaggggagggatggaaggatggccatctatggctaccggcatcccctggaggagaaggacctctggtccctaaaggaagaggacagatcccagatggtggtgcagcagctgctggaggcatggaggaagcaggaaaagcagacggcacgcatcctgatcaggtttatctccaaccccatggccccctcctggtggggcttcctggtggctgggctgatgttcctgtgctccatgatgcagtcgctgatcttacaacactattaccactacatctttgtgactggggtgaagtttcgtactgggatcatgggtgtcatctacagg

SEQ ID NO: 110180 - DNA, 1042 bp, Homo sapiens
  Payload ID: 1624
  Gene Symbol: ABCC3
  Gene Name: ATP-binding cassette, sub-family C (CFTR/MRP), member 3
  ENST ID: ENST00000513511
  CDS Start-End: 124-255
gggctcggcagggcgggtccgggcggagcgcggggtgcggagggcggaggcggctccggcgcccgctctgcccgccgctgggtccgaccgcgctcgccttccttgcagccgcgcctcggccccatggacgccctgtgcggttccggggagctcggctccaagttctggaacccagcccactgcctgactcaccaaggccctcaccaaacattgtcaaggccaagagtgacgctccagggaaggggatctctctaggaggaagggtgctcaagatgaagaaggactccaacctgtctgtgcacacagaaaacccggacctcactccctgcttccagaactccctgctggcctgggtgccctgcatctacctgtgggtcgccctgccctgctacttgctctacctgcggcaccattgtcgtggctacatcatcctctcccacctgtccaagctcaagatggtcctgggtgtcctgctgtggtgcgtctcctgggcggaccttttttactccttccatggcctggtccatggccgggcccctgcccctgttttctttgtcacccccttggtggtgggggtcaccatgctgctggccaccctgctgatacagtatgagcggctgcagggcgtacagtcttcgggggtcctcattatcttctggttcctgtgtgtggtctgcgccatcgtcccattccgctccaagatccttttagccaaggcagagggtgagatctcagaccccttccgcttcaccaccttctacatccactttgccctggtactctctgccctcatcttggcctgcttcagggagaaacctccatttttctccgcaaagaatgtcgaccctaacccctaccctgagaccagcgctggctttctctcccgcctgtttttctggtggttcacaaagatggccatctatggctaccggcatcccctggaggagaaggacctctggtccctaaaggaagaggacagatcccagatggtggtgcagcagctgctggaggcatggaggaagcaggaaaagcagacggcacg

SEQ ID NO: 110181 - DNA, 5326 bp, Homo sapiens
  Payload ID: 1624
  Gene Symbol: ABCC3
  Gene Name: ATP-binding cassette, sub-family C (CFTR/MRP), member 3
  Uniprot ID: O15438
  ENST ID: ENST00000502426
  CDS Start-End: 37-1569
ccgcgctcgccttccttgcagccgcgcctcggccccatggacgccctgtgcggttccggggagctcggctccaagttctgggactccaacctgtctgtgcacacagaaaacccggacctcactccctgcttccagaactccctgctggcctgggtgccctgcatctacctgtgggtcgccctgccctgctacttgctctacctgcggcaccattgtcgtggctacatcatcctctcccacctgtccaagctcaagatggtcctgggtgtcctgctgtggtgcgtctcctgggcggaccttttttactccttccatggcctggtccatggccgggcccctgcccctgttttctttgtcacccccttggtggtgggggtcaccatgctgctggccaccctgctgatacagtatgagcggctgcagggcgtacagtcttcgggggtcctcattatcttctggttcctgtgtgtggtctgcgccatcgtcccattccgctccaagatccttttagccaaggcagagggtgagatctcagaccccttccgcttcaccaccttctacatccactttgccctggtactctctgccctcatcttggcctgcttcagggagaaacctccatttttctccgcaaagaatgtcgaccctaacccctaccctgagaccagcgctggctttctctcccgcctgtttttctggtggttcacaaagctgctaaaccctgaccctctgcggggctgcctgccgggcttcacctccccccaggatggccatctatggctaccggcatcccctggaggagaaggacctctggtccctaaaggaagaggacagatcccagatggtggtgcagcagctgctggaggcatggaggaagcaggaaaagcagacggcacgacacaaggcttcagcagcacctgggaaaaatgcctccggcgaggacgaggtgctgctgggtgcccggcccaggccccggaagccctccttcctgaaggccctgctggccaccttcggctccagcttcctcatcagtgcctgcttcaagcttatccaggacctgctctccttcatcaatccacagctgctcagcatcctgatcaggtttatctccaaccccatggccccctcctggtggggcttcctggtggctgggctgatgttcctgtgctccatgatgcagtcgctgatcttacaacactattaccactacatctttgtgactggggtgaagtttcgtactgggatcatgggtgtcatctacaggaaggctctggttatcaccaactcagtcaaacgtgcgtccactgtgggggaaattgtcaacctcatgtcagtggatgcccagcgcttcatggaccttgcccccttcctcaatctgctgtggtcagcacccctgcagatcatcctggcgatctacttcctctggcagaacctaggtccctctgtcctggctggagtcgctttcatggtcttgctgattccactcaacggagctgtggccgtgaagatgcgcgccttccaggtaaagcaaatgaaattgaaggactcgcgcatcaagctgatgagtgagatcctgaacggcatcaaggtgctgaagctgtacgcctgggagcccagcttcctgaagcaggtggagggcatcaggcagggtgagctccagctgctgcgcacggcggcctacctccacaccacaaccaccttcacctggatgtgcagccccttcctggtgaccctgatcaccctctgggtgtacgtgtacgtggacccaaacaatgtgctggacgccgagaaggcctttgtgtctgtgtccttgtttaatatcttaagacttcccctcaacatgctgccccagttaatcagcaacctgactcaggccagtgtgtctctgaaacggatccagcaattcctgagccaagaggaacttgacccccagagtgtggaaagaaagaccatctccccaggctatgccatcaccatacacagtggcaccttcacctgggcccaggacctgccccccactctgcacagcctagacatccaggtcccgaaaggggcactggtggccgtggtggggcctgtgggctgtgggaagtcctccctggtgtctgccctgctgggagagatggagaagctagaaggcaaagtgcacatgaagggctccgtggcctatgtgccccagcaggcatggatccagaactgcactcttcaggaaaacgtgcttttcggcaaagccctgaaccccaagcgctaccagcagactctggaggcctgtgccttgctagctgacctggagatgctgcctggtggggatcagacagagattggagagaagggcattaacctgtctgggggccagcggcagcgggtcagtctggctcgagctgtttacagtgatgccgatattttcttgctggatgacccactgtccgcggtggactctcatgtggccaagcacatctttgaccacgtcatcgggccagaaggcgtgctggcaggcaagacgcgagtgctggtgacgcacggcattagcttcctgccccagacagacttcatcattgtgctagctgatggacaggtgtctgagatgggcccgtacccagccctgctgcagcgcaacggctcctttgccaactttctctgcaactatgcccccgatgaggaccaagggcacctggaggacagctggaccgcgttggaaggtgcagaggataaggaggcactgctgattgaagacacactcagcaaccacacggatctgacagacaatgatccagtcacctatgtggtccagaagcagtttatgagacagctgagtgccctgtcctcagatggggagggacagggtcggcctgtaccccggaggcacctgggtccatcagagaaggtgcaggtgacagaggcgaaggcagatggggcactgacccaggaggagaaagcagccattggcactgtggagctcagtgtgttctgggattatgccaaggccgtggggctctgtaccacgctggccatctgtctcctgtatgtgggtcaaagtgcggctgccattggagccaatgtgtggctcagtgcctggacaaatgatgccatggcagacagtagacagaacaacacttccctgaggctgggcgtctatgctgctttaggaattctgcaagggttcttggtgatgctggcagccatggccatggcagcgggtggcatccaggctgcccgtgtgttgcaccaggcactgctgcacaacaagatacgctcgccacagtccttctttgacaccacaccatcaggccgcatcctgaactgcttctccaaggacatctatgtcgttgatgaggttctggcccctgtcatcctcatgctgctcaattccttcttcaacgccatctccactcttgtggtcatcatggccagcacgccgctcttcactgtggtcatcctgcccctggctgtgctctacaccttagtgcagcgcttctatgcagccacatcacggcaactgaagcggctggaatcagtcagccgctcacctatctactcccacttttcggagacagtgactggtgccagtgtcatccgggcctacaaccgcagccgggattttgagatcatcagtgatactaaggtggatgccaaccagagaagctgctacccctacatcatctccaaccggtcagaagccgcctccctcgctccctgctcctccaggaattcccagcaggctctctggtgttcagggtccttgtccctcctttcccctaagcagaaaactggccctgccctgcccctgccccatttcctcctcatctgatcccccataggtggctgagcatcggagtggagttcgtggggaactgcgtggtgctctttgctgcactatttgccgtcatcgggaggagcagcctgaacccggggctggtgggcctttctgtgtcctactccttgcaggtgacatttgctctgaactggatgatacgaatgatgtcagatttggaatctaacatcgtggctgtggagagggtcaaggagtactccaagacagagacagaggcgccctgggtggtggaaggcagccgccctcccgaaggttggcccccacgtggggaggtggagttccggaattattctgtgcgctaccggccgggcctagacctggtgctgagagacctgagtctgcatgtgcacggtggcgagaaggtggggatcgtgggccgcactggggctggcaagtcttccatgaccctttgcctgttccgcatcctggaggcggcaaagggtgaaatccgcattgatggcctcaatgtggcagacatcggcctccatgacctgcgctctcagctgaccatcatcccgcaggaccccatcctgttctcggggaccctgcgcatgaacctggaccccttcggcagctactcagaggaggacatttggtgggctttggagctgtcccacctgcacacgtttgtgagctcccagccggcaggcctggacttccagtgctcagagggcggggagaatctcagcgtgggccagaggcagctcgtgtgcctggcccgagccctgctccgcaagagccgcatcctggttttagacgaggccacagctgccatcgacctggagactgacaacctcatccaggctaccatccgcacccagtttgatacctgcactgtcctgaccatcgcacaccggcttaacactatcatggactacaccagggtcctggtcctggacaaaggagtagtagctgaatttgattctccagccaacctcattgcagctagaggcatcttctacgggatggccagagatgctggacttgcctaaaatatattcctgagatttcctcctggcctttcctggttttcatcaggaaggaaatgacaccaaatatgtccgcagaatggacttgatagcaaacactgggggcaccttaagattttgcacctgtaaagtgccttacagggtaactgtgctgaatgctttagatgaggaaatgatccccaagtggtgaatgacacgcctaaggtcacagctagtttgagccagttagactagtccccggtctcccgattcccaactgagtgttatttgcacactgcactgttttcaaataacgattttatgaaatgacctctgtcctccctctgatttttcatattttctaaagtttcgtttctgttttttaataaaaagctttttcctcctggaacagaagacagctgctgggtcaggccacccctaggaactcagtcctgtactctggggtgctgcctgaatccattaaaaatgggagtactgatgaaataaaactacatggtcaacagta

SEQ ID NO: 110182 - DNA, 5271 bp, Homo sapiens
  Payload ID: 1624
  Gene Symbol: ABCC3
  Gene Name: ATP-binding cassette, sub-family C (CFTR/MRP), member 3
  Uniprot ID: O15438
  ENST ID: ENST00000505699
  CDS Start-End: 37-3753
ccgcgctcgccttccttgcagccgcgcctcggccccatggacgccctgtgcggttccggggagctcggctccaagttctgggactccaacctgtctgtgcacacagaaaacccggacctcactccctgcttccagaactccctgctggcctgggtgccctgcatctacctgtgggtcgccctgccctgctacttgctctacctgcggcaccattgtcgtggctacatcatcctctcccacctgtccaagctcaagatggtcctgggtgtcctgctgtggtgcgtctcctgggcggaccttttttactccttccatggcctggtccatggccgggcccctgcccctgttttctttgtcacccccttggtggtgggggtcaccatgctgctggccaccctgctgatacagtatgagcggctgcagggcgtacagtcttcgggggtcctcattatcttctggttcctgtgtgtggtctgcgccatcgtcccattccgctccaagatccttttagccaaggcagagggtgagatctcagaccccttccgcttcaccaccttctacatccactttgccctggtactctctgccctcatcttggcctgcttcagggagaaacctccatttttctccgcaaagaatgtcgaccctaacccctaccctgagaccagcgctggctttctctcccgcctgtttttctggtggttcacaaagatggccatctatggctaccggcatcccctggaggagaaggacctctggtccctaaaggaagaggacagatcccagatggtggtgcagcagctgctggaggcatggaggaagcaggaaaagcagacggcacgacacaaggcttcagcagcacctgggaaaaatgcctccggcgaggacgaggtgctgctgggtgcccggcccaggccccggaagccctccttcctgaaggccctgctggccaccttcggctccagcttcctcatcagtgcctgcttcaagcttatccaggacctgctctccttcatcaatccacagctgctcagcatcctgatcaggtttatctccaaccccatggccccctcctggtggggcttcctggtggctgggctgatgttcctgtgctccatgatgcagtcgctgatcttacaacactattaccactacatctttgtgactggggtgaagtttcgtactgggatcatgggtgtcatctacaggaaggctctggttatcaccaactcagtcaaacgtgcgtccactgtgggggaaattgtcaacctcatgtcagtggatgcccagcgcttcatggaccttgcccccttcctcaatctgctgtggtcagcacccctgcagatcatcctggcgatctacttcctctggcagaacctaggtccctctgtcctggctggagtcgctttcatggtcttgctgattccactcaacggagctgtggccgtgaagatgcgcgccttccaggtaaagcaaatgaaattgaaggactcgcgcatcaagctgatgagtgagatcctgaacggcatcaaggtgctgaagctgtacgcctgggagcccagcttcctgaagcaggtggagggcatcaggcagggtgagctccagctgctgcgcacggcggcctacctccacaccacaaccaccttcacctggatgtgcagccccttcctggtgaccctgatcaccctctgggtgtacgtgtacgtggacccaaacaatgtgctggacgccgagaaggcctttgtgtctgtgtccttgtttaatatcttaagacttcccctcaacatgctgccccagttaatcagcaacctgactcaggccagtgtgtctctgaaacggatccagcaattcctgagccaagaggaacttgacccccagagtgtggaaagaaagaccatctccccaggctatgccatcaccatacacagtggcaccttcacctgggcccaggacctgccccccactctgcacagcctagacatccaggtcccgaaaggggcactggtggccgtggtggggcctgtgggctgtgggaagtcctccctggtgtctgccctgctgggagagatggagaagctagaaggcaaagtgcacatgaagggctccgtggcctatgtgccccagcaggcatggatccagaactgcactcttcaggaaaacgtgcttttcggcaaagccctgaaccccaagcgctaccagcagactctggaggcctgtgccttgctagctgacctggagatgctgcctggtggggatcagacagagattggagagaagggcattaacctgtctgggggccagcggcagcgggtcagtctggctcgagctgtttacagtgatgccgatattttcttgctggatgacccactgtccgcggtggactctcatgtggccaagcacatctttgaccacgtcatcgggccagaaggcgtgctggcaggcaagacgcgagtgctggtgacgcacggcattagcttcctgccccagacagacttcatcattgtgctagctgatggacaggtgtctgagatgggcccgtacccagccctgctgcagcgcaacggctcctttgccaactttctctgcaactatgcccccgatgaggaccaagggcacctggaggacagctggaccgcgttggaaggtgcagaggataaggaggcactgctgattgaagacacactcagcaaccacacggatctgacagacaatgatccagtcacctatgtggtccagaagcagtttatgagacagctgagtgccctgtcctcagatggggagggacagggtcggcctgtaccccggaggcacctgggtccatcagagaaggtgcaggtgacagaggcgaaggcagatggggcactgacccaggaggagaaagcagccattggcactgtggagctcagtgtgttctgggattatgccaaggccgtggggctctgtaccacgctggccatctgtctcctgtatgtgggtcaaagtgcggctgccattggagccaatgtgtggctcagtgcctggacaaatgatgccatggcagacagtagacagaacaacacttccctgaggctgggcgtctatgctgctttaggaattctgcaagggttcttggtgatgctggcagccatggccatggcagcgggtggcatccaggctgcccgtgtgttgcaccaggcactgctgcacaacaagatacgctcgccacagtccttctttgacaccacaccatcaggccgcatcctgaactgcttctccaaggacatctatgtcgttgatgaggttctggcccctgtcatcctcatgctgctcaattccttcttcaacgccatctccactcttgtggtcatcatggccagcacgccgctcttcactgtggtcatcctgcccctggctgtgctctacaccttagtgcagcgcttctatgcagccacatcacggcaactgaagcggctggaatcagtcagccgctcacctatctactcccacttttcggagacagtgactggtgccagtgtcatccgggcctacaaccgcagccgggattttgagatcatcagtgatactaaggtggatgccaaccagagaagctgctacccctacatcatctccaaccggtcagaagccgcctccctcgctccctgctcctccaggaattcccagcaggctctctggtgttcagggtccttgtccctcctttcccctaagcagaaaactggccctgccctgcccctgccccatttcctcctcatctgatcccccataggtggctgagcatcggagtggagttcgtggggaactgcgtggtgctctttgctgcactatttgccgtcatcgggaggagcagcctgaacccggggctggtgggcctttctgtgtcctactccttgcaggtgacatttgctctgaactggatgatacgaatgatgtcagatttggaatctaacatcgtggctgtggagagggtcaaggagtactccaagacagagacagaggcgccctgggtggtggaaggcagccgccctcccgaaggttggcccccacgtggggaggtggagttccggaattattctgtgcgctaccggccgggcctagacctggtgctgagagacctgagtctgcatgtgcacggtggcgagaaggtggggatcgtgggccgcactggggctggcaagtcttccatgaccctttgcctgttccgcatcctggaggcggcaaagggtgaaatccgcattgatggcctcaatgtggcagacatcggcctccatgacctgcgctctcagctgaccatcatcccgcaggaccccatcctgttctcggggaccctgcgcatgaacctggaccccttcggcagctactcagaggaggacatttggtgggctttggagctgtcccacctgcacacgtttgtgagctcccagccggcaggcctggacttccagtgctcagagggcggggagaatctcagcgtgggccagaggcagctcgtgtgcctggcccgagccctgctccgcaagagccgcatcctggttttagacgaggccacagctgccatcgacctggagactgacaacctcatccaggctaccatccgcacccagtttgatacctgcactgtcctgaccatcgcacaccggcttaacactatcatggactacaccagggtcctggtcctggacaaaggagtagtagctgaatttgattctccagccaacctcattgcagctagaggcatcttctacgggatggccagagatgctggacttgcctaaaatatattcctgagatttcctcctggcctttcctggttttcatcaggaaggaaatgacaccaaatatgtccgcagaatggacttgatagcaaacactgggggcaccttaagattttgcacctgtaaagtgccttacagggtaactgtgctgaatgctttagatgaggaaatgatccccaagtggtgaatgacacgcctaaggtcacagctagtttgagccagttagactagtccccggtctcccgattcccaactgagtgttatttgcacactgcactgttttcaaataacgattttatgaaatgacctctgtcctccctctgatttttcatattttctaaagtttcgtttctgttttttaataaaaagctttttcctcctggaacagaagacagctgctgggtcaggccacccctaggaactcagtcctgtactctggggtgctgcctgaatccattaaaaatgggagtactgatgaaataaaactacatggtcaacagta

SEQ ID NO: 110183 - DNA, 5839 bp, Homo sapiens
  Payload ID: 1625
  Gene Symbol: ABCC4
  Gene Name: ATP-binding cassette, sub-family C (CFTR/MRP), member 4
  Uniprot ID: O15439
  ENST ID: ENST00000376887
  CDS Start-End: 116-4093
ggacaggcgtggcggccggagccccagcatccctgcttgaggtccaggagcggagcccgcggccaccgccgcctgatcagcgcgaccccggcccgcgcccgccccgcccggcaagatgctgcccgtgtaccaggaggtgaagcccaacccgctgcaggacgcgaacctctgctcacgcgtgttcttctggtggctcaatcccttgtttaaaattggccataaacggagattagaggaagatgatatgtattcagtgctgccagaagaccgctcacagcaccttggagaggagttgcaagggttctgggataaagaagttttaagagctgagaatgacgcacagaagccttctttaacaagagcaatcataaagtgttactggaaatcttatttagttttgggaatttttacgttaattgaggaaagtgccaaagtaatccagcccatatttttgggaaaaattattaattattttgaaaattatgatcccatggattctgtggctttgaacacagcgtacgcctatgccacggtgctgactttttgcacgctcattttggctatactgcatcacttatatttttatcacgttcagtgtgctgggatgaggttacgagtagccatgtgccatatgatttatcggaaggcacttcgtcttagtaacatggccatggggaagacaaccacaggccagatagtcaatctgctgtccaatgatgtgaacaagtttgatcaggtgacagtgttcttacacttcctgtgggcaggaccactgcaggcgattgcagtgactgccctactctggatggagataggaatatcgtgccttgctgggatggcagttctaatcattctcctgcccttgcaaagctgttttgggaagttgttctcatcactgaggagtaaaactgcaactttcacggatgccaggatcaggaccatgaatgaagttataactggtataaggataataaaaatgtacgcctgggaaaagtcattttcaaatcttattaccaatttgagaaagaaggagatttccaagattctgagaagttcctgcctcagagggatgaatttggcttcatttttcagtgcaagcaaaatcatcgtgtttgtgaccttcaccacctacgtgctcctcggcagtgtgatcacagccagccgcgtgttcgtggcagtgacgctgtatggggctgtgcggctgacggttaccctcttcttcccctcagccattgagagggtgtcagaggcaatcgtcagcatccgaagaatccagacctttttgctacttgatgagatatcacagcgcaaccgtcagctgccgtcagatggtaaaaagatggtgcatgtgcaggattttactgctttttgggataaggcatcagagaccccaactctacaaggcctttcctttactgtcagacctggcgaattgttagctgtggtcggccccgtgggagcagggaagtcatcactgttaagtgccgtgctcggggaattggccccaagtcacgggctggtcagcgtgcatggaagaattgcctatgtgtctcagcagccctgggtgttctcgggaactctgaggagtaatattttatttgggaagaaatacgaaaaggaacgatatgaaaaagtcataaaggcttgtgctctgaaaaaggatttacagctgttggaggatggtgatctgactgtgataggagatcggggaaccacgctgagtggagggcagaaagcacgggtaaaccttgcaagagcagtgtatcaagatgctgacatctatctcctggacgatcctctcagtgcagtagatgcggaagttagcagacacttgttcgaactgtgtatttgtcaaattttgcatgagaagatcacaattttagtgactcatcagttgcagtacctcaaagctgcaagtcagattctgatattgaaagatggtaaaatggtgcagaaggggacttacactgagttcctaaaatctggtatagattttggctcccttttaaagaaggataatgaggaaagtgaacaacctccagttccaggaactcccacactaaggaatcgtaccttctcagagtcttcggtttggtctcaacaatcttctagaccctccttgaaagatggtgctctggagagccaagatacagagaatgtcccagttacactatcagaggagaaccgttctgaaggaaaagttggttttcaggcctataagaattacttcagagctggtgctcactggattgtcttcattttccttattctcctaaacactgcagctcaggttgcctatgtgcttcaagattggtggctttcatactgggcaaacaaacaaagtatgctaaatgtcactgtaaatggaggaggaaatgtaaccgagaagctagatcttaactggtacttaggaatttattcaggtttaactgtagctaccgttctttttggcatagcaagatctctattggtattctacgtccttgttaactcttcacaaactttgcacaacaaaatgtttgagtcaattctgaaagctccggtattattctttgatagaaatccaataggaagaattttaaatcgtttctccaaagacattggacacttggatgatttgctgccgctgacgtttttagatttcatccagacattgctacaagtggttggtgtggtctctgtggctgtggccgtgattccttggatcgcaatacccttggttccccttggaatcattttcatttttcttcggcgatattttttggaaacgtcaagagatgtgaagcgcctggaatctacaactcggagtccagtgttttcccacttatcatcttctctccaggggctctggaccatccgggcatacaaagcagaagagaggtgtcaggaactgtttgatgcacaccaggatttacattcagaggcttggttcttgtttttgacaacgtcccgctggtttgccgtccgtctggatgccatctgtgccatgtttgtcatcatcgttgcctttgggtccctgattctggcaaaaactctggatgccgggcaggttggtttggcactgtcctatgccctcacgctcatggggatgtttcagtggtgtgttcgacaaagtgctgaagttgagaatatgatgatctcagtagaaagggtcattgaatacacagaccttgaaaaagaagcaccttgggaatatcagaaacgcccaccaccagcctggccccatgaaggagtgataatctttgacaatgtgaacttcatgtacagtccaggtgggcctctggtactgaagcatctgacagcactcattaaatcacaagaaaaggttggcattgtgggaagaaccggagctggaaaaagttccctcatctcagccctttttagattgtcagaacccgaaggtaaaatttggattgataagatcttgacaactgaaattggacttcacgatttaaggaagaagatgtcaatcatacctcaggaacctgttttgttcactggaacaatgaggaaaaacctggatccctttaatgagcacacggatgaggaactgtggaatgccttacaagaggtacaacttaaagaaaccattgaagatcttcctggtaaaatggatactgaattagcagaatcaggatccaattttagtgttggacaaagacaactggtgtgccttgccagggcaattctcaggaaaaatcagatattgattattgatgaagcgacggcaaatgtggatccaagaactgatgagttaatacaaaaaaaaatccgggagaaatttgcccactgcaccgtgctaaccattgcacacagattgaacaccattattgacagcgacaagataatggttttagattcaggaagactgaaagaatatgatgagccgtatgttttgctgcaaaataaagagagcctattttacaagatggtgcaacaactgggcaaggcagaagccgctgccctcactgaaacagcaaaacaggtatacttcaaaagaaattatccacatattggtcacactgaccacatggttacaaacacttccaatggacagccctcgaccttaactattttcgagacagcactgtgaatccaaccaaaatgtcaagtccgttccgaaggcattttccactagtttttggactatgtaaaccacattgtacttttttttactttggcaacaaatatttatacatacaagatgctagttcatttgaatatttctcccaacttatccaaggatctccagctctaacaaaatggtttatttttatttaaatgtcaatagttgttttttaaaatccaaatcagaggtgcaggccaccagttaaatgccgtctatcaggttttgtgccttaagagactacagagtcaaagctcatttttaaaggagtaggacaaagttgtcacaggtttttgttgttgtttttattgcccccaaaattacatgttaatttccatttatatcagggattctatttacttgaagactgtgaagttgccattttgtctcattgttttctttgacataactaggatccattatttcccctgaaggcttcttgttagaaaatagtacagttacaaccaataggaacaacaaaaagaaaaagtttgtgacattgtagtagggagtgtgtaccccttactccccatcaaaaaaaaaaatggatacatggttaaaggatagaagggcaatattttatcatatgttctaaaagagaaggaagagaaaatactactttctcaaaatggaagcccttaaaggtgctttgatactgaaggacacaaatgtgaccgtccatcctcctttagagttgcatgacttggacacggtaactgttgcagttttagactcagcattgtgacacttcccaagaaggccaaacctctaaccgacattcctgaaatacgtggcattattcttttttggatttctcatttatggaaggctaaccctctgttgactgtaagccttttggtttgggctgtattgaaatcctttctaaattgcatgaataggctctgctaacgtgatgagacaaactgaaaattattgcaagcattgactataattatgcagtacgttctcaggatgcatccaggggttcattttcatgagcctgtccaggttagtttactcctgaccactaatagcattgtcatttgggctttctgttgaatgaatcaacaaaccacaatacttcctgggaccttttgtactttatttgaactatgagtctttaatttttcctgatgatggtggctgtaatatgttgagttcagtttactaaaggttttactattatggtttgaagtggagtctcatgacctctcagaataaggtgtcacctccctgaaattgcatatatgtatatagacatgcacacgtgtgcatttgtttgtatacatatatttgtccttcgtatagcaagttttttgctcatcagcagagagcaacagatgttttattgagtgaagccttaaaaagcacacaccacacacagctaactgccaaaatacattgaccgtagtagctgttcaactcctagtacttagaaatacacgtatggttaatgttcagtccaacaaaccacacacagtaaatgtttattaatagtcatggttcgtattttaggtgactgaaattgcatcagtgatcataatgaggtttgttaaaacgatagctatattcaaaatgtctatatgtttatttggacttttgaggttaaagacagtcatataaacgtcctgtttctgttttaatgttatcatagaattttttaatgaaactaaattcaattgaaataaatgatagttttcatctccattcaga

SEQ ID NO: 110184 - DNA, 2840 bp, Homo sapiens
  Payload ID: 1625
  Gene Symbol: ABCC4
  Gene Name: ATP-binding cassette, sub-family C (CFTR/MRP), member 4
  Uniprot ID: O15439
  ENST ID: ENST00000536256
  CDS Start-End: 120-2474
gagcggacaggcgtggcggccggagccccagcatccctgcttgaggtccaggagcggagcccgcggccaccgccgcctgatcagcgcgaccccggcccgcgcccgccccgcccggcaagatgctgcccgtgtaccaggaggtgaagcccaacccgctgcaggacgcgaacctctgctcacgcgtgttcttctggtggctcaatcccttgtttaaaattggccataaacggagattagaggaagatgatatgtattcagtgctgccagaagaccgctcacagcaccttggagaggagttgcaagggttctgggataaagaagttttaagagctgagaatgacgcacagaagccttctttaacaagagcaatcataaagtgttactggaaatcttatttagttttgggaatttttacgttaattgaggcacttcgtcttagtaacatggccatggggaagacaaccacaggccagatagtcaatctgctgtccaatgatgtgaacaagtttgatcaggtgacagtgttcttacacttcctgtgggcaggaccactgcaggcgattgcagtgactgccctactctggatggagataggaatatcgtgccttgctgggatggcagttctaatcattctcctgcccttgcaaagctgttttgggaagttgttctcatcactgaggagtaaaactgcaactttcacggatgccaggatcaggaccatgaatgaagttataactggtataaggataataaaaatgtacgcctgggaaaagtcattttcaaatcttattaccaatttgagaaagaaggagatttccaagattctgagaagttcctgcctcagagggatgaatttggcttcatttttcagtgcaagcaaaatcatcgtgtttgtgaccttcaccacctacgtgctcctcggcagtgtgatcacagccagccgcgtgttcgtggcagtgacgctgtatggggctgtgcggctgacggttaccctcttcttcccctcagccattgagagggtgtcagaggcaatcgtcagcatccgaagaatccagacctttttgctacttgatgagatatcacagcgcaaccgtcagctgccgtcagatggtaaaaagatggtgcatgtgcaggattttactgctttttgggataaggcatcagagaccccaactctacaaggcctttcctttactgtcagacctggcgaattgttagctgtggtcggccccgtgggagcagggaagtcatcactgttaagtgccgtgctcggggaattggccccaagtcacgggctggtcagcgtgcatggaagaattgcctatgtgtctcagcagccctgggtgttctcgggaactctgaggagtaatattttatttgggaagaaatacgaaaaggaacgatatgaaaaagtcataaaggcttgtgctctgaaaaaggatttacagctgttggaggatggtgatctgactgtgataggagatcggggaaccacgctgagtggagggcagaaagcacgggtaaaccttgcaagagcagtgtatcaagatgctgacatctatctcctggacgatcctctcagtgcagtagatgcggaagttagcagacacttgttcgaactgtgtatttgtcaaattttgcatgagaagatcacaattttagtgactcatcagttgcagtacctcaaagctgcaagtcagattctgatattgaaagatggtaaaatggtgcagaaggggacttacactgagttcctaaaatctggtatagattttggctcccttttaaagaaggataatgaggaaagtgaacaacctccagttccaggaactcccacactaaggaatcgtaccttctcagagtcttcggtttggtctcaacaatcttctagaccctccttgaaagatggtgctctggagagccaagatacagagaatgtcccagttacactatcagaggagaaccgttctgaaggaaaagttggttttcaggcctataagaattacttcagagctggtgctcactggattgtcttcattttccttattctcctaaacactgcagctcaggttgcctatgtgcttcaagattggtggctttcatactgggcaaacaaacaaagtatgctaaatgtcactgtaaatggaggaggaaatgtaaccgagaagctagatcttaactggtacttaggaatttattcaggtttaactgtagctaccgttctttttggcatagcaagatctctattggtattctacgtccttgttaactcttcacaaactttgcacaacaaaatgtttgagtcaattctgaaagctccggtattattctttgatagaaatccaataggaagaattttaaatcgtttctccaaagacattggacacttggatgatttgctgccgctgacgtttttagatttcatccagagatgggatctcgctgtgttgtcctggctggtctcaaactcctaggctcaagcaatcctcctccctcctcaagcaaacctcagtgctgggattataggcatgagccactgtacctggctaaatgttgtttttttgatattcaatttttgtttatagaattttcatttgttttgctcttatacttttcatctttttatgtttattgaccaattaaatatcatttgggtaagcacctatttaagtgtcttaacaatttttctattgagtactctgggtttttgttttgtttttcttactgatttgtagaattctttatgtattctgaattgcagataccttccttctgtactaatgcttatctttttagccctgtaatattgtgttttcataaacatacttatcaatcttttc

SEQ ID NO: 110185 - DNA, 2903 bp, Homo sapiens
  Payload ID: 1625
  Gene Symbol: ABCC4
  Gene Name: ATP-binding cassette, sub-family C (CFTR/MRP), member 4
  Uniprot ID: O15439
  ENST ID: ENST00000629385
  CDS Start-End: 133-2712
acaggctccagccgagcggacaggcgtggcggccggagccccagcatccctgcttgaggtccaggagcggagcccgcggccaccgccgcctgatcagcgcgaccccggcccgcgcccgccccgcccggcaagatgctgcccgtgtaccaggaggtgaagcccaacccgctgcaggacgcgaacctctgctcacgcgtgttcttctggtggctcaatcccttgtttaaaattggccataaacggagattagaggaagatgatatgtattcagtgctgccagaagaccgctcacagcaccttggagaggagttgcaagggttctgggataaagaagttttaagagctgagaatgacgcacagaagccttctttaacaagagcaatcataaagtgttactggaaatcttatttagttttgggaatttttacgttaattgaggaaagtgccaaagtaatccagcccatatttttgggaaaaattattaattattttgaaaattatgatcccatggattctgtggctttgaacacagcgtacgcctatgccacggtgctgactttttgcacgctcattttggctatactgcatcacttatatttttatcacgttcagtgtgctgggatgaggttacgagtagccatgtgccatatgatttatcggaaggcacttcgtcttagtaacatggccatggggaagacaaccacaggccagatagtcaatctgctgtccaatgatgtgaacaagtttgatcaggtgacagtgttcttacacttcctgtgggcaggaccactgcaggcgattgcagtgactgccctactctggatggagataggaatatcgtgccttgctgggatggcagttctaatcattctcctgcccttgcaaagctgttttgggaagttgttctcatcactgaggagtaaaactgcaactttcacggatgccaggatcaggaccatgaatgaagttataactggtataaggataataaaaatgtacgcctgggaaaagtcattttcaaatcttattaccaatttgagaaagaaggagatttccaagattctgagaagttcctgcctcagagggatgaatttggcttcatttttcagtgcaagcaaaatcatcgtgtttgtgaccttcaccacctacgtgctcctcggcagtgtgatcacagccagccgcgtgttcgtggcagtgacgctgtatggggctgtgcggctgacggttaccctcttcttcccctcagccattgagagggtgtcagaggcaatcgtcagcatccgaagaatccagacctttttgctacttgatgagatatcacagcgcaaccgtcagctgccgtcagatggtaaaaagatggtgcatgtgcaggattttactgctttttgggataaggcatcagagaccccaactctacaaggcctttcctttactgtcagacctggcgaattgttagctgtggtcggccccgtgggagcagggaagtcatcactgttaagtgccgtgctcggggaattggccccaagtcacgggctggtcagcgtgcatggaagaattgcctatgtgtctcagcagccctgggtgttctcgggaactctgaggagtaatattttatttgggaagaaatacgaaaaggaacgatatgaaaaagtcataaaggcttgtgctctgaaaaaggatttacagctgttggaggatggtgatctgactgtgataggagatcggggaaccacgctgagtggagggcagaaagcacgggtaaaccttgcaagagcagtgtatcaagatgctgacatctatctcctggacgatcctctcagtgcagtagatgcggaagttagcagacacttgttcgaactgtgtatttgtcaaattttgcatgagaagatcacaattttagtgactcatcagttgcagtacctcaaagctgcaagtcagattctgatattgaaagatggtaaaatggtgcagaaggggacttacactgagttcctaaaatctggtatagattttggctcccttttaaagaaggataatgaggaaagtgaacaacctccagttccaggaactcccacactaaggaatcgtaccttctcagagtcttcggtttggtctcaacaatcttctagaccctccttgaaagatggtgctctggagagccaagatacagagaatgtcccagttacactatcagaggagaaccgttctgaaggaaaagttggttttcaggcctataagaattacttcagagctggtgctcactggattgtcttcattttccttattctcctaaacactgcagctcaggttgcctatgtgcttcaagattggtggctttcatactgggcaaacaaacaaagtatgctaaatgtcactgtaaatggaggaggaaatgtaaccgagaagctagatcttaactggtacttaggaatttattcaggtttaactgtagctaccgttctttttggcatagcaagatctctattggtattctacgtccttgttaactcttcacaaactttgcacaacaaaatgtttgagtcaattctgaaagctccggtattattctttgatagaaatccaataggaagaattttaaatcgtttctccaaagacattggacacttggatgatttgctgccgctgacgtttttagatttcatccagagatgggatctcgctgtgttgtcctggctggtctcaaactcctaggctcaagcaatcctcctccctcctcaagcaaacctcagtgctgggattataggcatgagccactgtacctggctaaatgttgtttttttgatattcaatttttgtttatagaattttcatttgttttgctcttatacttttcatctttttatgtttattgaccaattaaatatcatttgggtaagcaccta

SEQ ID NO: 110186 - DNA, 5712 bp, Homo sapiens
  Payload ID: 1626
  Gene Symbol: ABCC5
  Gene Name: ATP-binding cassette, sub-family C (CFTR/MRP), member 5
  Uniprot ID: O15440
  ENST ID: ENST00000265586
  CDS Start-End: 166-4350
cttgcgcggtgtggcggccgatgccgctataaaggcttgttttgctgcagggctcatgctcgggagcgtggttgagcggctggcgcggttgtcctggagcaggggcgcaggaattctgatgtgaaactaacagtctgtgagccctggaacctccactcagagaagatgaaggatatcgacataggaaaagagtatatcatccccagtcctgggtatagaagtgtgagggagagaaccagcacttctgggacgcacagagaccgtgaagattccaagttcaggagaactcgaccgttggaatgccaagatgccttggaaacagcagcccgagccgagggcctctctcttgatgcctccatgcattctcagctcagaatcctggatgaggagcatcccaagggaaagtaccatcatggcttgagtgctctgaagcccatccggactacttccaaacaccagcacccagtggacaatgctgggcttttttcctgtatgactttttcgtggctttcttctctggcccgtgtggcccacaagaagggggagctctcaatggaagacgtgtggtctctgtccaagcacgagtcttctgacgtgaactgcagaagactagagagactgtggcaagaagagctgaatgaagttgggccagacgctgcttccctgcgaagggttgtgtggatcttctgccgcaccaggctcatcctgtccatcgtgtgcctgatgatcacgcagctggctggcttcagtggaccagccttcatggtgaaacacctcttggagtatacccaggcaacagagtctaacctgcagtacagcttgttgttagtgctgggcctcctcctgacggaaatcgtgcggtcttggtcgcttgcactgacttgggcattgaattaccgaaccggtgtccgcttgcggggggccatcctaaccatggcatttaagaagatccttaagttaaagaacattaaagagaaatccctgggtgagctcatcaacatttgctccaacgatgggcagagaatgtttgaggcagcagccgttggcagcctgctggctggaggacccgttgttgccatcttaggcatgatttataatgtaattattctgggaccaacaggcttcctgggatcagctgtttttatcctcttttacccagcaatgatgtttgcatcacggctcacagcatatttcaggagaaaatgcgtggccgccacggatgaacgtgtccagaagatgaatgaagttcttacttacattaaatttatcaaaatgtatgcctgggtcaaagcattttctcagagtgttcaaaaaatccgcgaggaggagcgtcggatattggaaaaagctgggtacttccagagcatcactgtgggtgtggctcccattgtggtggtgattgccagcgtggtgaccttctctgttcatatgaccctgggcttcgatctgacagcagcacaggctttcacagtggtgacagtcttcaattccatgacttttgctttgaaagtaacaccgttttcagtaaagtccctctcagaagcctcagtggctgttgacagatttaagagtttgtttctaatggaagaggttcacatgataaagaacaaaccagccagtcctcacatcaagatagagatgaaaaatgccaccttggcatgggactcctcccactccagtatccagaactcgcccaagctgacccccaaaatgaaaaaagacaagagggcttccaggggcaagaaagagaaggtgaggcagctgcagcgcactgagcatcaggcggtgctggcagagcagaaaggccacctcctcctggacagtgacgagcggcccagtcccgaagaggaagaaggcaagcacatccacctgggccacctgcgcttacagaggacactgcacagcatcgatctggagatccaagagggtaaactggttggaatctgtggcagtgtgggaagtggaaaaacctctctcatttcagccattttaggccagatgacgcttctagagggcagcattgcaatcagtggaaccttcgcttatgtggcccagcaggcctggatcctcaatgctactctgagagacaacatcctgtttgggaaggaatatgatgaagaaagatacaactctgtgctgaacagctgctgcctgaggcctgacctggccattcttcccagcagcgacctgacggagattggagagcgaggagccaacctgagcggtgggcagcgccagaggatcagccttgcccgggccttgtatagtgacaggagcatctacatcctggacgaccccctcagtgccttagatgcccatgtgggcaaccacatcttcaatagtgctatccggaaacatctcaagtccaagacagttctgtttgttacccaccagttacagtacctggttgactgtgatgaagtgatcttcatgaaagagggctgtattacggaaagaggcacccatgaggaactgatgaatttaaatggtgactatgctaccatttttaataacctgttgctgggagagacaccgccagttgagatcaattcaaaaaaggaaaccagtggttcacagaagaagtcacaagacaagggtcctaaaacaggatcagtaaagaaggaaaaagcagtaaagccagaggaagggcagcttgtgcagctggaagagaaagggcagggttcagtgccctggtcagtatatggtgtctacatccaggctgctgggggccccttggcattcctggttattatggcccttttcatgctgaatgtaggcagcaccgccttcagcacctggtggttgagttactggatcaagcaaggaagcgggaacaccactgtgactcgagggaacgagacctcggtgagtgacagcatgaaggacaatcctcatatgcagtactatgccagcatctacgccctctccatggcagtcatgctgatcctgaaagccattcgaggagttgtctttgtcaagggcacgctgcgagcttcctcccggctgcatgacgagcttttccgaaggatccttcgaagccctatgaagttttttgacacgacccccacagggaggattctcaacaggttttccaaagacatggatgaagttgacgtgcggctgccgttccaggccgagatgttcatccagaacgttatcctggtgttcttctgtgtgggaatgatcgcaggagtcttcccgtggttccttgtggcagtggggccccttgtcatcctcttttcagtcctgcacattgtctccagataccaggagctgctggatgacaaccaagctcctttttttttgtttacgtgtgcgatgcggtggctggctgtgcggctggacctcatcagcatcgccctcatcaccaccacggggctgatgatcgttcttatgcacgggcagattcccccagcctatgcgggtctcgccatctcttatgctgtccagttaacggggctgttccagtttacggtcagactggcatctgagacagaagctcgattcacctcggtggagaggatcaatcactacattaagactctgtccttggaagcacctgccagaattaagaacaaggctccctcccctgactggccccaggagggagaggtgacctttgagaacgcagagatgaggtaccgagaaaacctccctctcgtcctaaagaaagtatccttcacgatcaaacctaaagagaagattggcattgtggggcggacaggatcagggaagtcctcgctggggatggccctcttccgtctggtggagttatctggaggctgcatcaagattgatggagtgagaatcagtgatattggccttgccgacctccgaagcaaactctctatcattcctcaagagccggtgctgttcagtggcactgtcagatcaaatttggaccccttcaaccagtacactgaagaccagatttgggatgccctggagaggacacacatgaaagaatgtattgctcagctacctctgaaacttgaatctgaagtgatggagaatggggataacttctcagtgggggaacggcagctcttgtgcatagctagagccctgctccgccactgtaagattctgattttagatgaagccacagctgccatggacacagagacagacttattgattcaagagaccatccgagaagcatttgcagactgtaccatgctgaccattgcccatcgcctgcacacggttctaggctccgataggattatggtgctggcccagggacaggtggtggagtttgacaccccatcggtccttctgtccaacgacagttcccgattctatgccatgtttgctgctgcagagaacaaggtcgctgtcaagggctgactcctccctgttgacgaagtctcttttctttagagcattgccattccctgcctggggcgggcccctcatcgcgtcctcctaccgaaaccttgcctttctcgattttatctttcgcacagcagttccggattggcttgtgtgtttcacttttagggagagtcatattttgattattgtatttattccatattcatgtaaacaaaatttagtttttgttcttaattgcactctaaaaggttcagggaaccgttattataattgtatcagaggcctataatgaagctttatacgtgtagctatatctatatataattctgtacatagcctatatttacagtgaaaatgtaagctgtttattttatattaaaataagcactgtgctaataacagtgcatattcctttctatcatttttgtacagtttgctgtactagagatctggttttgctattagactgtaggaagagtagcatttcattcttctctagctggtggtttcacggtgccaggttttctgggtgtccaaaggaagacgtgtggcaatagtgggccctccgacagccccctctgccgcctccccacggccgctccaggggtggctggagacgggtgggcggctggagaccatgcagagcgccgtgagttctcagggctcctgccttctgtcctggtgtcacttactgtttctgtcaggagagcagcggggcgaagcccaggccccttttcactccctccatcaagaatggggatcacagagacattcctccgagccggggagtttctttcctgccttcttctttttgctgttgtttctaaacaagaatcagtctatccacagagagtcccactgcctcaggttcctatggctggccactgcacagagctctccagctccaagacctgttggttccaagccctggagccaactgctgctttttgaggtggcactttttcatttgcctattcccacacctccacagttcagtggcagggctcaggatttcgtgggtctgttttcctttctcaccgcagtcgtcgcacagtctctctctctctctcccctcaaagtctgcaactttaagcagctcttgctaatcagtgtctcacactggcgtagaagtttttgtactgtaaagagacctacctcaggttgctggttgctgtgtggtttggtgtgttcccgcaaaccccctttgtgctgtggggctggtagctcaggtgggcgtggtcactgctgtcatcaattgaatggtcagcgttgcatgtcgtgaccaactagacattctgtcgccttagcatgtttgctgaacaccttgtggaagcaaaaatctgaaaatgtgaataaaattattttggattttgt

SEQ ID NO: 110187 - DNA, 5921 bp, Homo sapiens
  Payload ID: 1626
  Gene Symbol: ABCC5
  Gene Name: ATP-binding cassette, sub-family C (CFTR/MRP), member 5
  Uniprot ID: O15440
  ENST ID: ENST00000334444
  CDS Start-End: 242-4555
gccgcgtccgcagccctgggcactcggaaggaggactacagttcccttcagccttgggaatgctttgtgcagcgcgcttgcgcggtgtggcggccgatgccgctataaaggcttgttttgctgcagggctcatgctcgggagcgtggttgagcggctggcgcggttgtcctggagcaggggcgcaggaattctgatgtgaaactaacagtctgtgagccctggaacctccactcagagaagatgaaggatatcgacataggaaaagagtatatcatccccagtcctgggtatagaagtgtgagggagagaaccagcacttctgggacgcacagagaccgtgaagattccaagttcaggagaactcgaccgttggaatgccaagatgccttggaaacagcagcccgagccgagggcctctctcttgatgcctccatgcattctcagctcagaatcctggatgaggagcatcccaagggaaagtaccatcatggcttgagtgctctgaagcccatccggactacttccaaacaccagcacccagtggacaatgctgggcttttttcctgtatgactttttcgtggctttcttctctggcccgtgtggcccacaagaagggggagctctcaatggaagacgtgtggtctctgtccaagcacgagtcttctgacgtgaactgcagaagactagagagactgtggcaagaagagctgaatgaagttgggccagacgctgcttccctgcgaagggttgtgtggatcttctgccgcaccaggctcatcctgtccatcgtgtgcctgatgatcacgcagctggctggcttcagtggaccagccttcatggtgaaacacctcttggagtatacccaggcaacagagtctaacctgcagtacagcttgttgttagtgctgggcctcctcctgacggaaatcgtgcggtcttggtcgcttgcactgacttgggcattgaattaccgaaccggtgtccgcttgcggggggccatcctaaccatggcatttaagaagatccttaagttaaagaacattaaagagaaatccctgggtgagctcatcaacatttgctccaacgatgggcagagaatgtttgaggcagcagccgttggcagcctgctggctggaggacccgttgttgccatcttaggcatgatttataatgtaattattctgggaccaacaggcttcctgggatcagctgtttttatcctcttttacccagcaatgatgtttgcatcacggctcacagcatatttcaggagaaaatgcgtggccgccacggatgaacgtgtccagaagatgaatgaagttcttacttacattaaatttatcaaaatgtatgcctgggtcaaagcattttctcagagtgttcaaaaaatccgcgaggaggagcgtcggatattggaaaaagctgggtacttccagagcatcactgtgggtgtggctcccattgtggtggtgattgccagcgtggtgaccttctctgttcatatgaccctgggcttcgatctgacagcagcacaggctttcacagtggtgacagtcttcaattccatgacttttgctttgaaagtaacaccgttttcagtaaagtccctctcagaagcctcagtggctgttgacagatttaagagtttgtttctaatggaagaggttcacatgataaagaacaaaccagccagtcctcacatcaagatagagatgaaaaatgccaccttggcatgggactcctcccactccagtatccagaactcgcccaagctgacccccaaaatgaaaaaagacaagagggcttccaggggcaagaaagagaaggtgaggcagctgcagcgcactgagcatcaggcggtgctggcagagcagaaaggccacctcctcctggacagtgacgagcggcccagtcccgaagaggaagaaggcaagcacatccacctgggccacctgcgcttacagaggacactgcacagcatcgatctggagatccaagagggtaaactggttggaatctgtggcagtgtgggaagtggaaaaacctctctcatttcagccattttaggccagatgacgcttctagagggcagcattgcaatcagtggaaccttcgcttatgtggcccagcaggcctggatcctcaatgctactctgagagacaacatcctgtttgggaaggaatatgatgaagaaagatacaactctgtgctgaacagctgctgcctgaggcctgacctggccattcttcccagcagcgacctgacggagattggagagcgaggagccaacctgagcggtgggcagcgccagaggatcagccttgcccgggccttgtatagtgacaggagcatctacatcctggacgaccccctcagtgccttagatgcccatgtgggcaaccacatcttcaatagtgctatccggaaacatctcaagtccaagacagttctgtttgttacccaccagttacagtacctggttgactgtgatgaagtgatcttcatgaaagagggctgtattacggaaagaggcacccatgaggaactgatgaatttaaatggtgactatgctaccatttttaataacctgttgctgggagagacaccgccagttgagatcaattcaaaaaaggaaaccagtggttcacagaagaagtcacaagacaagggtcctaaaacaggatcagtaaagaaggaaaaagcagtaaagccagaggaagggcagcttgtgcagctggaagagaaagggcagggttcagtgccctggtcagtatatggtgtctacatccaggctgctgggggccccttggcattcctggttattatggcccttttcatgctgaatgtaggcagcaccgccttcagcacctggtggttgagttactggatcaagcaaggaagcgggaacaccactgtgactcgagggaacgagacctcggtgagtgacagcatgaaggacaatcctcatatgcagtactatgccagcatctacgccctctccatggcagtcatgctgatcctgaaagccattcgaggagttgtctttgtcaagggcacgctgcgagcttcctcccggctgcatgacgagcttttccgaaggatccttcgaagccctatgaagttttttgacacgacccccacagggaggattctcaacaggttttccaaagacatggatgaagttgacgtgcggctgccgttccaggccgagatgttcatccagaacgttatcctggtgttcttctgtgtgggaatgatcgcaggagtcttcccgtggttccttgtggcagtggggccccttgtcatcctcttttcagtcctgcacattgtctccagggtcctgattcgggagctgaagcgtctggacaatatcacgcagtcacctttcctctcccacatcacgtccagcatacagggccttgccaccatccacgcctacaataaagggcaggagtttctgcacagataccaggagctgctggatgacaaccaagctcctttttttttgtttacgtgtgcgatgcggtggctggctgtgcggctggacctcatcagcatcgccctcatcaccaccacggggctgatgatcgttcttatgcacgggcagattcccccagcctatgcgggtctcgccatctcttatgctgtccagttaacggggctgttccagtttacggtcagactggcatctgagacagaagctcgattcacctcggtggagaggatcaatcactacattaagactctgtccttggaagcacctgccagaattaagaacaaggctccctcccctgactggccccaggagggagaggtgacctttgagaacgcagagatgaggtaccgagaaaacctccctctcgtcctaaagaaagtatccttcacgatcaaacctaaagagaagattggcattgtggggcggacaggatcagggaagtcctcgctggggatggccctcttccgtctggtggagttatctggaggctgcatcaagattgatggagtgagaatcagtgatattggccttgccgacctccgaagcaaactctctatcattcctcaagagccggtgctgttcagtggcactgtcagatcaaatttggaccccttcaaccagtacactgaagaccagatttgggatgccctggagaggacacacatgaaagaatgtattgctcagctacctctgaaacttgaatctgaagtgatggagaatggggataacttctcagtgggggaacggcagctcttgtgcatagctagagccctgctccgccactgtaagattctgattttagatgaagccacagctgccatggacacagagacagacttattgattcaagagaccatccgagaagcatttgcagactgtaccatgctgaccattgcccatcgcctgcacacggttctaggctccgataggattatggtgctggcccagggacaggtggtggagtttgacaccccatcggtccttctgtccaacgacagttcccgattctatgccatgtttgctgctgcagagaacaaggtcgctgtcaagggctgactcctccctgttgacgaagtctcttttctttagagcattgccattccctgcctggggcgggcccctcatcgcgtcctcctaccgaaaccttgcctttctcgattttatctttcgcacagcagttccggattggcttgtgtgtttcacttttagggagagtcatattttgattattgtatttattccatattcatgtaaacaaaatttagtttttgttcttaattgcactctaaaaggttcagggaaccgttattataattgtatcagaggcctataatgaagctttatacgtgtagctatatctatatataattctgtacatagcctatatttacagtgaaaatgtaagctgtttattttatattaaaataagcactgtgctaataacagtgcatattcctttctatcatttttgtacagtttgctgtactagagatctggttttgctattagactgtaggaagagtagcatttcattcttctctagctggtggtttcacggtgccaggttttctgggtgtccaaaggaagacgtgtggcaatagtgggccctccgacagccccctctgccgcctccccacggccgctccaggggtggctggagacgggtgggcggctggagaccatgcagagcgccgtgagttctcagggctcctgccttctgtcctggtgtcacttactgtttctgtcaggagagcagcggggcgaagcccaggccccttttcactccctccatcaagaatggggatcacagagacattcctccgagccggggagtttctttcctgccttcttctttttgctgttgtttctaaacaagaatcagtctatccacagagagtcccactgcctcaggttcctatggctggccactgcacagagctctccagctccaagacctgttggttccaagccctggagccaactgctgctttttgaggtggcactttttcatttgcctattcccacacctccacagttcagtggcagggctcaggatttcgtgggtctgttttcctttctcaccgcagtcgtcgcacagtctctctctctctctcccctcaaagtctgcaactttaagcagctcttgctaatcagtgtctcacactggcgtagaagtttttgtactgtaaagagacctacctcaggttgctggttgctgtgtggtttggtgtgttcccgcaaaccccctttgtgctgtggggctggtagctcaggtgggcgtggtcactgctgtcatcaattgaatggtcagcgttgcatgtcgtgaccaactagacattctgtcgccttagcatgtttgctgaacaccttgtggaagcaaaaatctgaaaatgtgaataaaattattttggattttgtaaaa

SEQ ID NO: 110188 - DNA, 1923 bp, Homo sapiens
  Payload ID: 1626
  Gene Symbol: ABCC5
  Gene Name: ATP-binding cassette, sub-family C (CFTR/MRP), member 5
  Uniprot ID: O15440
  ENST ID: ENST00000382494
  CDS Start-End: 116-742
ggctcatgctcgggagcgtggttgagcggctggcgcggttgtcctggagcaggggcgcaggaattctgatgtgaaactaacagtctgtgagccctggaacctccactcagagaagatgaaggatatcgacataggaaaagagtatatcatccccagtcctgggtatagaagtgtgagggagagaaccagcacttctgggacgcacagagaccgtgaagattccaagttcaggagaactcgaccgttggaatgccaagatgccttggaaacagcagcccgagccgagggcctctctcttgatgcctccatgcattctcagctcagaatcctggatgaggagcatcccaagggaaagtaccatcatggcttgagtgctctgaagcccatccggactacttccaaacaccagcacccagtggacaatgctgggcttttttcctgtatgactttttcgtggctttcttctctggcccgtgtggcccacaagaagggggagctctcaatggaagacgtgtggtctctgtccaagcacgagtcttctgacgtgaactgcagaagactagagagactgtggcaagaagagctgaatgaagttgggccagacgctgcttccctgcgaagggttgtgtggatcttctgccgcaccaggctcatcctgtccatcgtgtgcctgatgatcacgcagctggctggcttcagtggaccaaattttcaggatggctgtattctgcggtcagaatgagagagtcaagctgggcagaatctctcgccaagagttcagccttcctttggagactgctccatcagtgccgaggtgtgtgggaacaggcttcactgcaccgccatcttactgagttgcttcacgtgaggaaaagggggctttggccctgtgactcagttccacattttggattgcatactggaaaagaagccaatcttcttgctagtaaaccagcaacccggctgtatacagtggtgacccaagcaatggatataaacctaaaaatctgagggaggggagaggtggaatacagtagttcttggaatctgaagtctcctatttgatcaggttatttcctgggacttggcaaaaatctgattggtggggatctcctaggacctagtggacatctggtattaatttaatctcaggaaaaacaagaaattaacccagagagagtctgggttttggaattcagcgtagctacctccagaccgtggtgtctggcctccatttttgtctgtcattcagctctgacttacagctgcagtcacctttgctataaggcacctgggtagaagggtggatgggcttcacatcaatttttttcttcctttagggtgggggattggtttggctttcttttgttgtggttttttgttttatttttgtcaagattgatttttagatgcaaggacttgaaaagacccagaaggatgccaccagtttttccttgaggcctaggattttttattctgtcccgagcagaggtaattcctcacaacttagtgcaccagtagcaccagccattttgagcagagtacctctttggggagcttttcgttttgttttgtttttaattctctttccttagcagcaaggtcttttttcctagagaatctactccgttgcagaatcattgcaacctcaggagccctcactgattgagtgctgtcagcctgatatactactttggactctggaaacagatatgggttctattctctatttctactgtgtgtcgttaaacaaccgtcggagaccagatgacctgttagatggctagtcctgtataactcgactctgtatgtttcaatgtatgttactgcaatgcttcacctgctgtacagtgtttgtgagatgctctttgaagatggtacttttatattttttcattttcaataaaagtacattccttccca

SEQ ID NO: 110189 - DNA, 1848 bp, Homo sapiens
  Payload ID: 1626
  Gene Symbol: ABCC5
  Gene Name: ATP-binding cassette, sub-family C (CFTR/MRP), member 5
  Uniprot ID: O15440
  ENST ID: ENST00000392579
  CDS Start-End: 116-793
ggctcatgctcgggagcgtggttgagcggctggcgcggttgtcctggagcaggggcgcaggaattctgatgtgaaactaacagtctgtgagccctggaacctccactcagagaagatgaaggatatcgacataggaaaagagtatatcatccccagtcctgggtatagaagtgtgagggagagaaccagcacttctgggacgcacagagaccgtgaagattccaagttcaggagaactcgaccgttggaatgccaagatgccttggaaacagcagcccgagccgagggcctctctcttgatgcctccatgcattctcagctcagaatcctggatgaggagcatcccaagggaaagtaccatcatggcttgagtgctctgaagcccatccggactacttccaaacaccagcacccagtggacaatgctgggcttttttcctgtatgactttttcgtggctttcttctctggcccgtgtggcccacaagaagggggagctctcaatggaagacgtgtggtctctgtccaagcacgagtcttctgacgtgaactgcagaagactagagagactgtggcaagaagagctgaatgaagttgggccagacgctgcttccctgcgaagggttgtgtggatcttctgccgcaccaggctcatcctgtccatcgtgtgcctgatgatcacgcagctggctggcttcagtggaccaccttcctttggagactgctccatcagtgccgaggtgtgtgggaacaggcttcactgcaccgccatcttactgagttgcttcacgtgaggaaaagggggctttggccctgtgactcagttccacattttggattgcatactggaaaagaagccaatcttcttgctagtaaaccagcaacccggctgtatacagtggtgacccaagcaatggatataaacctaaaaatctgagggaggggagaggtggaatacagtagttcttggaatctgaagtctcctatttgatcaggttatttcctgggacttggcaaaaatctgattggtggggatctcctaggacctagtggacatctggtattaatttaatctcaggaaaaacaagaaattaacccagagagagtctgggttttggaattcagcgtagctacctccagaccgtggtgtctggcctccatttttgtctgtcattcagctctgacttacagctgcagtcacctttgctataaggcacctgggtagaagggtggatgggcttcacatcaatttttttcttcctttagggtgggggattggtttggctttcttttgttgtggttttttgttttatttttgtcaagattgatttttagatgcaaggacttgaaaagacccagaaggatgccaccagtttttccttgaggcctaggattttttattctgtcccgagcagaggtaattcctcacaacttagtgcaccagtagcaccagccattttgagcagagtacctctttggggagcttttcgttttgttttgtttttaattctctttccttagcagcaaggtcttttttcctagagaatctactccgttgcagaatcattgcaacctcaggagccctcactgattgagtgctgtcagcctgatatactactttggactctggaaacagatatgggttctattctctatttctactgtgtgtcgttaaacaaccgtcggagaccagatgacctgttagatggctagtcctgtataactcgactctgtatgtttcaatgtatgttactgcaatgcttcacctgctgtacagtgtttgtgagatgctctttgaagatggtacttttatattttttcattttcaataaaagtacattccttccca

SEQ ID NO: 110190 - DNA, 883 bp, Homo sapiens
  Payload ID: 1626
  Gene Symbol: ABCC5
  Gene Name: ATP-binding cassette, sub-family C (CFTR/MRP), member 5
  ENST ID: ENST00000446941
  CDS Start-End: 166-327
cttgcgcggtgtggcggccgatgccgctataaaggcttgttttgctgcagggctcatgctcgggagcgtggttgagcggctggcgcggttgtcctggagcaggggcgcaggaattctgatgtgaaactaacagtctgtgagccctggaacctccactcagagaagatgaaggatatcgacataggaaaagagtatatcatccccagtcctgggtatagaagtgtgagggagagaaccagcacttctgggacgcacagagaccgtgaagattccaagttcaggagaactcgaccgagtcagagtctcactctgtcacccagactgtagtgcggtggcatgaccatggctcactgcagcgtcaaacacctgggctcctgtgatcctcctgcctcagcctcctgagtagctaggactacaatctcgtgccaccatgcctggctaacttttaaattttttatagtgatggggttttggagggttacacagactagtctcaaactcctggcctgaggccatcctcccacctcagcctcccaaagtgttgtgatgacaggcataagccactgtacactgcctactttttactttttaaatgtggctactagaaaaatttaaattacattatgtggcttacatttgcagcttgcattatatttctattggacagtgctgaactagagtgttgatctactgtaggttagccattgattttgtattaggcatttagatccctgtaagctgttgggtttaatgattttttcctttggaagattttcctttatgcagtaaaattatggagacacagagtatgtagtattacatattaccagtttgctctcctgaatccctgctggtagcatattaaaaatcagtttaatgttca

SEQ ID NO: 110191 - DNA, 591 bp, Homo sapiens
  Payload ID: 1626
  Gene Symbol: ABCC5
  Gene Name: ATP-binding cassette, sub-family C (CFTR/MRP), member 5
  ENST ID: ENST00000437341
  CDS Start-End: 150-591
cgggtctgagagaaacgcccacctgggaggctgtgcagcgggtggctcggggcaccctgctcaacccgcagcggagccgccagcgaccttcgaagaattctgatgtgaaactaacagtctgtgagccctggaacctccactcagagaagatgaaggatatcgacataggaaaagagtatatcatccccagtcctgggtatagaagtgtgagggagagaaccagcacttctgggacgcacagagaccgtgaagattccaagttcaggagaactcgaccgttggaatgccaagatgccttggaaacagcagcccgagccgagggcctctctcttgatgcctccatgcattctcagctcagaatcctggatgaggagcatcccaagggaaagtaccatcatggcttgagtgctctgaagcccatccggactacttccaaacaccagcacccagtggacaatgctgggcttttttcctgtatgactttttcgtggctttcttctctggcccgtgtggcccacaagaagggggagctctcaatggaagacgtgtggtctctgtccaagcacgagtcttctgacgtgaactgcagaa

SEQ ID NO: 110192 - DNA, 5852 bp, Homo sapiens
  Payload ID: 1626
  Gene Symbol: ABCC5
  Gene Name: ATP-binding cassette, sub-family C (CFTR/MRP), member 5
  ENST ID: ENST00000437205
  CDS Start-End: 63-1484
ggcgcaggaattctgatgtgaaactaacagtctgtgagccctggaacctccactcagagaagatgaaggatatcgacataggaaaagagtatatcatccccagtcctgggtatagaagtgtgagggagagaaccagcacttctgggacgcacagagaccgtgaagattccaagttcaggagaactcgaccgttggaatgccaagatgccttggaaacagcagcccgagccgagggcctctctcttgatgcctccatgcattctcagctcagaatcctggatgaggagcatcccaagggaaagtaccatcatggcttgagtgctctgaagcccatccggactacttccaaacaccagcacccagtggacaatgctgggcttttttcctgtatgactttttcgtggctttcttctctggcccgtgtggcccacaagaagggggagctctcaatggaagacgtgtggtctctgtccaagcacgagtcttctgacgtgaactgcagaagactagagagactgtggcaagaagagctgaatgaagttgggccagacgctgcttccctgcgaagggttgtgtggatcttctgccgcaccaggctcatcctgtccatcgtgtgcctgatgatcacgcagctggctggcttcagtggaccagccttcatggtgaaacacctcttggagtatacccaggcaacagagtctaacctgcagtacagcttgttgttagtgctgggcctcctcctgacggaaatcgtgcggtcttggtcgcttgcactgacttgggcattgaattaccgaaccggtgtccgcttgcggggggccatcctaaccatggcatttaagaagatccttaagttaaagaacattaaagagaaatccctgggtgagctcatcaacatttgctccaacgatgggcagagaatgtttgaggcagcagccgttggcagcctgctggctggaggacccgttgttgccatcttaggcatgatttataatgtaattattctgggaccaacaggcttcctgggatcagctgtttttatcctcttttacccagcaatgatgtttgcatcacggctcacagcatatttcaggagaaaatgcgtggccgccacggatgaacgtgtccagaagatgaatgaagttcttacttacattaaatttatcaaaatgtatgcctgggtcaaagcattttctcagagtgttcaaaaaatccgcgaggaggagcgtcggatattggaaaaagctgggtacttccagagcatcactgtgggtgtggctcccattgtggtggtgattgccagcgtggtgaccttctctgttcatatgaccctgggcttcgatctgacagcagcacaggctttcacagtggtgacagtcttcaattccatgacttttgctttgaaagtaacaccgttttcagtaaagtccctctcagaagcctcagtggctgttgacagatttaagcttccttccactgtatagcctgatgtgttttgctacgtgagtgtacgccctaggcttgtctccctggtcttgatccagtgtctcatctttgcacctctctcacaactcctatcagagtttgtttctaatggaagaggttcacatgataaagaacaaaccagccagtcctcacatcaagatagagatgaaaaatgccaccttggcatgggactcctcccactccagtatccagaactcgcccaagctgacccccaaaatgaaaaaagacaagagggcttccaggggcaagaaagagaaggtgaggcagctgcagcgcactgagcatcaggcggtgctggcagagcagaaaggccacctcctcctggacagtgacgagcggcccagtcccgaagaggaagaaggcaagcacatccacctgggccacctgcgcttacagaggacactgcacagcatcgatctggagatccaagagggtaaactggttggaatctgtggcagtgtgggaagtggaaaaacctctctcatttcagccattttaggccagatgacgcttctagagggcagcattgcaatcagtggaaccttcgcttatgtggcccagcaggcctggatcctcaatgctactctgagagacaacatcctgtttgggaaggaatatgatgaagaaagatacaactctgtgctgaacagctgctgcctgaggcctgacctggccattcttcccagcagcgacctgacggagattggagagcgaggagccaacctgagcggtgggcagcgccagaggatcagccttgcccgggccttgtatagtgacaggagcatctacatcctggacgaccccctcagtgccttagatgcccatgtgggcaaccacatcttcaatagtgctatccggaaacatctcaagtccaagacagttctgtttgttacccaccagttacagtacctggttgactgtgatgaagtgatcttcatgaaagagggctgtattacggaaagaggcacccatgaggaactgatgaatttaaatggtgactatgctaccatttttaataacctgttgctgggagagacaccgccagttgagatcaattcaaaaaaggaaaccagtggttcacagaagaagtcacaagacaagggtcctaaaacaggatcagtaaagaaggaaaaagcagtaaagccagaggaagggcagcttgtgcagctggaagagaaagggcagggttcagtgccctggtcagtatatggtgtctacatccaggctgctgggggccccttggcattcctggttattatggcccttttcatgctgaatgtaggcagcaccgccttcagcacctggtggttgagttactggatcaagcaaggaagcgggaacaccactgtgactcgagggaacgagacctcggtgagtgacagcatgaaggacaatcctcatatgcagtactatgccagcatctacgccctctccatggcagtcatgctgatcctgaaagccattcgaggagttgtctttgtcaagggcacgctgcgagcttcctcccggctgcatgacgagcttttccgaaggatccttcgaagccctatgaagttttttgacacgacccccacagggaggattctcaacaggttttccaaagacatggatgaagttgacgtgcggctgccgttccaggccgagatgttcatccagaacgttatcctggtgttcttctgtgtgggaatgatcgcaggagtcttcccgtggttccttgtggcagtggggccccttgtcatcctcttttcagtcctgcacattgtctccagggtcctgattcgggagctgaagcgtctggacaatatcacgcagtcacctttcctctcccacatcacgtccagcatacagggccttgccaccatccacgcctacaataaagggcaggagtttctgcacagataccaggagctgctggatgacaaccaagctcctttttttttgtttacgtgtgcgatgcggtggctggctgtgcggctggacctcatcagcatcgccctcatcaccaccacggggctgatgatcgttcttatgcacgggcagattcccccagcctatgcgggtctcgccatctcttatgctgtccagttaacggggctgttccagtttacggtcagactggcatctgagacagaagctcgattcacctcggtggagaggatcaatcactacattaagactctgtccttggaagcacctgccagaattaagaacaaggctccctcccctgactggccccaggagggagaggtgacctttgagaacgcagagatgaggtaccgagaaaacctccctctcgtcctaaagaaagtatccttcacgatcaaacctaaagagaagattggcattgtggggcggacaggatcagggaagtcctcgctggggatggccctcttccgtctggtggagttatctggaggctgcatcaagattgatggagtgagaatcagtgatattggccttgccgacctccgaagcaaactctctatcattcctcaagagccggtgctgttcagtggcactgtcagatcaaatttggaccccttcaaccagtacactgaagaccagatttgggatgccctggagaggacacacatgaaagaatgtattgctcagctacctctgaaacttgaatctgaagtgatggagaatggggataacttctcagtgggggaacggcagctcttgtgcatagctagagccctgctccgccactgtaagattctgattttagatgaagccacagctgccatggacacagagacagacttattgattcaagagaccatccgagaagcatttgcagactgtaccatgctgaccattgcccatcgcctgcacacggttctaggctccgataggattatggtgctggcccagggacaggtggtggagtttgacaccccatcggtccttctgtccaacgacagttcccgattctatgccatgtttgctgctgcagagaacaaggtcgctgtcaagggctgactcctccctgttgacgaagtctcttttctttagagcattgccattccctgcctggggcgggcccctcatcgcgtcctcctaccgaaaccttgcctttctcgattttatctttcgcacagcagttccggattggcttgtgtgtttcacttttagggagagtcatattttgattattgtatttattccatattcatgtaaacaaaatttagtttttgttcttaattgcactctaaaaggttcagggaaccgttattataattgtatcagaggcctataatgaagctttatacgtgtagctatatctatatataattctgtacatagcctatatttacagtgaaaatgtaagctgtttattttatattaaaataagcactgtgctaataacagtgcatattcctttctatcatttttgtacagtttgctgtactagagatctggttttgctattagactgtaggaagagtagcatttcattcttctctagctggtggtttcacggtgccaggttttctgggtgtccaaaggaagacgtgtggcaatagtgggccctccgacagccccctctgccgcctccccacggccgctccaggggtggctggagacgggtgggcggctggagaccatgcagagcgccgtgagttctcagggctcctgccttctgtcctggtgtcacttactgtttctgtcaggagagcagcggggcgaagcccaggccccttttcactccctccatcaagaatggggatcacagagacattcctccgagccggggagtttctttcctgccttcttctttttgctgttgtttctaaacaagaatcagtctatccacagagagtcccactgcctcaggttcctatggctggccactgcacagagctctccagctccaagacctgttggttccaagccctggagccaactgctgctttttgaggtggcactttttcatttgcctattcccacacctccacagttcagtggcagggctcaggatttcgtgggtctgttttcctttctcaccgcagtcgtcgcacagtctctctctctctctcccctcaaagtctgcaactttaagcagctcttgctaatcagtgtctcacactggcgtagaagtttttgtactgtaaagagacctacctcaggttgctggttgctgtgtggtttggtgtgttcccgcaaaccccctttgtgctgtggggctggtagctcaggtgggcgtggtcactgctgtcatcaattgaatggtcagcgttgcatgtcgtgaccaactagacattctgtcgccttagcatgtttgctgaacaccttgtggaagcaaaaatctgaaaatgtgaataaaattattttggattttg

SEQ ID NO: 110193 - DNA, 550 bp, Homo sapiens
  Payload ID: 1626
  Gene Symbol: ABCC5
  Gene Name: ATP-binding cassette, sub-family C (CFTR/MRP), member 5
  ENST ID: ENST00000443497
  CDS Start-End: 1-212
ccttcacgatcaaacctaaagagaagattggcattgtggggcggacaggatcagaacactggggcacacagccaagtacgaaagaggagcagcacccacaactctgctacccagagagaagcactggtaacattttgggaagtcctcgctggggatggccctcttccgtctggtggagttatctggaggctgcatcaagattgatggagtgagaatcagtgatattggccttgccgacctccgaagcaaactctctatcattcctcaagagccggtgctgttcagtggcactgtcagatcaaatttggaccccttcaaccagtacactgaagaccagatttgggatgccctggagaggacacacatgaaagaatgtattgctcagctacctctgaaacttgaatctgaagtgatggagaatggggataacttctcagtgggggaacggcagctcttgtgcatagctagagccctgctccgccactgtaagattctgattttagatgaagccacagctgccatggacacagagacagacttattgattcaa

SEQ ID NO: 110194 - DNA, 4697 bp, Homo sapiens
  Payload ID: 1626
  Gene Symbol: ABCC5
  Gene Name: ATP-binding cassette, sub-family C (CFTR/MRP), member 5
  ENST ID: ENST00000427120
  CDS Start-End: 90-785
cggctggcgcggttgtcctggagcaggggcgcaggaattctgatgtgaaactaacagtctgtgagccctggaacctccactcagagaagatgaaggatatcgacataggaaaagagtatatcatccccagtcctgggtatagaagtgtgagggagagaaccagcacttctgggacgcacagagaccgtgaagattccaagttcaggagaactcgaccgttggaatgccaagatgccttggaaacagcagcccgagccgagggcctctctcttgatgcctccatgcattctcagctcagaatcctggatgaggagcatcccaagggaaagtaccatcatggcttgagtgctctgaagcccatccggactacttccaaacaccagcacccagtggacaatgctgggcttttttcctgtatgactttttcgtggctttcttctctggcccgtgtggcccacaagaagggggagctctcaatggaagacgtgtggtctctgtccaagcacgagtcttctgacgtgaactgcagaagactagagagactgtggcaagaagagctgaatgaagttgggccagacgctgcttccctgcgaagggttgtgtggatcttctgccgcaccaggctcatcctgtccatcgtgtgcctgatgatcacgcagctggctggcttcagtggaccagtaagttctaaccatcctttccgacagtctccaggggcccggccacggccagctctaacactcttattctgttgcagaggttgtgctcagctttgggctaggtagcagtcttagagatgccttcaggtctgttgaaaggggtcgatggattttggcaacagctggaaggatgaaagggcagtgttgccagagaagaaatggaactggcttgatttctgggtgggggtgaaatggaactgactccagttctgcacaggactgtgcttctcggttgtgtgttaacatgaactgacagtcggtgcaggcagatgtgtcttgcagtgctatgagtgggtgagagcacgttgtgtggcccgggctggtgagccagcaccgggaacataccaagtgcctggaggcagttatcacatgtttggcaggtctgtggcaaataagccctgagaaaactagaggactgtcgaggattttagagtctgacctggagtccgtttaagtttggcttatagtgtgactgtgtggcaagtgttggggtggcagccgtggttttccccagtctgtactgatgcagagtagacaagagagcctttgacgttcactctgtttcctgggcacctgtttcttacacctgctgtgctgccttacacttgagaccttgattaaatctattctctacacatttgccttgaggcatcggagcagtagtactgcttgtactgtgcgttttccatatgtgggtaagctggaggttcatggttttggtaagtatgtgcctaagatgcatggcaattaggtaaaactaatttgcagttttgtttttgtttttatttttttaacgtttgatgcctcttgttaaagttttgatctcttttctgaagcagagaacactacttttctggtattgggtttctatattattaataattgaccaactaacatactttatataaaagttttaagtaagaaggaccatgtaactgaaatgttgtgttatgtaatttaccaaaatggcaaacattttcatagagccagcttcccccaagaagagcttctgtcattgtttcactacagggctggtggctgctctgatctcatagaattcattcctctgggtagcaccatatgcaggctttgcgaataaagtgatcatgggctttcttgattccatttggccaatgcaagaacttcattggctcccctctaaaaaaaattccatggattgctgggatttttattttttattttttgaaaaaaatggtacctatccgtattcagcttggtggcttcacagtccctcccctgaacatccgtatattccttattctctcatttatggtgcagaacactggggtactaacctctaggaaactgttctagctgccagggaaagctaagagccctcctttaacaggaaagcagcagcatgctttttcttctctctgccgtttcagggaagagcaccttaaggccagtgttatttcatgggattctgccctagagctgagaaagtaatggactcatccataatctcttttatagatttgaaagtgtaaacaatacacacttccttttttggaactccaattctaatatgtttctttttcattggaaattgaaaaaccaggctggttttgagattagtactagcagtgagtaaacctcctgtctgtggacttaaatccttttgaggaacatttcgttttagatttttacaagttttctaatctggcacgactttcaaactagcttaatctgttcttacagaaacctgtgtaaggacagactgcccacatacgggctccccaaataaaatggcatttttatttcttgtccctgctcgggtttcaccgaaccttggtagccataatcagaacaaatgaaacacagtcaagttgttgtgttctgtttgtttttacctgccagccagctgatgctgacatttatacaccaagatgatccaaggttttggtgacgccggtggggactgccgctatatgtgcagggtgcccgggggtcatagtaatgttaatggagtaccagaatctctaacagtgtggtcctgtgtagccacattgctacacttacagagatgctttggggcctttttggattaagacagttctaaaagaccaggcctcacctatgatctgtgtataaagaattagcatcgcactgtagatctgcaagagaaggccgcctcctgcagtgctctctcttggtgaatgctaactctgctcgagggccttttggggaaaggacagtgtaaaacccttagagaggtaagtttcccacccttccaacctctctccacctgcagcttgcttggtgctgtcaggatctggatttggggggagtctctctgtagtggaaccagtgacagaagctgttctttagaattttcaggatggctgtattctgcggtcagaatgagagagtcaagctgggcagaatctctcgccaagagttcaggtaaggtaatgtttattcactgggaatgctttccacagccagacagctatgctaacagtctcaagttttcttccagtttgtttagatttaaatgatacatttgtaactttttaaaaactaaattttggttggatttttcatgaaaacctcttttttctttatcccctaaaaaatggtttgaaatgtcattgttatttaaaaacccgatgtgttggaacttctttaatctgctgtttcctctttttccccccctttgaaagtttcgcatagtgtaaacattcactatgtcttttaccttccctgctcctcccatctgggaggcgctgatgctattacccagtgctgaaaaatggcactctaaaggtatgggaaggaaggagcccaaggcaaccacctgctgtcctttcagccttcctttggagactgctccatcagtgccgaggtgtgtgggaacaggcttcactgcaccgccatcttactgagttgcttcacgtgaggaaaagggggctttggccctgtgactcagttccacattttggattgcatactggaaaagaagccaatcttcttgctagtaaaccagcaacccggctgtatacagtggtgacccaagcaatggatataaacctaaaaatctgagggaggggagaggtggaatacagtagttcttggaatctgaagtctcctatttgatcaggttatttcctgggacttggcaaaaatctgattggtggggatctcctaggacctagtggacatctggtattaatttaatctcaggaaaaacaagaaattaacccagagagagtctgggttttggaattcagcgtagctacctccagaccgtggtgtctggcctccatttttgtctgtcattcagctctgacttacagctgcagtcacctttgctataaggcacctgggtagaagggtggatgggcttcacatcaatttttttcttcctttagggtgggggattggtttggctttcttttgttgtggttttttgttttatttttgtcaagattgatttttagatgcaaggacttgaaaagacccagaaggatgccaccagtttttccttgaggcctaggattttttattctgtcccgagcagaggtaattcctcacaacttagtgcaccagtagcaccagccattttgagcagagtacctctttggggagcttttcgttttgttttgtttttaattctctttccttagcagcaaggtcttttttcctagagaatctactccgttgcagaatcattgcaacctcaggagccctcactgattgagtgctgtcagcctgatatactactttggactctggaaacagatatgggttctattctctatttctactgtgtgtcgttaaacaaccgtcggagaccagatgacctgttagatggctagtcctgtataactcgactctgtatgtttcaatgtatgttactgcaatgcttcacctgctgtacagtgtttgtgagatgctctttgaagatggtacttttatattttttcattttcaataaaagtacattccttccca

SEQ ID NO: 110195 - DNA, 821 bp, Homo sapiens
  Payload ID: 1626
  Gene Symbol: ABCC5
  Gene Name: ATP-binding cassette, sub-family C (CFTR/MRP), member 5
  ENST ID: ENST00000438979
  CDS Start-End: 143-304
ccgctataaaggcttgttttgctgcagggctcatgctcgggagcgtggttgagcggctggcgcggttgtcctggagcaggggcgcaggaattctgatgtgaaactaacagtctgtgagccctggaacctccactcagagaagatgaaggatatcgacataggaaaagagtatatcatccccagtcctgggtatagaagtgtgagggagagaaccagcacttctgggacgcacagagaccgtgaagattccaagttcaggagaactcgaccgaggcactctcactgttggccaggctgttgttgaactcccagcttcaagcaagcctcccgcctcagcctcccaaagtgctgggattacagttggaatgccaagatgccttggaaacagcagcccgagccgagggcctctctcttgatgcctccatgcattctcagctcagaatcctggatgaggagcatcccaagggaaagtaccatcatggcttgagtgctctgaagcccatccggactacttccaaacaccagcacccagtggacaatgctgggcttttttcctgtatgactttttcgtggctttcttctctggcccgtgtggcccacaagaagggggagctctcaatggaagacgtgtggtctctgtccaagcacgagtcttctgacgtgaactgcagaagactagagagactgtggcaagaagagctgaatgaagttgggccagacgctgcttccctgcgaagggttgtgtggatcttctgccgcaccaggctcatcctgtccatcgtgtgcctgatgatcacgcagctggctggcttcagtggacc

SEQ ID NO: 110196 - DNA, 2000 bp, Homo sapiens
  Payload ID: 1626
  Gene Symbol: ABCC5
  Gene Name: ATP-binding cassette, sub-family C (CFTR/MRP), member 5
  Uniprot ID: O15440
  ENST ID: ENST00000443376
  CDS Start-End: 116-754
ggctcatgctcgggagcgtggttgagcggctggcgcggttgtcctggagcaggggcgcaggaattctgatgtgaaactaacagtctgtgagccctggaacctccactcagagaagatgaaggatatcgacataggaaaagagtatatcatccccagtcctgggtatagaagtgtgagggagagaaccagcacttctgggacgcacagagaccgtgaagattccaagttcaggagaactcgaccgttggaatgccaagatgccttggaaacagcagcccgagccgagggcctctctcttgatgcctccatgcattctcagctcagaatcctggatgaggagcatcccaagggaaagtaccatcatggcttgagtgctctgaagcccatccggactacttccaaacaccagcacccagtggacaatgctgggcttttttcctgtatgactttttcgtggctttcttctctggcccgtgtggcccacaagaagggggagctctcaatggaagacgtgtggtctctgtccaagcacgagtcttctgacgtgaactgcagaagactagagagactgtggcaagaagagctgaatgaagttgggccagacgctgcttccctgcgaagggttgtgtggatcttctgccgcaccaggctcatcctgtccatcgtgtgcctgatgatcacgcagctggctggcttcagtggaccacttgcttggtgctgtcaggatctggatttggggggagtctctctgtagtggaaccagtgacagaagctgttctttagaattttcaggatggctgtattctgcggtcagaatgagagagtcaagctgggcagaatctctcgccaagagttcagccttcctttggagactgctccatcagtgccgaggtgtgtgggaacaggcttcactgcaccgccatcttactgagttgcttcacgtgaggaaaagggggctttggccctgtgactcagttccacattttggattgcatactggaaaagaagccaatcttcttgctagtaaaccagcaacccggctgtatacagtggtgacccaagcaatggatataaacctaaaaatctgagggaggggagaggtggaatacagtagttcttggaatctgaagtctcctatttgatcaggttatttcctgggacttggcaaaaatctgattggtggggatctcctaggacctagtggacatctggtattaatttaatctcaggaaaaacaagaaattaacccagagagagtctgggttttggaattcagcgtagctacctccagaccgtggtgtctggcctccatttttgtctgtcattcagctctgacttacagctgcagtcacctttgctataaggcacctgggtagaagggtggatgggcttcacatcaatttttttcttcctttagggtgggggattggtttggctttcttttgttgtggttttttgttttatttttgtcaagattgatttttagatgcaaggacttgaaaagacccagaaggatgccaccagtttttccttgaggcctaggattttttattctgtcccgagcagaggtaattcctcacaacttagtgcaccagtagcaccagccattttgagcagagtacctctttggggagcttttcgttttgttttgtttttaattctctttccttagcagcaaggtcttttttcctagagaatctactccgttgcagaatcattgcaacctcaggagccctcactgattgagtgctgtcagcctgatatactactttggactctggaaacagatatgggttctattctctatttctactgtgtgtcgttaaacaaccgtcggagaccagatgacctgttagatggctagtcctgtataactcgactctgtatgtttcaatgtatgttactgcaatgcttcacctgctgtacagtgtttgtgagatgctctttgaagatggtacttttatattttttcattttcaataaaagtacattccttccca

SEQ ID NO: 110197 - DNA, 5747 bp, Homo sapiens
  Payload ID: 1627
  Gene Symbol: ABCC6
  Gene Name: ATP-binding cassette, sub-family C (CFTR/MRP), member 6
  Uniprot ID: O95255
  ENST ID: ENST00000205557
  CDS Start-End: 31-4542
cgctgggacccacgacgacagaaggcgccgatggccgcgcctgctgagccctgcgcggggcagggggtctggaaccagacagagcctgaacctgccgccaccagcctgctgagcctgtgcttcctgagaacagcaggggtctgggtaccccccatgtacctctgggtccttggtcccatctacctcctcttcatccaccaccatggccggggctacctccggatgtccccactcttcaaagccaagatggtgcttggattcgccctcatagtcctgtgtacctccagcgtggctgtcgctctttggaaaatccaacagggaacgcctgaggccccagaattcctcattcatcctactgtgtggctcaccacgatgagcttcgcagtgttcctgattcacaccgagaggaaaaagggagtccagtcatctggagtgctgtttggttactggcttctctgctttgtcttgccagctaccaacgctgcccagcaggcctccggagcgggcttccagagcgaccctgtccgccacctgtccacctacctatgcctgtctctggtggtggcacagtttgtgctgtcctgcctggcggatcaaccccccttcttccctgaagacccccagcagtctaacccctgtccagagactggggcagccttcccctccaaagccacgttctggtgggtttctggcctggtctggaggggatacaggaggccactgagaccaaaagacctctggtcgcttgggagagaaaactcctcagaagaacttgtttcccggcttgaaaaggagtggatgaggaaccgcagtgcagcccggaggcacaacaaggcaatagcatttaaaaggaaaggcggcagtggcatgaaggctccagagaccgagcccttcctacggcaagaagggagccagtggcgcccactgctgaaggccatctggcaggtgttccattctaccttcctcctggggaccctcagcctcatcatcagtgatgtcttcaggttcactgtccccaagctgctcagccttttcctggagtttattggtgatcccaagcctccagcctggaagggctacctcctcgccgtgctgatgttcctctcagcctgcctgcaaacgctgtttgagcagcagaacatgtacaggctcaaggtgctgcagatgaggttgcggtcggccatcactggcctggtgtacagaaaggtcctggctctgtccagcggctccagaaaggccagtgcggtgggtgatgtggtcaatctggtgtccgtggacgtgcagcggctgaccgagagcgtcctctacctcaacgggctgtggctgcctctcgtctggatcgtggtctgcttcgtctatctctggcagctcctggggccctccgccctcactgccatcgctgtcttcctgagcctcctccctctgaatttcttcatctccaagaaaaggaaccaccatcaggaggagcaaatgaggcagaaggactcacgggcacggctcaccagctctatcctcaggaactcgaagaccatcaagttccatggctgggagggagcctttctggacagagtcctgggcatccgaggccaggagctgggcgccttgcggacctccggcctcctcttctctgtgtcgctggtgtccttccaagtgtctacatttctggtcgcactggtggtgtttgctgtccacactctggtggccgagaatgctatgaatgcagagaaagcctttgtgactctcacagttctcaacatcctcaacaaggcccaggctttcctgcccttctccatccactccctcgtccaggcccgggtgtcctttgaccgtctggtcaccttcctctgcctggaagaagttgaccctggtgtcgtagactcaagttcctctggaagcgctgccgggaaggattgcatcaccatacacagtgccaccttcgcctggtcccaggaaagccctccctgcctccacagaataaacctcacggtgccccagggctgtctgctggctgttgtcggtccagtgggggcagggaagtcctccctgctgtccgccctccttggggagctgtcaaaggtggaggggttcgtgagcatcgagggtgctgtggcctacgtgccccaggaggcctgggtgcagaacacctctgtggtagagaatgtgtgcttcgggcaggagctggacccaccctggctggagagagtactagaagcctgtgccctgcagccagatgtggacagcttccctgagggaatccacacttcaattggggagcagggcatgaatctctccggaggccagaagcagcggctgagcctggcccgggctgtatacagaaaggcagctgtgtacctgctggatgaccccctggcggccctggatgcccacgttggccagcatgtcttcaaccaggtcattgggcctggtggactactccagggaacaacacggattctcgtgacgcacgcactccacatcctgccccaggctgattggatcatagtgctggcaaatggggccatcgcagagatgggttcctaccaggagcttctgcagaggaagggggccctcatgtgtcttctggatcaagccagacagccaggagatagaggagaaggagaaacagaacctgggaccagcaccaaggaccccagaggcacctctgcaggcaggaggcccgagcttagacgcgagaggtccatcaagtcagtccctgagaaggaccgtaccacttcagaagcccagacagaggttcctctggatgaccctgacagggcaggatggccagcaggaaaggacagcatccaatacggcagggtgaaggccacagtgcacctggcctacctgcgtgccgtgggcacccccctctgcctctacgcactcttcctcttcctctgccagcaagtggcctccttctgccggggctactggctgagcctgtgggcggacgaccctgcagtaggtgggcagcagacgcaggcagccctgcgtggcgggatcttcgggctcctcggctgtctccaagccattgggctgtttgcctccatggctgcggtgctcctaggtggggcccgggcatccaggttgctcttccagaggctcctgtgggatgtggtgcgatctcccatcagcttctttgagcggacacccattggtcacctgctaaaccgcttctccaaggagacagacacggttgacgtggacattccagacaaactccggtccctgctgatgtacgcctttggactcctggaggtcagcctggtggtggcagtggctaccccactggccactgtggccatcctgccactgtttctcctctacgctgggtttcagagcctgtatgtggttagctcatgccagctgagacgcttggagtcagccagctactcgtctgtctgctcccacatggctgagacgttccagggcagcacagtggtccgggcattccgaacccaggccccctttgtggctcagaacaatgctcgcgtagatgaaagccagaggatcagtttcccgcgactggtggctgacaggtggcttgcggccaatgtggagctcctggggaatggcctggtgtttgcagctgccacgtgtgctgtgctgagcaaagcccacctcagtgctggcctcgtgggcttctctgtctctgctgccctccaggtgacccagacactgcagtgggttgttcgcaactggacagacctagagaacagcatcgtgtcagtggagcggatgcaggactatgcctggacgcccaaggaggctccctggaggctgcccacatgtgcagctcagcccccctggcctcagggcgggcagatcgagttccgggactttgggctaagataccgacctgagctcccgctggctgtgcagggcgtgtccttcaagatccacgcaggagagaaggtgggcatcgttggcaggaccggggcagggaagtcctccctggccagtgggctgctgcggctccaggaggcagctgagggtgggatctggatcgacggggtccccattgcccacgtggggctgcacacactgcgctccaggatcagcatcatcccccaggaccccatcctgttccctggctctctgcggatgaacctcgacctgctgcaggagcactcggacgaggctatctgggcagccctggagacggtgcagctcaaagccttggtggccagcctgcccggccagctgcagtacaagtgtgctgaccgaggcgaggacctgagcgtgggccagaaacagctcctgtgtctggcacgtgcccttctccggaagacccagatcctcatcctggacgaggctactgctgccgtggaccctggcacggagctgcagatgcaggccatgctcgggagctggtttgcacagtgcactgtgctgctcattgcccaccgcctgcgctccgtgatggactgtgcccgggttctggtcatggacaaggggcaggtggcagagagcggcagcccggcccagctgctggcccagaagggcctgttttacagactggcccaggagtcaggcctggtctgagccaggaccctcaaccgtaccccagttggaccagcccgcacagcctgcagtgctggagatggaagtgacccgtggtcatcgatagctccacacgatattgagtctagacctgtgtttgctctctgggaggaaaatggcagagaaagtggccaattatcacagagcatcagagccggaaggacctagcaatacacaggtctgcccgggcagggcccatctcgccctgtccaccctgcagccaatgtcaacagcgactctcagccccgctgtactctggactcacctgggggcctcaagcacatgcccaggctcccggctagacccttaaatcagaatctctgaggctgggaactgccatgctgtgtgtactttttacaaattaacacttttattttgggataatcccagactcacatgcagttaaagaaacaataatatagagagattcgtgtacttggtaccccatttcacccaatggtaacatcttgcaaaactctaggataaagcatcacagccagggtgttgacattgacacaacaatcttgctcgatttcccgttttacctgtactcctgtgtgtgtgtgtgtttattttgtcccatgcagttttatcacacatgtaggctcatgaatccacaccagggtgaggatacggaatagccaccaccattttccgaccacacccatcactctcgctcctgcccccagtgaccatgctctgttctccagttgtgtgtgtgtgtgtgtgtgtgtgtgtgtgtattttttttttttttttttttgagacagagtctcactctgttgctcaggctggagtgcagtggctcaatctcagctcactgcaacctccacatcctgggttcaagcaattctcctgcctcagcctcccgtgcagctgagattacaggcgtgcgccaccatgcctggctaacttgtgtaatttttattagatacgaggtttcagcatattggccaggctggtcttgaactcctggcctcatgtgatccaccctcctcggcctcccaaagtgttgggataacaggcgtgagctaccgcacctggccgagtttggtgtataattttaaagctcccccataggattccaatgtgcggccaggactgagaactacagccctcgcatctcctgctgctcctcctcccccaccagagatgagctccaaggacacaaaaaccaggtgcccccc

SEQ ID NO: 110198 - DNA, 4137 bp, Homo sapiens
  Payload ID: 1627
  Gene Symbol: ABCC6
  Gene Name: ATP-binding cassette, sub-family C (CFTR/MRP), member 6
  Uniprot ID: O95255
  ENST ID: ENST00000456970
  CDS Start-End: 1-2616
atggccgcgcctgctgagccctgcgcggggcagggggtctggaaccagacagagcctgaacctgccgccaccagcctgctgagcctgtgcttcctgagaacagcaggggtctgggtaccccccatgtacctctgggtccttggtcccatctacctcctcttcatccaccaccatggccggggctacctccggatgtccccactcttcaaagccaagatggtgcttggattcgccctcatagtcctgtgtacctccagcgtggctgtcgctctttggaaaatccaacagggaacgcctgaggccccagaattcctcattcatcctactgtgtggctcaccacgatgagcttcgcagtgttcctgattcacaccgagaggaaaaagggagtccagtcatctggagtgctgtttggttactggcttctctgctttgtcttgccagctaccaacgctgcccagcaggcctccggagcgggcttccagagcgaccctgtccgccacctgtccacctacctatgcctgtctctggtggtggcacagtttgtgctgtcctgcctggcggatcaaccccccttcttccctgaagacccccagcagtctaacccctgtccagagactggggcagccttcccctccaaagccacgttctggtgggtttctggcctggtctggaggggatacaggaggccactgagaccaaaagacctctggtcgcttgggagagaaaactcctcagaagaacttgtttcccggcttgaaaaggagtggatgaggaaccgcagtgcagcccggaggcacaacaaggcaatagcatttaaaaggaaaggcggcagtggcatgaaggctccagagaccgagcccttcctacggcaagaagggagccagtggcgcccactgctgaaggccatctggcaggtgttccattctaccttcctcctggggaccctcagcctcatcatcagtgatgtcttcaggttcactgtccccaagctgctcagccttttcctggagtttattggtgatcccaagcctccagcctggaagggctacctcctcgccgtgctgatgttcctctcagcctgcctgcaaacgctgtttgagcagcagaacatgtacaggctcaaggtgctgcagatgaggttgcggtcggccatcactggcctggtgtacagaaaggtcctggctctgtccagcggctccagaaaggccagtgcggtgggtgatgtggtcaatctggtgtccgtggacgtgcagcggctgaccgagagcgtcctctacctcaacgggctgtggctgcctctcgtctggatcgtggtctgcttcgtctatctctggcagctcctggggccctccgccctcactgccatcgctgtcttcctgagcctcctccctctgaatttcttcatctccaagaaaaggaaccaccatcaggaggagcaaatgaggcagaaggactcacgggcacggctcaccagctctatcctcaggaactcgaagaccatcaagttccatggctgggagggagcctttctggacagagtcctgggcatccgaggccaggagctgggcgccttgcggacctccggcctcctcttctctgtgtcgctggtgtccttccaagtgtctacatttctggtcgcactggtggtgtttgctgtccacactctggtggccgagaatgctatgaatgcagagaaagcctttgtgactctcacagttctcaacatcctcaacaaggcccaggctttcctgcccttctccatccactccctcgtccaggcccgggtgtcctttgaccgtctggtcaccttcctctgcctggaagaagttgaccctggtgtcgtagactcaagttcctctggaagcgctgccgggaaggattgcatcaccatacacagtgccaccttcgcctggtcccaggaaagccctccctgcctccacagaataaacctcacggtgccccagggctgtctgctggctgttgtcggtccagtgggggcagggaagtcctccctgctgtccgccctccttggggagctgtcaaaggtggaggggttcgtgagcatcgagggtgctgtggcctacgtgccccaggaggcctgggtgcagaacacctctgtggtagagaatgtgtgcttcgggcaggagctggacccaccctggctggagagagtactagaagcctgtgccctgcagccagatgtggacagcttccctgagggaatccacacttcaattggggagcagggcatgaatctctccggaggccagaagcagcggctgagcctggcccgggctgtatacagaaaggcagctgtgtacctgctggatgaccccctggcggccctggatgcccacgttggccagcatgtcttcaaccaggtcattgggcctggtggactactccagggaacaaaacagaacctgggaccagcaccaaggaccccagaggcacctctgcaggcaggaggcccgagcttagacgcgagaggtccatcaagtcagtccctgagaaggaccgtaccacttcagaagcccagacagaggttcctctggatgaccctgacagggcaggatggccagcaggaaaggacagcatccaatacggcagggtgaaggccacagtgcacctggcctacctgcgtgccgtgggcacccccctctgcctctacgcactcttcctcttcctctgccagcaagtggcctccttctgccggggctactggctgagcctgtgggcggacgaccctgcagtaggtgggcagcagacgcaggcagccctgcgtggcgggatcttcgggctcctcggctgtctccaagccattgggctgtttgcctccatggctgcggtgctcctaggtggggcccgggcatccaggttgctcttccagaggctcctgtgggatgtggtgcgatctcccatcagcttctttgagcggacacccattggtcacctgctaaaccgcttctccaaggagacagacacggttgacgtggacattccagacaaactccggtccctgctgatgtacgcctttggactcctggaggtcagcctggtggtggcagtggctaccccactggccactgtggccatcctgccactgtttctcctctacgctgggtttcaggtggcttgcggccaatgtggagctcctggggaatggcctggtgtttgcagctgccacgtgtgctgtgctgagcaaagcccacctcagtgctggcctcgtgggcttctctgtctctgctgccctccaggtgacccagacactgcagtgggttgttcgcaactggacagacctagagaacagcatcgtgtcagtggagcggatgcaggactatgcctggacgcccaaggaggctccctggaggctgcccacatgtgcagctcagcccccctggcctcagggcgggcagatcgagttccgggactttgggctaagataccgacctgagctcccgctggctgtgcagggcgtgtccttcaagatccacgcaggagagaaggtgggcatcgttggcaggaccggggcagggaagtcctccctggccagtgggctgctgcggctccaggaggcagctgagggtgggatctggatcgacggggtccccattgcccacgtggggctgcacacactgcgctccaggatcagcatcatcccccaggaccccatcctgttccctggctctctgcggatgaacctcgacctgctgcaggagcactcggacgaggctatctgggcagccctggagacggtgcagctcaaagccttggtggccagcctgcccggccagctgcagtacaagtgtgctgaccgaggcgaggacctgagcgtgggccagaaacagctcctgtgtctggcacgtgcccttctccggaagacccagatcctcatcctggacgaggctactgctgccgtggaccctggcacggagctgcagatgcaggccatgctcgggagctggtttgcacagtgcactgtgctgctcattgcccaccgcctgcgctccgtgatggactgtgcccgggttctggtcatggacaaggggcaggtggcagagagcggcagcccggcccagctgctggcccagaagggcctgttttacagactggcccaggagtcaggcctggtctga

SEQ ID NO: 110199 - DNA, 1381 bp, Homo sapiens
  Payload ID: 1627
  Gene Symbol: ABCC6
  Gene Name: ATP-binding cassette, sub-family C (CFTR/MRP), member 6
  ENST ID: ENST00000577103
  CDS Start-End: 89-337
ctcttctccggcaggatcgcggccgagcagtctgcccagagacttagcgacagacagacgctgggacccacgacgacagaaggcgccgatggccgcgcctgctgagccctgcgcggggcagggggtctggaaccagacagagcctgaacctgccgccaccagcctgctgagcctgtgcttcctgagaacagcaggggtctgggtaccccccatgtacctctgggtccttggtcccatctacctcctcttcatccaccaccatggccggggctacctccggatgtccccactcttcaaagccaagatgagaaaccaaaatatattagagagaccctagagacttactggcccaacagagagttgctccttgatttcatagcagggattgaaaaatgacttggagaaaggatagttttttacctggtgcttggattcgccctcatagtcctgtgtacctccagcgtggctgtcgctctttggaaaatccaacagggaacgcctgaggccccagaattcctcattcatcctactgtgtggctcaccacgatgagcttcgcagtgttcctgattcacaccgagaggaaaaagggagtccagtcatctggagtgctgtttggttactggcttctctgctttgtcttgccagctaccaacgctgcccagcaggcctccggagcgggcttccagagcgaccctgtccgccacctgtccacctacctatgcctgtctctggtggtggcacagtttgtgctgtcctgcctggcggatcaaccccccttcttccctgaagacccccagcagtctaacccctgtccagagactggggcagccttcccctccaaagccacgttctggtgggtttctggcctggtctggaggggatacaggaggccactgagaccaaaagacctctggtcgcttgggagagaaaactcctcagaagaacttgtttcccggcttgaaaaggagtggatgaggaaccgcagtgcagcccggaggcacaacaaggcaatagcatttaaaaggaaaggcggcagtggcatgaaggctccagagaccgagcccttcctacggcaagaagggagccagtggcgcccactgctgaaggccatctggcaggtgttccattctaccttcctcctggggaccctcagcctcatcatcagtgatgtcttcaggttcactgtccccaagctgctcagccttttcctggagtttattggtgatcccaagcctccagcctggaagggctacctcctcgccgtgctgatgttcctctcagcctgcctgcaaacgctgtttgagcagcagaacatgtacaggctcaaggtgctgcagatgaggttgcggtcggccatcactggcctggtgtacagaaagg

SEQ ID NO: 110200 - DNA, 714 bp, Homo sapiens
  Payload ID: 1627
  Gene Symbol: ABCC6
  Gene Name: ATP-binding cassette, sub-family C (CFTR/MRP), member 6
  Uniprot ID: O95255
  ENST ID: ENST00000575728
  CDS Start-End: 34-333
agacgctgggacccacgacgacagaaggcgccgatggccgcgcctgctgagccctgcgcggggcagggggtctggaaccagacagagcctgaacctgccgccaccagcctgctgagcctgtgcttcctgagaacagcaggggtctgggtaccccccatgtacctctgggtccttggtcccatctacctcctcttcatccaccaccatggccggggctacctccggatgtccccactcttcaaagccaagatggtagctgccatccctgggagcctggaaccaggcaatgttcgggggaggcaggggacaggctggaacctggtgaagtcttaaagtagactcctcctatcggggtgtagaagggaatctgttaatcaaacagagcaatattagaaaggctacagaggtcaactcagtggaacacggttctcccaaacagattttgtaattccgaaaatccacgcatgcgcaaacatacgcatacactcccatgttcctggacagtttatagctaccataacctggcattttccaaaacataccatgtagactcttggatacacaaggtaattttagagccacattaggatgaaccttttaaaaagttatgcatttatttttatgttcccccactggctgtattataggacaatttttatatgtgatatgtatttaccttagtgtgttaaataaacactggcattccaagtgtga

SEQ ID NO: 110201 - DNA, 5753 bp, Homo sapiens
  Payload ID: 1627
  Gene Symbol: ABCC6
  Gene Name: ATP-binding cassette, sub-family C (CFTR/MRP), member 6
  ENST ID: ENST00000620078
  CDS Start-End: 31-4542
cgctgggacccacgacgacagaaggcgccgatggccgcgcctgctgagccctgcgcggggcagggggtctggaaccagacagagcctgaacctgccgccaccagcctgctgagcctgtgcttcctgagaacagcaggggtctgggtaccccccatgtacctctgggtccttggtcccatctacctcctcttcatccaccaccatggccggggctacctccggatgtccccactcttcaaagccaagatggtgcttggattcgccctcatagtcctgtgtacctccagcgtggctgtcgctctttggaaaatccaacagggaacgcctgaggccccagaattcctcattcatcctactgtgtggctcaccacgatgagcttcgcagtgttcctgattcacaccgagaggaaaaagggagtccagtcatctggagtgctgtttggttactggcttctctgctttgtcttgccagctaccaacgctgcccagcaggcctccggagcgggcttccagagcgaccctgtccgccacctgtccacctacctatgcctgtctctggtggtggcacagtttgtgctgtcctgcctggcggatcaaccccccttcttccctgaagacccccagcagtctaacccctgtccagagactggggcagccttcccctccaaagccacgttctggtgggtttctggcctggtctggaggggatacaggaggccactgagaccaaaagacctctggtcgcttgggagagaaaactcctcagaagaacttgtttcccggcttgaaaaggagtggatgaggaaccgcagtgcagcccggaggcacaacaaggcaatagcatttaaaaggaaaggcggcagtggcatgaaggctccagagaccgagcccttcctacggcaagaagggagccagtggcgcccactgctgaaggccatctggcaggtgttccattctaccttcctcctggggaccctcagcctcatcatcagtgatgtcttcaggttcactgtccccaagctgctcagccttttcctggagtttattggtgatcccaagcctccagcctggaagggctacctcctcgccgtgctgatgttcctctcagcctgcctgcaaacgctgtttgagcagcagaacatgtacaggctcaaggtgctgcagatgaggttgcggtcggccatcactggcctggtgtacagaaaggtcctggctctgtccagcggctccagaaaggccagtgcggtgggtgatgtggtcaacctggtgtccgtagacgtgcagcggctgaccgagagcgtcctctacctcaacgggctgtggctgcctctcgtctggatcgtggtctgcttcgtctatctctggcagctcctggggccctccgccctcactgccatcgctgtcttcctgagcctcctccctctgaatttcttcatctccaagaaaaggaaccaccatcaggaggagcaaatgaggcagaaggactcacgggcacggctcaccagctctatcctcaggaactcgaagaccatcaagttccatggctgggagggagcctttctggacagagtcctgggcatccgaggccaggagctgggcgccttgcggacctccggcctcctcttctctgtgtcgctggtgtccttccaagtgtctacatttctggtcgcactggtggtgtttgctgtccacactctggtggccgagaatgctatgaatgcagagaaagcctttgtgactctcacagttctcaacatcctcaacaaggcccaggctttcctgcccttctccatccactccctcgtccaggcccgggtgtcctttgaccgtctggtcaccttcctctgcctggaagaagttgaccctggtgccgtagactcaagttcctctggaagcgctgccgggaaggattgcatcacgatacaaagtgccaccttcgcctggtcccaggaaagccctccctgcctccacagaataaacctcacggtgccccagggctgtctgctggctgttgtcggtccagtgggggcagggaagtcctccctgctgtccgccctccttggggagctgtcaaaggtggaggggttcgtgagcatcgagggtgctgtggcctacgtgccccaggaggcctgggtgcagaacacctctgtggtagagaatgtgtgcttcgggcaggagctggacccaccctggctggagagagtactagaagcctgtgccctgcagccagatgtggacagcttccctgagggaatccacacttcaattggggagcagggcatgaatctctccggaggccagaagcagcggctgagcctggcccgggctgtatacagaaaggcagctgtgtacctgctggatgaccccctggcggccctggatgcccacgttggccagcatgtcttcaaccaggtcattgggcctggtgggctactccagggaacaacacggattctcgtgacgcacgcactccacatcctgccccaggctgattggatcatagtgctggcaaatggggccatcgcagagatgggttcctaccaggagcttctgcagaggaagggggccctcgtgtgtcttctggatcaagccagacagccaggagatagaggagaaggagaaacagaacctgggaccagcaccaaggaccccagaggcacctctgcaggcaggaggcccgagcttagacgcgagaggtccatcaagtcagtccctgagaaggaccgtaccacttcagaagcccagacagaggttcctctggatgaccctgacagggcaggatggccagcaggaaaggacagcatccaatacggcagggtgaaggccacagtgcacctggcctacctgcgtgccgtgggcacccccctctgcctctacgcactcttcctcttcctctgccagcaagtggcctccttctgccggggctactggctgagcctgtgggcggacgaccctgcagtaggtgggcagcagacgcaggcagccctgcgtggcgggatcttcgggctcctcggctgtctccaagccattgggctgtttgcctccatggctgcggtgctcctaggtggggcccgggcatccaggttgctcttccagaggctcctgtgggatgtggtgcgatctcccatcagcttctttgagcggacacccattggtcacctgctaaaccgcttctccaaggagacagacacggttgacgtggacattccagacaaactccggtccctgctgatgtacgcctttggactcctggaggtcagcctggtggtggcagtggctaccccactggccactgtggccatcctgccactgtttctcctctacgctgggtttcagagcctgtatgtggttagctcatgccagctgagacgcttggagtcagccagctactcgtctgtctgctcccacatggctgagacgttccagggcagcacagtggtccgggcattccgaacccaggccccctttgtggctcagaacaatgctcgcgtagatgaaagccagaggatcagtttcccgcgactggtggctgacaggtggcttgcggccaatgtggagctcctggggaatggcctggtgtttgcagctgccacgtgtgctgtgctgagcaaagcccacctcagtgctggcctcgtgggcttctctgtctctgctgccctccaggtgacccagacactgcagtgggttgttcgcaactggacagacctagagaacagcatcgtgtcagtggagcggatgcaggactatgcctggacgcccaaggaggctccctggaggctgcccacatgtgcagctcagcccccctggcctcagggcgggcagatcgagttccaggactttgggctaagataccgacctgagctcccgctggctgtgcagggcgtgtccttcaagatccacgcaggagagaaggtgggcatcgttggcaggaccggggcagggaagtcctccctggccagtgggctgctgcggctccaggaggcagctgagggtgggatctggatcgacggggtccccattgcccacgtggggctgcacacactgcgctccaggatcagcatcatcccccaggaccccatcctgttccctggctctctgcggatgaacctcgacctgctgcaggagcactcggacgaggctatctgggcagccctggagacggtgcagctcaaagccttggtggccagcctgcccggccagctgcagtacaagtgtgctgaccgaggcgaggacctgagcgtgggccagaaacagctcctgtgtctggcacgtgcccttctccggaagacccagatcctcatcctggacgaggctactgctgccgtggaccctggcacggagctgcagatgcaggccatgctcgggagctggtttgcacagtgcactgtgctgctcattgcccaccgcctgcgctccgtgatggactgtgcccgggttctggtcatggacaaggggcaggtggcagagagcggcagcccggcccagctgctggcccagaagggcctgttttacagactggcccaggagtcaggcctggtctgagccaggaccctcaaccgtaccccagttggaccagcccgcacagcctgcagtgctggagatggaagtgacccgtggtcatcgatagctccacacgatattgagtctagacctgtgtttgctctctgggaggaaaatggcagagaaagtggccaattatcacagagcatcagagccggaaggacctagcaatacacaggtctgcccgggcagggcccatctcgccctgtccaccctgcagccaatgtcaacagcgactctcagccccgctgtactctggactcacctgggggcctcaagcacatgcccaggctcccggctagacccttaaatcagaatctctgaggctgggaactgccatgctgtgtgtactttttacaaattaacacttttattttgggataatcccagactcacatgcagttaaagaaacaataatatagagagattcgtgtacttggtaccccatttcacccaatggtaacatcttgcaaaactctaggataaagcatcacagccagggtgttgacattgacacaacaatcttgctcgatttcccgttttacctgtactcctgtgtgtgtgtgtgtttattttgtcccatgcagttttatcacacatgtaggctcatgaatccacaccagggtgaggatacggaatagccaccaccattttccgaccacacccatcactctcgctcctgcccccagtgaccatgctctgttctccagttgtgtgtgtgtgtgtgtgtgtgtgtgtgtgtgtgtgtattttttttttttttttttttgagacagagtctcactctgttgctcaggctgaagtgcagtggctcaatctcagctcactgcaacctccacatcctgggttcaagcaattctcctgcctcagcctcccgtgcagctgagattacaggcgtgcgccaccatgcctggctaacttgtgtaatttttattagatacgaggtttcagcatattggccaggctggtcttgaactcctggcctcatgtgatccaccctcctcggcctcccaaagtgttgggataacaggcgtgagctaccgcacctggccgagtttggtgtataattttaaagctcccccataggattccaatgtgcggccaggactgagaactacagccctcgcatctcctgctgctcctcctcccccaccagagatgagctccaaggacacaaaaaccaggtgcccccc

SEQ ID NO: 110202 - DNA, 714 bp, Homo sapiens; identical to SEQ ID NO: 110200
  Payload ID: 1627
  Gene Symbol: ABCC6
  Gene Name: ATP-binding cassette, sub-family C (CFTR/MRP), member 6
  Uniprot ID: O95255
  ENST ID: ENST00000600761
  CDS Start-End: 34-333

SEQ ID NO: 110203 - DNA, 4941 bp, Homo sapiens
  Payload ID: 1627
  Gene Symbol: ABCC6
  Gene Name: ATP-binding cassette, sub-family C (CFTR/MRP), member 6
  Uniprot ID: O95255
  ENST ID: ENST00000622290
  CDS Start-End: 38-2653
agacagacgctgggacccacgacgacagaaggcgccgatggccgcgcctgctgagccctgcgcggggcagggggtctggaaccagacagagcctgaacctgccgccaccagcctgctgagcctgtgcttcctgagaacagcaggggtctgggtaccccccatgtacctctgggtccttggtcccatctacctcctcttcatccaccaccatggccggggctacctccggatgtccccactcttcaaagccaagatggtgcttggattcgccctcatagtcctgtgtacctccagcgtggctgtcgctctttggaaaatccaacagggaacgcctgaggccccagaattcctcattcatcctactgtgtggctcaccacgatgagcttcgcagtgttcctgattcacaccgagaggaaaaagggagtccagtcatctggagtgctgtttggttactggcttctctgctttgtcttgccagctaccaacgctgcccagcaggcctccggagcgggcttccagagcgaccctgtccgccacctgtccacctacctatgcctgtctctggtggtggcacagtttgtgctgtcctgcctggcggatcaaccccccttcttccctgaagacccccagcagtctaacccctgtccagagactggggcagccttcccctccaaagccacgttctggtgggtttctggcctggtctggaggggatacaggaggccactgagaccaaaagacctctggtcgcttgggagagaaaactcctcagaagaacttgtttcccggcttgaaaaggagtggatgaggaaccgcagtgcagcccggaggcacaacaaggcaatagcatttaaaaggaaaggcggcagtggcatgaaggctccagagaccgagcccttcctacggcaagaagggagccagtggcgcccactgctgaaggccatctggcaggtgttccattctaccttcctcctggggaccctcagcctcatcatcagtgatgtcttcaggttcactgtccccaagctgctcagccttttcctggagtttattggtgatcccaagcctccagcctggaagggctacctcctcgccgtgctgatgttcctctcagcctgcctgcaaacgctgtttgagcagcagaacatgtacaggctcaaggtgctgcagatgaggttgcggtcggccatcactggcctggtgtacagaaaggtcctggctctgtccagcggctccagaaaggccagtgcggtgggtgatgtggtcaatctggtgtccgtggacgtgcagcggctgaccgagagcgtcctctacctcaacgggctgtggctgcctctcgtctggatcgtggtctgcttcgtctatctctggcagctcctggggccctccgccctcactgccatcgctgtcttcctgagcctcctccctctgaatttcttcatctccaagaaaaggaaccaccatcaggaggagcaaatgaggcagaaggactcacgggcacggctcaccagctctatcctcaggaactcgaagaccatcaagttccatggctgggagggagcctttctggacagagtcctgggcatccgaggccaggagctgggcgccttgcggacctccggcctcctcttctctgtgtcgctggtgtccttccaagtgtctacatttctggtcgcactggtggtgtttgctgtccacactctggtggccgagaatgctatgaatgcagagaaagcctttgtgactctcacagttctcaacatcctcaacaaggcccaggctttcctgcccttctccatccactccctcgtccaggcccgggtgtcctttgaccgtctggtcaccttcctctgcctggaagaagttgaccctggtgtcgtagactcaagttcctctggaagcgctgccgggaaggattgcatcaccatacacagtgccaccttcgcctggtcccaggaaagccctccctgcctccacagaataaacctcacggtgccccagggctgtctgctggctgttgtcggtccagtgggggcagggaagtcctccctgctgtccgccctccttggggagctgtcaaaggtggaggggttcgtgagcatcgagggtgctgtggcctacgtgccccaggaggcctgggtgcagaacacctctgtggtagagaatgtgtgcttcgggcaggagctggacccaccctggctggagagagtactagaagcctgtgccctgcagccagatgtggacagcttccctgagggaatccacacttcaattggggagcagggcatgaatctctccggaggccagaagcagcggctgagcctggcccgggctgtatacagaaaggcagctgtgtacctgctggatgaccccctggcggccctggatgcccacgttggccagcatgtcttcaaccaggtcattgggcctggtggactactccagggaacaaaacagaacctgggaccagcaccaaggaccccagaggcacctctgcaggcaggaggcccgagcttagacgcgagaggtccatcaagtcagtccctgagaaggaccgtaccacttcagaagcccagacagaggttcctctggatgaccctgacagggcaggatggccagcaggaaaggacagcatccaatacggcagggtgaaggccacagtgcacctggcctacctgcgtgccgtgggcacccccctctgcctctacgcactcttcctcttcctctgccagcaagtggcctccttctgccggggctactggctgagcctgtgggcggacgaccctgcagtaggtgggcagcagacgcaggcagccctgcgtggcgggatcttcgggctcctcggctgtctccaagccattgggctgtttgcctccatggctgcggtgctcctaggtggggcccgggcatccaggttgctcttccagaggctcctgtgggatgtggtgcgatctcccatcagcttctttgagcggacacccattggtcacctgctaaaccgcttctccaaggagacagacacggttgacgtggacattccagacaaactccggtccctgctgatgtacgcctttggactcctggaggtcagcctggtggtggcagtggctaccccactggccactgtggccatcctgccactgtttctcctctacgctgggtttcagagcctgtatgtggttagctcatgccagctgagacgcttggagtcagccagctactcgtctgtctgctcccacatggctgagacgttccagggcagcacagtggtccgggcattccgaacccaggccccctttgtggctcagaacaatgctcgcgtagatgaaagccagaggatcagtttcccgcgactggtggctgacaggtggcttgcggccaatgtggagctcctggggaatggcctggtgtttgcagctgccacgtgtgctgtgctgagcaaagcccacctcagtgctggcctcgtgggcttctctgtctctgctgccctccaggtgacccagacactgcagtgggttgttcgcaactggacagacctagagaacagcatcgtgtcagtggagcggatgcaggactatgcctggacgcccaaggaggctccctggaggctgcccacatgtgcagctcagcccccctggcctcagggcgggcagatcgagttccgggactttgggctaagataccgacctgagctcccgctggctgtgcagggcgtgtccttcaagatccacgcaggagagaaggtgggcatcgttggcaggaccggggcagggaagtcctccctggccagtgggctgctgcggctccaggaggcagctgagggtgggatctggatcgacggggtccccattgcccacgtggggctgcacacactgcgctccaggatcagcatcatcccccaggaccccatcctgttccctggctctctgcggatgaacctcgacctgctgcaggagcactcggacgaggctatctgggcagccctggagacggtgcagctcaaagccttggtggccagcctgcccggccagctgcagtacaagtgtgctgaccgaggcgaggacctgagcgtgggccagaaacagctcctgtgtctggcacgtgcccttctccggaagacccagatcctcatcctggacgaggctactgctgccgtggaccctggcacggagctgcagatgcaggccatgctcgggagctggtttgcacagtgcactgtgctgctcattgcccaccgcctgcgctccgtgatggactgtgcccgggttctggtcatggacaaggggcaggtggcagagagcggcagcccggcccagctgctggcccagaagggcctgttttacagactggcccaggagtcaggcctggtctgagccaggaccctcaaccgtaccccagttggaccagcccgcacagcctgcagtgctggagatggaagtgacccgtggtcatcgatagctccacacgatattgagtctagacctgtgtttgctctctgggaggaaaatggcagagaaagtggccaattatcacagagcatcagagccggaaggacctagcaatacacaggtctgcccgggcagggcccatctcgccctgtccaccctgcagccaatgtcaacagcgactctcagccccgctgtactctggactcacctgggggcctcaagcacatgcccaggctcccggctagacccttaaatcagaatctctgaggctgggaactgccatgctgtgtgtactttttacaaattaacacttttattttgggataatcccagactcacatgcagttaaagaaacaataatatagagagattcgtgtacttggtaccccatttcacccaatggtaacatcttgcaaaactctaggataaagcatcacagccagggtgttgacattgacacaacaatcttgctcgatttcccgttttacctgt

SEQ ID NO: 110204 - DNA, 4137 bp, Homo sapiens
  Payload ID: 1627
  Gene Symbol: ABCC6
  Gene Name: ATP-binding cassette, sub-family C (CFTR/MRP), member 6
  ENST ID: ENST00000633611
  CDS Start-End: 1-2616
atggccgcgcctgctgagccctgcgcggggcagggggtctggaaccagacagagcctgaacctgccgccaccagcctgctgagcctgtgcttcctgagaacagcaggggtctgggtaccccccatgtacctctgggtccttggtcccatctacctcctcttcatccaccaccatggccggggctacctccggatgtccccactcttcaaagccaagatggtgcttggattcgccctcatagtcctgtgtacctccagcgtggctgtcgctctttggaaaatccaacagggaacgcctgaggccccagaattcctcattcatcctactgtgtggctcaccacgatgagcttcgcagtgttcctgattcacaccgagaggaaaaagggagtccagtcatctggagtgctgtttggttactggcttctctgctttgtcttgccagctaccaacgctgcccagcaggcctccggagcgggcttccagagcgaccctgtccgccacctgtccacctacctatgcctgtctctggtggtggcacagtttgtgctgtcctgcctggcggatcaaccccccttcttccctgaagacccccagcagtctaacccctgtccagagactggggcagccttcccctccaaagccacgttctggtgggtttctggcctggtctggaggggatacaggaggccactgagaccaaaagacctctggtcgcttgggagagaaaactcctcagaagaacttgtttcccggcttgaaaaggagtggatgaggaaccgcagtgcagcccggaggcacaacaaggcaatagcatttaaaaggaaaggcggcagtggcatgaaggctccagagaccgagcccttcctacggcaagaagggagccagtggcgcccactgctgaaggccatctggcaggtgttccattctaccttcctcctggggaccctcagcctcatcatcagtgatgtcttcaggttcactgtccccaagctgctcagccttttcctggagtttattggtgatcccaagcctccagcctggaagggctacctcctcgccgtgctgatgttcctctcagcctgcctgcaaacgctgtttgagcagcagaacatgtacaggctcaaggtgctgcagatgaggttgcggtcggccatcactggcctggtgtacagaaaggtcctggctctgtccagcggctccagaaaggccagtgcggtgggtgatgtggtcaacctggtgtccgtagacgtgcagcggctgaccgagagcgtcctctacctcaacgggctgtggctgcctctcgtctggatcgtggtctgcttcgtctatctctggcagctcctggggccctccgccctcactgccatcgctgtcttcctgagcctcctccctctgaatttcttcatctccaagaaaaggaaccaccatcaggaggagcaaatgaggcagaaggactcacgggcacggctcaccagctctatcctcaggaactcgaagaccatcaagttccatggctgggagggagcctttctggacagagtcctgggcatccgaggccaggagctgggcgccttgcggacctccggcctcctcttctctgtgtcgctggtgtccttccaagtgtctacatttctggtcgcactggtggtgtttgctgtccacactctggtggccgagaatgctatgaatgcagagaaagcctttgtgactctcacagttctcaacatcctcaacaaggcccaggctttcctgcccttctccatccactccctcgtccaggcccgggtgtcctttgaccgtctggtcaccttcctctgcctggaagaagttgaccctggtgccgtagactcaagttcctctggaagcgctgccgggaaggattgcatcacgatacaaagtgccaccttcgcctggtcccaggaaagccctccctgcctccacagaataaacctcacggtgccccagggctgtctgctggctgttgtcggtccagtgggggcagggaagtcctccctgctgtccgccctccttggggagctgtcaaaggtggaggggttcgtgagcatcgagggtgctgtggcctacgtgccccaggaggcctgggtgcagaacacctctgtggtagagaatgtgtgcttcgggcaggagctggacccaccctggctggagagagtactagaagcctgtgccctgcagccagatgtggacagcttccctgagggaatccacacttcaattggggagcagggcatgaatctctccggaggccagaagcagcggctgagcctggcccgggctgtatacagaaaggcagctgtgtacctgctggatgaccccctggcggccctggatgcccacgttggccagcatgtcttcaaccaggtcattgggcctggtgggctactccagggaacaaaacagaacctgggaccagcaccaaggaccccagaggcacctctgcaggcaggaggcccgagcttagacgcgagaggtccatcaagtcagtccctgagaaggaccgtaccacttcagaagcccagacagaggttcctctggatgaccctgacagggcaggatggccagcaggaaaggacagcatccaatacggcagggtgaaggccacagtgcacctggcctacctgcgtgccgtgggcacccccctctgcctctacgcactcttcctcttcctctgccagcaagtggcctccttctgccggggctactggctgagcctgtgggcggacgaccctgcagtaggtgggcagcagacgcaggcagccctgcgtggcgggatcttcgggctcctcggctgtctccaagccattgggctgtttgcctccatggctgcggtgctcctaggtggggcccgggcatccaggttgctcttccagaggctcctgtgggatgtggtgcgatctcccatcagcttctttgagcggacacccattggtcacctgctaaaccgcttctccaaggagacagacacggttgacgtggacattccagacaaactccggtccctgctgatgtacgcctttggactcctggaggtcagcctggtggtggcagtggctaccccactggccactgtggccatcctgccactgtttctcctctacgctgggtttcaggtggcttgcggccaatgtggagctcctggggaatggcctggtgtttgcagctgccacgtgtgctgtgctgagcaaagcccacctcagtgctggcctcgtgggcttctctgtctctgctgccctccaggtgacccagacactgcagtgggttgttcgcaactggacagacctagagaacagcatcgtgtcagtggagcggatgcaggactatgcctggacgcccaaggaggctccctggaggctgcccacatgtgcagctcagcccccctggcctcagggcgggcagatcgagttccaggactttgggctaagataccgacctgagctcccgctggctgtgcagggcgtgtccttcaagatccacgcaggagagaaggtgggcatcgttggcaggaccggggcagggaagtcctccctggccagtgggctgctgcggctccaggaggcagctgagggtgggatctggatcgacggggtccccattgcccacgtggggctgcacacactgcgctccaggatcagcatcatcccccaggaccccatcctgttccctggctctctgcggatgaacctcgacctgctgcaggagcactcggacgaggctatctgggcagccctggagacggtgcagctcaaagccttggtggccagcctgcccggccagctgcagtacaagtgtgctgaccgaggcgaggacctgagcgtgggccagaaacagctcctgtgtctggcacgtgcccttctccggaagacccagatcctcatcctggacgaggctactgctgccgtggaccctggcacggagctgcagatgcaggccatgctcgggagctggtttgcacagtgcactgtgctgctcattgcccaccgcctgcgctccgtgatggactgtgcccgggttctggtcatggacaaggggcaggtggcagagagcggcagcccggcccagctgctggcccagaagggcctgttttacagactggcccaggagtcaggcctggtctga

SEQ ID NO: 110205 - DNA, 1381 bp, Homo sapiens; identical to SEQ ID NO: 110199
  Payload ID: 1627
  Gene Symbol: ABCC6
  Gene Name: ATP-binding cassette, sub-family C (CFTR/MRP), member 6
  ENST ID: ENST00000632157
  CDS Start-End: 89-337

SEQ ID NO: 110206 - DNA, 4923 bp, Homo sapiens
  Payload ID: 1628
  Gene Symbol: ABCC8
  Gene Name: ATP-binding cassette, sub-family C (CFTR/MRP), member 8
  Uniprot ID: Q09428
  ENST ID: ENST00000302539
  CDS Start-End: 70-4818
agaggcgcggcaggcgcgcggagccagcggagccagctgagcccgagcccagcccgcgcccgcgccgccatgcccctggccttctgcggcagcgagaaccactcggccgcctaccgggtggaccagggggtcctcaacaacggctgctttgtggacgcgctcaacgtggtgccgcacgtcttcctactcttcatcaccttccccatcctcttcattggatggggaagtcagagctccaaggtgcacatccaccacagcacatggcttcatttccctgggcacaacctgcggtggatcctgaccttcatgctgctcttcgtcctggtgtgtgagattgcagagggcatcctgtctgatggggtgaccgaatcccaccatctgcacctgtacatgccagccgggatggcgttcatggctgctgtcacctccgtggtctactatcacaacatcgagacttccaacttccccaagctgctaattgccctgctggtgtattggaccctggccttcatcaccaagaccatcaagtttgtcaagttcttggaccacgccatcggcttctcgcagctacgcttctgcctcacagggctgctggtgatcctctatgggatgctgctcctcgtggaggtcaatgtcatcagggtgaggagatacatcttcttcaagacaccgagggaggtgaagcctcccgaggacctgcaagacctgggggtacgcttcctgcagcccttcgtgaatctgctgtccaaaggcacctactggtggatgaacgccttcatcaagactgcccacaagaagcccatcgacttgcgagccatcgggaagctgcccatcgccatgagggccctcaccaactaccaacggctctgcgaggcctttgacgcccaggtgcggaaggacattcagggcactcaaggtgcccgggccatctggcaggcactcagccatgccttcgggaggcgcctggtcctcagcagcactttccgcatcttggccgacctgctgggcttcgccgggccactgtgcatctttgggatcgtggaccaccttgggaaggagaacgacgtcttccagcccaagacacaatttctcggggtttactttgtctcatcccaagagttccttgccaatgcctacgtcttagctgtgcttctgttccttgccctcctactgcaaaggacatttctgcaagcatcctactatgtggccattgaaactggaattaacttgagaggagcaatacagaccaagatttacaataaaattatgcacctgtccacctccaacctgtccatgggagaaatgactgctggacagatctgtaatctggttgccatcgacaccaatcagctcatgtggtttttcttcttgtgcccaaacctctgggctatgccagtacagatcattgtgggtgtgattctcctctactacatactcggagtcagtgccttaattggagcagctgtcatcattctactggctcctgtccagtacttcgtggccaccaagctgtctcaggcccagcggagcacactggagtattccaatgagcggctgaagcagaccaacgagatgctccgcggcatcaagctgctgaagctgtacgcctgggagaacatcttccgcacgcgggtggagacgacccgcaggaaggagatgaccagcctcagggcctttgccatctatacctccatctccattttcatgaacacggccatccccattgcagctgtcctcataactttcgtgggccacgtcagcttcttcaaagaggccgacttctcgccctccgtggcctttgcctccctctccctcttccatatcttggtcacaccgctgttcctgctgtccagtgtggtccgatctaccgtcaaagctctagtgagcgtgcaaaagctaagcgagttcctgtccagtgcagagatccgtgaggagcagtgtgccccccatgagcccacacctcagggcccagccagcaagtaccaggcggtgcccctcagggttgtgaaccgcaagcgtccagcccgggaggattgtcggggcctcaccggcccactgcagagcctggtccccagtgcagatggcgatgctgacaactgctgtgtccagatcatgggaggctacttcacgtggaccccagatggaatccccacactgtccaacatcaccattcgtatcccccgaggccagctgactatgatcgtggggcaggtgggctgcggcaagtcctcgctccttctagccgcactgggggagatgcagaaggtctcaggggctgtcttctggagcagcagccttcctgacagcgagataggagaggaccccagcccagagcgggagacagcgaccgacttggatatcaggaagagaggccccgtggcctatgcttcgcagaaaccatggctgctaaatgccactgtggaggagaacatcatctttgagagtcccttcaacaaacaacggtacaagatggtcattgaagcctgctctctgcagccagacatcgacatcctgccccatggagaccagacccagattggggaacggggcatcaacctgtctggtggtcaacgccagcgaatcagtgtggcccgagccctctaccagcacgccaacgttgtcttcttggatgaccccttctcagctctggatatccatctgagtgaccacttaatgcaggccggcatccttgagctgctccgggacgacaagaggacagtggtcttagtgacccacaagctacagtacctgccccatgcagactggatcattgccatgaaggatggcaccatccagagggagggtaccctcaaggacttccagaggtctgaatgccagctctttgagcactggaagaccctcatgaaccgacaggaccaagagctggagaaggagactgtcacagagagaaaagccacagagccaccccagggcctatctcgtgccatgtcctcgagggatggccttctgcaggatgaggaagaggaggaagaggaggcagctgagagcgaggaggatgacaacctgtcgtccatgctgcaccagcgtgctgagatcccatggcgagcctgcgccaagtacctgtcctccgccggcatcctgctcctgtcgttgctggtcttctcacagctgctcaagcacatggtcctggtggccatcgactactggctggccaagtggaccgacagcgccctgaccctgacccctgcagccaggaactgctccctcagccaggagtgcaccctcgaccagactgtctatgccatggtgttcacggtgctctgcagcctgggcattgtgctgtgcctcgtcacgtctgtcactgtggagtggacagggctgaaggtggccaagagactgcaccgcagcctgctaaaccggatcatcctagcccccatgaggttttttgagaccacgccccttgggagcatcctgaacagattttcatctgactgtaacaccatcgaccagcacatcccatccacgctggagtgcctgagccgctccaccctgctctgtgtctcagccctggccgtcatctcctatgtcacacctgtgttcctcgtggccctcttgcccctggccatcgtgtgctacttcatccagaagtacttccgggtggcgtccagggacctgcagcagctggatgacaccacccagcttccacttctctcacactttgccgaaaccgtagaaggactcaccaccatccgggccttcaggtatgaggcccggttccagcagaagcttctcgaatacacagactccaacaacattgcttccctcttcctcacagctgccaacagatggctggaagtccgaatggagtacatcggtgcatgtgtggtgctcatcgcagcggtgacctccatctccaactccctgcacagggagctctctgctggcctggtgggcctgggccttacctacgccctaatggtctccaactacctcaactggatggtgaggaacctggcagacatggagctccagctgggggctgtgaagcgcatccatgggctcctgaaaaccgaggcagagagctacgaggggctcctggcaccatcgctgatcccaaagaactggccagaccaagggaagatccagatccagaacctgagcgtgcgctacgacagctccctgaagccggtgctgaagcacgtcaatgccctcatcgcccctggacagaagatcgggatctgcggccgcaccggcagtgggaagtcctccttctctcttgccttcttccgcatggtggacacgttcgaagggcacatcatcattgatggcattgacatcgccaaactgccgctgcacaccctgcgctcacgcctctccatcatcctgcaggaccccgtcctcttcagcggcaccatccgatttaacctggaccctgagaggaagtgctcagatagcacactgtgggaggccctggaaatcgcccagctgaagctggtggtgaaggcactgccaggaggcctcgatgccatcatcacagaaggcggggagaatttcagccagggacagaggcagctgttctgcctggcccgggccttcgtgaggaagaccagcatcttcatcatggacgaggccacggcttccattgacatggccacggaaaacatcctccaaaaggtggtgatgacagccttcgcagaccgcactgtggtcaccatcgcgcatcgagtgcacaccatcctgagtgcagacctggtgatcgtcctgaagcggggtgccatccttgagttcgataagccagagaagctgctcagccggaaggacagcgtcttcgcctccttcgtccgtgcagacaagtgacctgccagagcccaagtgccatcccacattcggaccctgcccatacccctgcctgggttttctaactgtaaatcacttgtaaataaatagatttgattatttcct

SEQ ID NO: 110207 - DNA, 4921 bp, Homo sapiens
  Payload ID: 1628
  Gene Symbol: ABCC8
  Gene Name: ATP-binding cassette, sub-family C (CFTR/MRP), member 8
  Uniprot ID: Q09428
  ENST ID: ENST00000389817
  CDS Start-End: 70-4815
agaggcgcggcaggcgcgcggagccagcggagccagctgagcccgagcccagcccgcgcccgcgccgccatgcccctggccttctgcggcagcgagaaccactcggccgcctaccgggtggaccagggggtcctcaacaacggctgctttgtggacgcgctcaacgtggtgccgcacgtcttcctactcttcatcaccttccccatcctcttcattggatggggaagtcagagctccaaggtgcacatccaccacagcacatggcttcatttccctgggcacaacctgcggtggatcctgaccttcatgctgctcttcgtcctggtgtgtgagattgcagagggcatcctgtctgatggggtgaccgaatcccaccatctgcacctgtacatgccagccgggatggcgttcatggctgctgtcacctccgtggtctactatcacaacatcgagacttccaacttccccaagctgctaattgccctgctggtgtattggaccctggccttcatcaccaagaccatcaagtttgtcaagttcttggaccacgccatcggcttctcgcagctacgcttctgcctcacagggctgctggtgatcctctatgggatgctgctcctcgtggaggtcaatgtcatcagggtgaggagatacatcttcttcaagacaccgagggaggtgaagcctcccgaggacctgcaagacctgggggtacgcttcctgcagcccttcgtgaatctgctgtccaaaggcacctactggtggatgaacgccttcatcaagactgcccacaagaagcccatcgacttgcgagccatcgggaagctgcccatcgccatgagggccctcaccaactaccaacggctctgcgaggcctttgacgcccaggtgcggaaggacattcagggcactcaaggtgcccgggccatctggcaggcactcagccatgccttcgggaggcgcctggtcctcagcagcactttccgcatcttggccgacctgctgggcttcgccgggccactgtgcatctttgggatcgtggaccaccttgggaaggagaacgacgtcttccagcccaagacacaatttctcggggtttactttgtctcatcccaagagttccttgccaatgcctacgtcttagctgtgcttctgttccttgccctcctactgcaaaggacatttctgcaagcatcctactatgtggccattgaaactggaattaacttgagaggagcaatacagaccaagatttacaataaaattatgcacctgtccacctccaacctgtccatgggagaaatgactgctggacagatctgtaatctggttgccatcgacaccaatcagctcatgtggtttttcttcttgtgcccaaacctctgggctatgccagtacagatcattgtgggtgtgattctcctctactacatactcggagtcagtgccttaattggagcagctgtcatcattctactggctcctgtccagtacttcgtggccaccaagctgtctcaggcccagcggagcacactggagtattccaatgagcggctgaagcagaccaacgagatgctccgcggcatcaagctgctgaagctgtacgcctgggagaacatcttccgcacgcgggtggagacgacccgcaggaaggagatgaccagcctcagggcctttgccatctatacctccatctccattttcatgaacacggccatccccattgcagctgtcctcataactttcgtgggccacgtcagcttcttcaaagaggccgacttctcgccctccgtggcctttgcctccctctccctcttccatatcttggtcacaccgctgttcctgctgtccagtgtggtccgatctaccgtcaaagctctagtgagcgtgcaaaagctaagcgagttcctgtccagtgcagagatccgtgaggagcagtgtgccccccatgagcccacacctcagggcccagccagcaagtaccaggcggtgcccctcagggttgtgaaccgcaagcgtccagcccgggaggattgtcggggcctcaccggcccactgcagagcctggtccccagtgcagatggcgatgctgacaactgctgtgtccagatcatgggaggctacttcacgtggaccccagatggaatccccacactgtccaacatcaccattcgtatcccccgaggccagctgactatgatcgtggggcaggtgggctgcggcaagtcctcgctccttctagccgcactgggggagatgcagaaggtctcaggggctgtcttctggagcagccttcctgacagcgagataggagaggaccccagcccagagcgggagacagcgaccgacttggatatcaggaagagaggccccgtggcctatgcttcgcagaaaccatggctgctaaatgccactgtggaggagaacatcatctttgagagtcccttcaacaaacaacggtacaagatggtcattgaagcctgctctctgcagccagacatcgacatcctgccccatggagaccagacccagattggggaacggggcatcaacctgtctggtggtcaacgccagcgaatcagtgtggcccgagccctctaccagcacgccaacgttgtcttcttggatgaccccttctcagctctggatatccatctgagtgaccacttaatgcaggccggcatccttgagctgctccgggacgacaagaggacagtggtcttagtgacccacaagctacagtacctgccccatgcagactggatcattgccatgaaggatggcaccatccagagggagggtaccctcaaggacttccagaggtctgaatgccagctctttgagcactggaagaccctcatgaaccgacaggaccaagagctggagaaggagactgtcacagagagaaaagccacagagccaccccagggcctatctcgtgccatgtcctcgagggatggccttctgcaggatgaggaagaggaggaagaggaggcagctgagagcgaggaggatgacaacctgtcgtccatgctgcaccagcgtgctgagatcccatggcgagcctgcgccaagtacctgtcctccgccggcatcctgctcctgtcgttgctggtcttctcacagctgctcaagcacatggtcctggtggccatcgactactggctggccaagtggaccgacagcgccctgaccctgacccctgcagccaggaactgctccctcagccaggagtgcaccctcgaccagactgtctatgccatggtgttcacggtgctctgcagcctgggcattgtgctgtgcctcgtcacgtctgtcactgtggagtggacagggctgaaggtggccaagagactgcaccgcagcctgctaaaccggatcatcctagcccccatgaggttttttgagaccacgccccttgggagcatcctgaacagattttcatctgactgtaacaccatcgaccagcacatcccatccacgctggagtgcctgagccgctccaccctgctctgtgtctcagccctggccgtcatctcctatgtcacacctgtgttcctcgtggccctcttgcccctggccatcgtgtgctacttcatccagaagtacttccgggtggcgtccagggacctgcagcagctggatgacaccacccagcttccacttctctcacactttgccgaaaccgtagaaggactcaccaccatccgggccttcaggtatgaggcccggttccagcagaagcttctcgaatacacagactccaacaacattgcttccctcttcctcacagctgccaacagatggctggaagtccgaatggagtacatcggtgcatgtgtggtgctcatcgcagcggtgacctccatctccaactccctgcacagggagctctctgctggcctggtgggcctgggccttacctacgccctaatggtctccaactacctcaactggatggtgaggaacctggcagacatggagctccagctgggggctgtgaagcgcatccatgggctcctgaaaaccgaggcagagagctacgaggggctcctggcaccatcgctgatcccaaagaactggccagaccaagggaagatccagatccagaacctgagcgtgcgctacgacagctccctgaagccggtgctgaagcacgtcaatgccctcatcgcccctggacagaagatcgggatctgcggccgcaccggcagtgggaagtcctccttctctcttgccttcttccgcatggtggacacgttcgaagggcacatcatcattgatggcattgacatcgccaaactgccgctgcacaccctgcgctcacgcctctccatcatcctgcaggaccccgtcctcttcagcggcaccatccgatttaacctggaccctgagaggaagtgctcagatagcacactgtgggaggccctggaaatcgcccagctgaagctggtggtgaaggcactgccaggaggcctcgatgccatcatcacagaaggcggggagaatttcagccagggacagaggcagctgttctgcctggcccgggccttcgtgaggaagaccagcatcttcatcatggacgaggccacggcttccattgacatggccacggaaaacatcctccaaaaggtggtgatgacagccttcgcagaccgcactgtggtcaccatcgcgcatcgagtgcacaccatcctgagtgcagacctggtgatcgtcctgaagcggggtgccatccttgagttcgataagccagagaagctgctcagccggaaggacagcgtcttcgcctccttcgtccgtgcagacaagtgacctgccagagcccaagtgccatcccacattcggaccctgcccatacccctgcctgggttttctaactgtaaatcacttgtaaataaatagatttgattatttccta

SEQ ID NO: 110208 - DNA, 4283 bp, Homo sapiens
  Payload ID: 1628
  Gene Symbol: ABCC8
  Gene Name: ATP-binding cassette, sub-family C (CFTR/MRP), member 8
  ENST ID: ENST00000527905
  CDS Start-End: 44-3037
gcggagccagctgagcccgagcccagcccgcgcccgcgccgccatgcccctggccttctgcggcagcgagaaccactcggccgcctaccgggtggaccagggggtcctcaacaacggctgctttgtggacgcgctcaacgtggtgccgcacgtcttcctactcttcatcaccttccccatcctcttcattggatggggaagtcagagctccaaggtgcacatccaccacagcacatggcttcatttccctgggcacaacctgcggtggatcctgaccttcatgctgctcttcgtcctggtgtgtgagattgcagagggcatcctgtctgatggggtgaccgaatcccaccatctgcacctgtacatgccagccgggatggcgttcatggctgctgtcacctccgtggtctactatcacaacatcgagacttccaacttccccaagctgctaattgccctgctggtgtattggaccctggccttcatcaccaagaccatcaagtttgtcaagttcttggaccacgccatcggcttctcgcagctacgcttctgcctcacagggctgctggtgatcctctatgggatgctgctcctcgtggaggtcaatgtcatcagggtgaggagatacatcttcttcaagacaccgagggaggtgaagcctcccgaggacctgcaagacctgggggtacgcttcctgcagcccttcgtgaatctgctgtccaaaggcacctactggtggatgaacgccttcatcaagactgcccacaagaagcccatcgacttgcgagccatcgggaagctgcccatcgccatgagggccctcaccaactaccaacggctctgcgaggcctttgacgcccaggtgcggaaggacattcagggcactcaaggtgcccgggccatctggcaggcactcagccatgccttcgggaggcgcctggtcctcagcagcactttccgcatcttggccgacctgctgggcttcgccgggccactgtgcatctttgggatcgtggaccaccttgggaaggagaacgacgtcttccagcccaagacacaatttctcggggtttactttgtctcatcccaagagttccttgccaatgcctacgtcttagctgtgcttctgttccttgccctcctactgcaaaggacatttctgcaagcatcctactatgtggccattgaaactggaattaacttgagaggagcaatacagaccaagatttacaataaaattatgcacctgtccacctccaacctgtccatgggagaaatgactgctggacagatctgtaatctggttgccatcgacaccaatcagctcatgtggtttttcttcttgtgcccaaacctctgggctatgccagtacagatcattgtgggtgtgattctcctctactacatactcggagtcagtgccttaattggagcagctgtcatcattctactggctcctgtccagtacttcgtggccaccaagctgtctcaggcccagcggagcacactggagtattccaatgagcggctgaagcagaccaacgagatgctccgcggcatcaagctgctgaagctgtacgcctgggagaacatcttccgcacgcgggtggagacgacccgcaggaaggagatgaccagcctcagggcctttgccatctatacctccatctccattttcatgaacacggccatccccattgcagctgtcctcataactttcgtgggccacgtcagcttcttcaaagaggccgacttctcgccctccgtggcctttgcctccctctccctcttccatatcttggtcacaccgctgttcctgctgtccagtgtggtccgatctaccgtcaaagctctagtgagtgcagagatccgtgaggagcagtgtgccccccatgagcccacacctcagggcccagccagcaagtaccaggcggtgcccctcagggttgtgaaccgcaagcgtccagcccgggaggattgtcggggcctcaccggcccactgcagagcctggtccccagtgcagatggcgatgctgacaactgctgtgtccagatcatgggaggctacttcacgtggaccccagatggaatccccacactgtccaacatcaccattcgtatcccccgaggccagctgactatgatcgtggggcaggtgggctgcggcaagtcctcgctccttctagccgcactgggggagatgcagaaggtctcaggggctgtcttctggagcagccttcctgacagcgagataggagaggaccccagcccagagcgggagacagcgaccgacttggatatcaggaagagaggccccgtggcctatgcttcgcagaaaccatggctgctaaatgccactgtggaggagaacatcatctttgagagtcccttcaacaaacaacggtacaagatggtcattgaagcctgctctctgcagccagacatcgacatcctgccccatggagaccagacccagattggggaacggggcatcaacctgtctggtggtcaacgccagcgaatcagtgtggcccgagccctctaccagcacgccaacgttgtcttcttggatgaccccttctcagctctggatatccatctgagtgaccacttaatgcaggccggcatccttgagctgctccgggacgacaagaggacagtggtcttagtgacccacaagctacagtacctgccccatgcagactggatcattgccatgaaggatggcaccatccagagggagggtaccctcaaggacttccagaggtctgaatgccagctctttgagcactggaagaccctcatgaaccgacaggaccaagagctggagaagaggaggcagctgagagcgaggaggatgacaacctgtcgtccatgctgcaccagcgtgctgagatcccatggcgagcctgcgccaagtacctgtcctccgccggcatcctgctcctgtcgttgctggtcttctcacagctgctcaagcacatggtcctggtggccatcgactactggctggccaagtggaccgacagcgccctgaccctgacccctgcagccaggaactgctccctcagccaggagtgcaccctcgaccagactgtctatgccatggtgttcacggtgctctgcagcctgggcattgtgctgtgcctcgtcacgtctgtcactgtggagtggacagggctgaaggtggccaagagactgcaccgcagcctgctaaaccggatcatcctagcccccatgaggttttttgagaccacgccccttgggagcatcctgaacagattttcatctgactgtaacaccatcgaccagcacatcccatccacgctggagtgcctgagccgctccaccctgctctgtgtctcagccctggccgtcatctcctatgtcacacctgtgttcctcgtggccctcttgcccctggccatcgtgtgctacttcatccagaagtacttccgggtggcgtccagggacctgcagcagctggatgacaccacccagcttccacttctctcacactttgccgaaaccgtagaaggactcaccaccatccgggccttcaggtatgaggcccggttccagcagaagcttctcgaatacacagactccaacaacattgcttccctcttcctcacagctgccaacagatggctggaagtccgaatggagtacatcggtgcatgtgtggtgctcatcgcagcggtgacctccatctccaactccctgcacagggagctctctgctggcctggtgggcctgggccttacctacgccctaatggtctccaactacctcaactggatggtgaggaacctggcagacatggagctccagctgggggctgtgaagcgcatccatgggctcctgaaaaccgaggcagagagctacgaggggctcctgggtgagaggctcagggagaggggtggggaagagtccaaggaggagtgtgtctgggttgggggccacaagggagcctggggatggggtggcactttcggatactagctgtggcccatgcctggtggctgagcccagcccggcccccagcaccatcgctgatcccaaagaactggccagaccaagggaagatccagatccagaacctgagcgtgcgctacgacagctccctgaagccggtgctgaagcacgtcaatgccctcatcgcccctggacagaaggtcagagcacgggcccaacccaatgctgcaggacaggcgtgagcaggggatggggcatgcacggagctggatggcttcgcagtcacctcgtggccctccagggcc

SEQ ID NO: 110209 - DNA, 611 bp, Homo sapiens
  Payload ID: 1628
  Gene Symbol: ABCC8
  Gene Name: ATP-binding cassette, sub-family C (CFTR/MRP), member 8
  ENST ID: ENST00000528374
  CDS Start-End: 1-611
ccagaagtacttccgggtggcgtccagggacctgcagcagctggatgacaccacccagcttccacttctctcacactttgccgaaaccgtagaaggactcaccaccatccgggccttcaggtatgaggcccggttccagcagaagcttctcgaatacacagactccaacaacattgcttccctcttcctcacagctgccaacagatggctggaagtccgaatggagtacatcggtgcatgtgtggtgctcatcgcagcggtgacctccatctccaactccctgcacagggagctctctgctggcctggtgggcctgggccttacctacgccctaatggtctccaactacctcaactggatggtgaggaacctggcagacatggagctccagctgggggctgtgaagcgcatccatgggctcctgaaaaccgaggcagagagctacgaggggctcctggcccggcccccagcaccatcgctgatcccaaagaactggccagaccaagggaagatccagatccagaacctgagcgtgcgctacgacagctccctgaagccggtgctgaagcacgtcaatgccctcatcgcccctggacagaagatcgggatct

SEQ ID NO: 110210 - DNA, 440 bp, Homo sapiens
  Payload ID: 1628
  Gene Symbol: ABCC8
  Gene Name: ATP-binding cassette, sub-family C (CFTR/MRP), member 8
  ENST ID: ENST00000531891
  CDS Start-End: 1-161
caccatccgggccttcaggtatgaggcccggttccagcagaagcttctcgaatacacagactccaacaacattgcttccctcttcctcacagctgccaacagatggctggaagtccgaatggagtacatcggtgcatgtgtggtgctcatcgcagcggtgacctccatctccaactccctgcacagggagctctctgctggcctggtgggcctgggccttacctacgccctaatggtctccaactacctcaactggatggtgaggaacctggcagacatggagctccagctgggggctgtgaagcgcatccatgggctcctgaaaaccgaggcagagagctacgaggggctcctggaccaagggaagatccagatccagaacctgagcgtgcgctacgacagctccctgaagccggtgctgaagcacgtcaatgccctca

SEQ ID NO: 110211 - DNA, 883 bp, Homo sapiens
  Payload ID: 1628
  Gene Symbol: ABCC8
  Gene Name: ATP-binding cassette, sub-family C (CFTR/MRP), member 8
  ENST ID: ENST00000531642
  CDS Start-End: 1-187
cttgccttcttccgcatggtggacacgttcgaagggcacatcatcattgatggcattgacatcgccaaactgccgctgcacaccctgcgctcacgcctctccatcatcctgcaggaccccgtcctcttcagcggcaccatccggcccaggcagcctctggaaggggatcccccacccatgggtctaagatgctgtcccccacccactgccaccacctcggtgcttctcccagccagacctccaactcagtctgctctcgctcactgccctctttgccgcctggggatgcaggcaggaccctgctccctccctactggggctttctgtgccacttccagatttaacctggaccctgagaggaagtgctcagatagcacactgtgggaggccctggaaatcgcccagctgaagctggtggtgaaggcactgccaggaggcctcgatgccatcatcacagaaggcggggagaatttcagccagggacagaggcagctgttctgcctggcccgggccttcgtgaggaagaccagcatcttcatcatggacgaggccacggcttccattgacatggccacggaaaacatcctccaaaaggtggtgatgacagccttcgcagaccgcactgtggtcaccatcgcgcatcgagtgcacaccatcctgagtgcagacctggtgatcgtcctgaagcggggtgccatccttgagttcgataagccagagaagctgctcagccggaaggacagcgtcttcgcctccttcgtccgtgcagacaagtgacctgccagagcccaagtgccatcccacattcggaccctgcccatacccctgcctgggttttctaactgtaaatcacttgtaaataaatagatttgattatttccta

SEQ ID NO: 110212 - DNA, 537 bp, Homo sapiens
  Payload ID: 1628
  Gene Symbol: ABCC8
  Gene Name: ATP-binding cassette, sub-family C (CFTR/MRP), member 8
  ENST ID: ENST00000526168
  CDS Start-End: 1-101
gccgcaccggcagtgggaagtcctccttctctcttgccttcttccgcatggtggacacgttcgaaggaccccgtcctcttcagcggcaccatccgatttaacctggaccctgagaggaagtgctcagatagcacactgtgggaggccctggaaatcgcccagctgaagctggtggtgaaggcactgccaggaggcctcgatgccatcatcacagaaggcggggagaatttcagccagggacagaggcagctgttctgcctggcccgggccttcgtgaggaagaccagcatcttcatcatggacgaggccacggcttccattgacatggccacggaaaacatcctccaaaaggtggtgatgacagccttcgcagaccgcactgtggtcaccatcgcgcatcgagtgcacaccatcctgagtgcagacctggtgatcgtcctgaagcggggtgccatccttgagttcgataagccagagaagctgctcagccggaaggacagcgtcttcgcctccttcgtccgtgcagacaagtgacct

SEQ ID NO: 110213 - DNA, 183 bp, Homo sapiens
  Payload ID: 1628
  Gene Symbol: ABCC8
  Gene Name: ATP-binding cassette, sub-family C (CFTR/MRP), member 8
  Uniprot ID: Q09428
  ENST ID: ENST00000612903
  CDS Start-End: 3-155
ccatgcccctggccttctgcggcagcgagaaccactcggccgcctaccgggtggaccagggggtcctcaacaacggctgctttgtggacgcgctcaacgtggtgccgcacgtcttcctactcttcatcaccttccccatcctcttcattgggtgaccgaatcccaccatctgcacctgtacat

SEQ ID NO: 110214 - DNA, 8293 bp, Homo sapiens
  Payload ID: 1629
  Gene Symbol: ABCC9
  Gene Name: ATP-binding cassette, sub-family C (CFTR/MRP), member 9
  Uniprot ID: O60706
  ENST ID: ENST00000261200
  CDS Start-End: 1-4650
atgagcctttcattttgtggtaacaacatttcttcatataatatcaacgatggtgtactacaaaattcctgctttgtggatgccctcaacctggtccctcatgtctttctgttgtttatcacttttccaatattgtttattgggtgggggagccaaagctcaaaagtacaaattcaccacaacacatggcttcattttccgggacataacctgagatggattcttacattcgctctcctgtttgtgcatgtctgtgaaatagcagaaggcattgtttcagactcgcggcgggaatcaaggcacctccacctctttatgccagccgtgatgggattcgttgccactacaacatcgatagtgtattatcataatatcgaaacatcaaattttcctaaattacttttagccctgttcctgtattgggtaatggcctttattacaaaaacaataaaattggttaagtactgtcagtctggcttggacatatcaaacctgcgtttctgcatcacaggcatgatggtcatcttgaatgggctcttgatggctgtggagatcaatgtcattcgagtcaggagatatgtatttttcatgaatcctcagaaagtaaagcctcctgaagacctccaggatctgggagtgagatttcttcaaccatttgtgaatttgctgtcaaaagcaacatactggtggatgaacacacttattatatctgctcacaaaaagcctattgatctgaaggcaattggaaaattgccaatagcaatgagagcagtaacaaattatgtttgcctgaaagatgcatatgaagaacaaaagaaaaaagttgcagatcatccaaatcggactccatctatatggcttgcaatgtacagagcttttgggcgaccaattctacttagtagcacattccgctatctggctgatttactgggttttgctggacctctttgtatttctggaatagttcagcgtgtgaatgaaacccagaatgggacaaataacacaactggaatttcagaaaccctctcatcaaaggaatttcttgaaaacgcttacgttctagcagttcttctcttcttggctcttattctgcaaaggacatttttgcaggcttcctactatgtaaccatagagactggcattaacctccgtggagctctgctggccatgatttataataaaatccttaggctctctacgtctaacttatccatgggggagatgactctggggcagatcaacaacttagtcgccattgaaactaatcaactcatgtggtttttgttcctgtgtcccaatctatgggctatgcctgttcagatcataatgggcgtgattctgctctataatttacttggatcaagtgcattggtcggtgcagctgtcattgtgctccttgcgccaattcagtactttattgctacaaagttggcagaggctcagaaaagtacacttgattattccactgagagactcaagaaaacaaatgaaatattgaaaggcatcaaacttctaaaattgtatgcctgggaacacattttctgcaaaagtgtggaggaaacaagaatgaaagaactatctagtctcaaaacctttgcactatatacatcactctccatcttcatgaatgcagcaattcccatagcagctgttcttgctacatttgtgacccatgcgtatgccagtggaaacaatctgaaacctgcagaggcctttgcttcactgtctctcttccatatcctggtcacaccactgttcctgctctccacggtggtcagatttgcagtcaaagccatcataagtgttcaaaagctgaatgagtttctcttgagtgatgagattggtgacgacagttggcgaactggtgaaagttcgcttccttttgagtcctgtaagaagcacactggagttcagccaaaaactataaacaggaaacagcctggaagatatcacctggacagctatgagcaatcaacacggcgtctacgtcccgcagaaacagaggacattgcaataaaggtcacaaatggatacttttcatggggcagtggtttagctacattatccaatatagatattcgaattccaacaggtcagttaaccatgattgtgggccaagtaggatgtgggaagtcctctcttctccttgccatcctcggtgagatgcagacattggaaggaaaagttcactggagcaatgtaaatgaatctgagccttcttttgaagcaaccagaagtaggaacaggtactctgtggcatatgcagctcaaaagccttggctattaaatgctacagtagaagaaaatattacttttggaagtccttttaacaaacagaggtacaaagctgtcacagatgcctgttctcttcagccagatattgacttattaccatttggagatcaaactgaaattggagagaggggcatcaacctgagtgggggacagaggcagagaatctgtgtggcacgagcgctgtatcaaaacaccaacattgtctttttggatgatccattctcagccctggacattcacttgagtgatcatttaatgcaggaggggattttgaaattcctgcaagatgacaaaaggacactcgttcttgtgactcacaaattacagtatctgacgcatgctgactggatcatagccatgaaagatggaagtgtcctaagagaaggaactttgaaggacattcaaaccaaagatgttgagctttatgaacactggaaaacacttatgaatcggcaagatcaagaattagaaaaggatatggaagctgaccaaactactttagagaggaaaactctccgacgggccatgtattcaagagaagccaaagcccagatggaggacgaagacgaagaggaagaagaggaggaagatgaggatgataacatgtccactgtaatgaggctcaggactaaaatgccatggaaaacctgctggcgctacctgacatctggaggattcttcctgctcatcctgatgattttctctaagcttttgaagcattcggtcattgtagctatagactattggctggccacatggacatcggagtacagtataaacaatactggaaaagctgatcagacctactatgtggctggctttagcatactctgtggagcaggcattttcctttgccttgttacatccctcactgtagaatggatgggtctcacagctgccaaaaatcttcaccacaaccttctcaataagataatccttggaccaataaggttttttgataccacacccctgggactgattctcaatcgcttttcagctgatactaatatcattgatcagcacatccctccaaccttggaatctctaactcgctcaacactgctctgcctgtctgccattgggatgatttcttatgctactcctgtgttcctggttgctctcctgccccttggtgttgccttttattttatccagaaatactttcgggttgcctctaaggacctccaggaacttgacgatagtacccagctccctctgctctgtcacttctcagaaacagcagaaggactcaccaccattcgggcctttaggcatgaaaccagatttaaacaacgtatgctggaactgacggatacaaacaacattgcctacttatttctctcagctgccaacagatggctggaggtcaggacggattatctgggagcttgcattgtcctcactgcatctatagcatccattagtgggtcttcgaattctggattggtaggcttgggtcttctgtatgcacttacgataaccaattatttgaattgggttgtgaggaacttggctgacctggaggtccagatgggtgcagtgaagaaggtgaacagtttcctgactatggagtcagagaactatgaaggcacaatggatccttctcaagttccagaacattggccacaagaaggggagatcaagatacatgatctgtgtgtcagatatgaaaataatctgaaacctgttcttaagcacgtcaaggcttacatcaaacctggacaaaaggtgggcatatgtggtcgcactggcagtgggaaatcatcgttatctctggctttcttcagaatggttgatatatttgatggaaaaattgtcattgatgggatagacatttccaaattaccactgcacacactacgttctagactttcaatcattctgcaggatccaatactattcagtggttccattagatttaatttagatccagagtgcaaatgcacagatgacagactctgggaagccttagaaattgctcagctgaagaatatggtcaaatctctacctggaggtctagatgcggttgtcactgaaggtggggagaattttagcgttggacagagacagctattttgccttgccagggcctttgtccgcaaaagcagcattcttattatggatgaggcaacagcttccattgacatggccacagagaatattttgcaaaaagtagtaatgacagcctttgcagaccggaccgtggtgacaatagctcatcgagtacacactattctgacggcagacctggttattgtgatgaagcgaggaaatattttagaatatgacactccagaaagcctcttggctcaggaaaatggagtatttgcttcttttgttcgcgcagacatgtgaaggagtgtcttaaaacaatacatgtatttaaaataatgcagtcataacctaattaatggatcatcagcttgacctctgtaaagtggcatcttaaaacttttacagatttttgcacaaaaagtggacatttatttttcctgtttttaaaacagtttttcaagatattattgcttaatatgttcattattgatgtttttatagtgatccagccactctagctttaagaatagctaggttgtattaaaacatgtaagctactttaagtgataaatcaatagctaaagttttctcctaactttaagtctggtaaatatctctcaggaatggaagtgtcaatgagtagtcagtattactatactcttgtttgtaagaatatattttccttattgttggagtctccagaggttattggaaggaataaaaaaggacatgttttctaacgaaactctcaaattcattatctacttcatgagaatttatttgtattcattaacattagtaatacctatttttcttaagagccttcttttttcccttttgtttcttgtcaccaagaagttatcacacttatacttattctataaggccaaagccttatctagaaagatcatgaagagtttggatatttttaaaactatactcgaattttcattttttcctgtcctgtaaagagagaattcttaagatatcaggcataatgtatgtaccttttccagactgaagttcaaagaatgattaggttcaatctttcagtggcaggccagctaaactttctatagtttaatgattagctgtggttatgatcttgagccctaacatgccacattactcaagatttacacaggcaagtgacttcatttggcactgctaataatggcaggtgaacattcctctcaggtgtgagatatttcctatgaaacagtccactggcaggctggagatatcttacactttgaagttatatatatataaaacaagtgtctatttctagctgaaagagtttacctcttctagacatttatgcccaatggtgtcacacatgatcatttgctcctgctctaattttaatgtgcatacaaaaaatataccaaaaatgttattgtaattttaatgagcatgtaaagagtgtatcaaaaattgatgggatattagtgttaggttttgcttaaatgaaaattaataaattcaaaaatactaaaagtcaccttctttgtcacgttagcaaccagtttctactattctgtgcccatccagtgtcaatatcattgatttctttttcatatgaagatccacatgcattgtaagattgtgaagatatataaaattgatgaattaagagaaattatgccactttcctatagtttctgtgttctgtttattgtatggtgtattcactcttggaaaatatgtaatagttgtgtatccagaatatgtgtcttcacctgaatatttaatctttatatttacaaaaaaataagttccacaagatggacaaaaatggtccatgatatttagcttaaattgtaaccttttgttgtgtatataaaacttccttggaagaaaataaccttattgttttcttaaagctaaacagaataggattggtactcattaattatgtcttgcaaatattttctaaaaattcaaccactctcctaaaatggtgtttaaatattttgtagggcagaatatgcatattgcctgttagcaagtaataattcattctcatagagaaatgggtttttacccatggaagtaatcttttttttttcttttttttttttaattttttttttaatatactttaagttttagggtacatgtgcacattgtgcaggttagttacatatatatacatgtgccatgctggtgcgctgcacccactaactcgtcatctagcattaggtatatctcccaatgctatccctccccactccccccaccccaccacagtccccagagtgtgatattccccttcctgtgtccatgtgatctcattgttcaattcccacctatgagtgagaatatgcggtgtttggttttttgttcttgcgatagtttactgagaatgatggtttccagtttcatccatgtccctacaaaggacatgaactcatcattttgtatggctgcatagtattccatggtgtatatgtgccacattttcttaatccagtctatcattgttggacatttgggttggttccaagtctttgctattgtgaataatgccgcaataaacatacgtgtgcatgtgtctttatagcagcatgatttatagtcatttgggtatatacccagtaatgggatggctgggtcaaatggtatttctagttctagatccctgaggaatcgccacactgacttccacaatggttaaactaaagagcttctgcacagcaaaagaaactaccatcagagtgaacaggcaacctacaacatgggagaaaattttcgcaacctactcatctgacaaagggctaatatccagaatctacaatgaactcaaacaaatttacaagaaaaaaacaaacaaccccatcaaaaagtgggtgaaggacatgaacagacacttctcaaaagaagacatttatgcagccaaaaaacacatgaaaaaatgctcatcatcactggccatcagagaaatgcaaatcaaaaccactatgagatatcatctcacaccagttagaatggcaatcattaaaaagtcaggaaacaacaggtgctggagaggatgtggagaaataggaacacttttacactgttggtgggactgtaaactagttcaaccattgtggaagtaatcttttaatgatattttcttattatattgctacaggcaacatcagtagaagcctatctagttacactaaactaaagatcacattcaccattcttacagccaagtggttgctggtcccctcataacttttagttacttaagttgagtaaatgtctaattgtttacaaactaaattgactaaataaggtcaaggataatgtttttcattgattaaccatttattatacatataatctattgaatataaaaagattcaccttgaaataatatttgactatataggtacatatctgtaaaagatgaccaccttaactaaatcagattttacatttataaattttatatttaattagtcaaatcaatttttaaatcataactccttaatctcataagaagcaataaatgcataaagcattatattaaaataccagggttacttatgtcattgacagggaaaagactttgtataaacaattatgcaccatctatttttgtactcttactcatgatccatttaaaagtctactcagctctagattagataccagaagaccctctaagtaactgataactgagattcgggaccatgtcttgtttgccattgtgcccttggaatttaatacaagtgcctaacccacagtagggttgattgattcactgattagttttactgccatgtgcctataactataggttattctctttccttttctatgttgtgtttattctatttattctctacaatatataaaatgtatttgttctctacaataaatgtgtttattctctacaatatataaaaacatattggactactattacataattaaattactcttt

SEQ ID NO: 110215 - DNA, 4650 bp, Homo sapiens
  Payload ID: 1629
  Gene Symbol: ABCC9
  Gene Name: ATP-binding cassette, sub-family C (CFTR/MRP), member 9
  Uniprot ID: O60706
  ENST ID: ENST00000261201
  CDS Start-End: 1-4650
atgagcctttcattttgtggtaacaacatttcttcatataatatcaacgatggtgtactacaaaattcctgctttgtggatgccctcaacctggtccctcatgtctttctgttgtttatcacttttccaatattgtttattgggtgggggagccaaagctcaaaagtacaaattcaccacaacacatggcttcattttccgggacataacctgagatggattcttacattcgctctcctgtttgtgcatgtctgtgaaatagcagaaggcattgtttcagactcgcggcgggaatcaaggcacctccacctctttatgccagccgtgatgggattcgttgccactacaacatcgatagtgtattatcataatatcgaaacatcaaattttcctaaattacttttagccctgttcctgtattgggtaatggcctttattacaaaaacaataaaattggttaagtactgtcagtctggcttggacatatcaaacctgcgtttctgcatcacaggcatgatggtcatcttgaatgggctcttgatggctgtggagatcaatgtcattcgagtcaggagatatgtatttttcatgaatcctcagaaagtaaagcctcctgaagacctccaggatctgggagtgagatttcttcaaccatttgtgaatttgctgtcaaaagcaacatactggtggatgaacacacttattatatctgctcacaaaaagcctattgatctgaaggcaattggaaaattgccaatagcaatgagagcagtaacaaattatgtttgcctgaaagatgcatatgaagaacaaaagaaaaaagttgcagatcatccaaatcggactccatctatatggcttgcaatgtacagagcttttgggcgaccaattctacttagtagcacattccgctatctggctgatttactgggttttgctggacctctttgtatttctggaatagttcagcgtgtgaatgaaacccagaatgggacaaataacacaactggaatttcagaaaccctctcatcaaaggaatttcttgaaaacgcttacgttctagcagttcttctcttcttggctcttattctgcaaaggacatttttgcaggcttcctactatgtaaccatagagactggcattaacctccgtggagctctgctggccatgatttataataaaatccttaggctctctacgtctaacttatccatgggggagatgactctggggcagatcaacaacttagtcgccattgaaactaatcaactcatgtggtttttgttcctgtgtcccaatctatgggctatgcctgttcagatcataatgggcgtgattctgctctataatttacttggatcaagtgcattggtcggtgcagctgtcattgtgctccttgcgccaattcagtactttattgctacaaagttggcagaggctcagaaaagtacacttgattattccactgagagactcaagaaaacaaatgaaatattgaaaggcatcaaacttctaaaattgtatgcctgggaacacattttctgcaaaagtgtggaggaaacaagaatgaaagaactatctagtctcaaaacctttgcactatatacatcactctccatcttcatgaatgcagcaattcccatagcagctgttcttgctacatttgtgacccatgcgtatgccagtggaaacaatctgaaacctgcagaggcctttgcttcactgtctctcttccatatcctggtcacaccactgttcctgctctccacggtggtcagatttgcagtcaaagccatcataagtgttcaaaagctgaatgagtttctcttgagtgatgagattggtgacgacagttggcgaactggtgaaagttcgcttccttttgagtcctgtaagaagcacactggagttcagccaaaaactataaacaggaaacagcctggaagatatcacctggacagctatgagcaatcaacacggcgtctacgtcccgcagaaacagaggacattgcaataaaggtcacaaatggatacttttcatggggcagtggtttagctacattatccaatatagatattcgaattccaacaggtcagttaaccatgattgtgggccaagtaggatgtgggaagtcctctcttctccttgccatcctcggtgagatgcagacattggaaggaaaagttcactggagcaatgtaaatgaatctgagccttcttttgaagcaaccagaagtaggaacaggtactctgtggcatatgcagctcaaaagccttggctattaaatgctacagtagaagaaaatattacttttggaagtccttttaacaaacagaggtacaaagctgtcacagatgcctgttctcttcagccagatattgacttattaccatttggagatcaaactgaaattggagagaggggcatcaacctgagtgggggacagaggcagagaatctgtgtggcacgagcgctgtatcaaaacaccaacattgtctttttggatgatccattctcagccctggacattcacttgagtgatcatttaatgcaggaggggattttgaaattcctgcaagatgacaaaaggacactcgttcttgtgactcacaaattacagtatctgacgcatgctgactggatcatagccatgaaagatggaagtgtcctaagagaaggaactttgaaggacattcaaaccaaagatgttgagctttatgaacactggaaaacacttatgaatcggcaagatcaagaattagaaaaggatatggaagctgaccaaactactttagagaggaaaactctccgacgggccatgtattcaagagaagccaaagcccagatggaggacgaagacgaagaggaagaagaggaggaagatgaggatgataacatgtccactgtaatgaggctcaggactaaaatgccatggaaaacctgctggcgctacctgacatctggaggattcttcctgctcatcctgatgattttctctaagcttttgaagcattcggtcattgtagctatagactattggctggccacatggacatcggagtacagtataaacaatactggaaaagctgatcagacctactatgtggctggctttagcatactctgtggagcaggcattttcctttgccttgttacatccctcactgtagaatggatgggtctcacagctgccaaaaatcttcaccacaaccttctcaataagataatccttggaccaataaggttttttgataccacacccctgggactgattctcaatcgcttttcagctgatactaatatcattgatcagcacatccctccaaccttggaatctctaactcgctcaacactgctctgcctgtctgccattgggatgatttcttatgctactcctgtgttcctggttgctctcctgccccttggtgttgccttttattttatccagaaatactttcgggttgcctctaaggacctccaggaacttgacgatagtacccagctccctctgctctgtcacttctcagaaacagcagaaggactcaccaccattcgggcctttaggcatgaaaccagatttaaacaacgtatgctggaactgacggatacaaacaacattgcctacttatttctctcagctgccaacagatggctggaggtcaggacggattatctgggagcttgcattgtcctcactgcatctatagcatccattagtgggtcttcgaattctggattggtaggcttgggtcttctgtatgcacttacgataaccaattatttgaattgggttgtgaggaacttggctgacctggaggtccagatgggtgcagtgaagaaggtgaacagtttcctgactatggagtcagagaactatgaaggcacaatggatccttctcaagttccagaacattggccacaagaaggggagatcaagatacatgatctgtgtgtcagatatgaaaataatctgaaacctgttcttaagcacgtcaaggcttacatcaaacctggacaaaaggtgggcatatgtggtcgcactggcagtgggaaatcatcgttatctctggctttcttcagaatggttgatatatttgatggaaaaattgtcattgatgggatagacatttccaaattaccactgcacacactacgttctagactttcaatcattctgcaggatccaatactattcagtggttccattagatttaatttagatccagagtgcaaatgcacagatgacagactctgggaagccttagaaattgctcagctgaagaatatggtcaaatctctacctggaggtctagatgcggttgtcactgaaggtggggagaattttagcgttggacagagacagctattttgccttgccagggcctttgtccgcaaaagcagcattcttattatggatgaggcaacagcttccattgacatggccacagagaatattttgcaaaaagtagtaatgacagcctttgcagaccggaccgtggtgacaatagctcaccgtgtctcttctattatggatgcaggccttgttttagtcttttctgagggtattttagtggagtgtgatactgtcccaaatttgctcgcccacaagaatggcctcttttccactttggtgatgaccaacaagtag

SEQ ID NO: 110216 - DNA, 1693 bp, Homo sapiens
  Payload ID: 1629
  Gene Symbol: ABCC9
  Gene Name: ATP-binding cassette, sub-family C (CFTR/MRP), member 9
  ENST ID: ENST00000326684
  CDS Start-End: 400-849
ggggaaggtctccggccccaggcgcggcgcgcggggcttctgcccagtttcctgcttctcagccgcggtgtctgccccggcccagagcagtctgtgcaatttagaaactcgataggaggcagcagctggtctcccaccaccctaaaaataatccgttccggcgcactgcgtgcttcgcctaggggaggaaaactgtcatcggagagttctgcgtccgggtttgaaatttacatcttaagacagtgtaggaagtcggtgttttgaaggtagctcaagtgcaccggcaggggtttgaagcagcgtgaagctattgcccaaggaaaagtattgtttgtgaccattgctaaatcaattatcaatgaaaggaaagaaagaaaagagtaaaccatataagaagaaatgagcctttcattttgtggtaacaacatttcttcatataatatcaacgatggtgtactacaaaattcctgctttgtggatgccctcaacctggtccctcatgtctttctgttgtttatcacttttccaatattgtttattgggtgggggagccaaagctcaaaagtacaaattcaccacaacacatggcttcattttccgggacataacctgagatggattcttacattcgctctcctgtttgtgcatgtctgtgaaatagcagaaggcattgtttcagactcgcggcgggaatcaaggcacctccacctctttatgccagccgtgatgggattcgttgccactacaacatcgatagtgtattatcataatatcgaaacatcaaattttcctaaattacttttaggttttagccatcatgagagtaaaagctgctatcaacattcttaagtattttgtggctatatgcatttatttctcctaggtaaatacctaagagtgaaatctctgggtcatacaataagtgggtaaatgttcatattttaagaaactgacatcttttcccaaaatgtttgtatcattttttatactcactaacaaggtgtaagagttccagttccacatgttcatcatttggtgatcttggtctaatttagtcatgctagtgggtgtgtactggtaatacattgcggttttaatttgcatttatctgattgctaattatgttgaacactctttgatgagtttattggccatttttaatctttgggatgtggctattcatatcttttgcccatgtttcattgggttgcacttttattattgcgttgtaggaatattttgtgcatactagatattagtatgtcatcagttacatgttttgataatgttttccttctagtctgtggcatacatattcatttatttaatagggtcttttaatgagcagaagattttaaatttcgatgtagtataatttatcatttcttctagtccttagttactgctttctgtgtcttaagacatctttgtcttccctctaaatatgtttccctcttattctcctgtttgcttttagatgctttatggtttccatttttatttttaggactacgattctttctaaattaattgtgtatatggtgtaagataggtgtcaaagttcttttttttttttttccaagtggatatcaatgtgttccagcaccatttgtgggatagactttctgtttctcaagagattgcattggcacttatgtaaaaaaaaataaatcaaatgactatttaaatttaa

SEQ ID NO: 110217 - DNA, 3531 bp, Homo sapiens
  Payload ID: 1629
  Gene Symbol: ABCC9
  Gene Name: ATP-binding cassette, sub-family C (CFTR/MRP), member 9
  ENST ID: ENST00000544039
  CDS Start-End: 1-3531
atttcagaaaccctctcatcaaaggaatttcttgaaaacgcttacgttctagcagttcttctcttcttggctcttattctgcaaaggacatttttgcaggcttcctactatgtaaccatagagactggcattaacctccgtggagctctgctggccatgatttataataaaatccttaggctctctacgtctaacttatccatgggggagatgactctggggcagatcaacaacttagtcgccattgaaactaatcaactcatgtggtttttgttcctgtgtcccaatctatgggctatgcctgttcagatcataatgggcgtgattctgctctataatttacttggatcaagtgcattggtcggtgcagctgtcattgtgctccttgcgccaattcagtactttattgctacaaagttggcagaggctcagaaaagtacacttgattattccactgagagactcaagaaaacaaatgaaatattgaaaggcatcaaacttctaaaattgtatgcctgggaacacattttctgcaaaagtgtggaggaaacaagaatgaaagaactatctagtctcaaaacctttgcactatatacatcactctccatcttcatgaatgcagcaattcccatagcagctgttcttgctacatttgtgacccatgcgtatgccagtggaaacaatctgaaacctgcagaggcctttgcttcactgtctctcttccatatcctggtcacaccactgttcctgctctccacggtggtcagatttgcagtcaaagccatcataagtgttcaaaagctgaatgagtttctcttgagtgatgagattggtgacgacagttggcgaactggtgaaagttcgcttccttttgagtcctgtaagaagcacactggagttgtcacaaatggatacttttcatggggcagtggtttagctacattatccaatatagatattcgaattccaacaggtcagttaaccatgattgtgggccaagtaggatgtgggaagtcctctcttctccttgccatcctcggtgagatgcagacattggaaggaaaagttcactggagcaatgtaaatgaatctgagccttcttttgaagcaaccagaagtaggaacaggtactctgtggcatatgcagctcaaaagccttggctattaaatgctacagtagaagaaaatattacttttggaagtccttttaacaaacagaggtacaaagctgtcacagatgcctgttctcttcagccagatattgacttattaccatttggagatcaaactgaaattggagagaggggcatcaacctgagtgggggacagaggcagagaatctgtgtggcacgagcgctgtatcaaaacaccaacattgtctttttggatgatccattctcagccctggacattcacttgagtgatcatttaatgcaggaggggattttgaaattcctgcaagatgacaaaaggacactcgttcttgtgactcacaaattacagtatctgacgcatgctgactggatcatagccatgaaagatggaagtgtcctaagagaaggaactttgaaggacattcaaaccaaagatgttgagctttatgaacactggaaaacacttatgaatcggcaagatcaagaattagaaaaggatatggaagctgaccaaactactttagagaggaaaactctccgacgggccatgtattcaagagaagccaaagcccagatggaggacgaagacgaagaggaagaagaggaggaagatgaggatgataacatgtccactgtaatgaggctcaggactaaaatgccatggaaaacctgctggcgctacctgacatctggaggattcttcctgctcatcctgatgattttctctaagcttttgaagcattcggtcattgtagctatagactattggctggccacatggacatcggagtacagtataaacaatactggaaaagctgatcagacctactatgtggctggctttagcatactctgtggagcaggcattttcctttgccttgttacatccctcactgtagaatggatgggtctcacagctgccaaaaatcttcaccacaaccttctcaataagataatccttggaccaataaggttttttgataccacacccctgggactgattctcaatcgcttttcagctgatactaatatcattgatcagcacatccctccaaccttggaatctctaactcgctcaacactgctctgcctgtctgccattgggatgatttcttatgctactcctgtgttcctggttgctctcctgccccttggtgttgccttttattttatccagaaatactttcgggttgcctctaaggacctccaggaacttgacgatagtacccagctccctctgctctgtcacttctcagaaacagcagaaggactcaccaccattcgggcctttaggcatgaaaccagatttaaacaacgtatgctggaactgacggatacaaacaacattgcctacttatttctctcagctgccaacagatggctggaggtcaggacggattatctgggagcttgcattgtcctcactgcatctatagcatccattagtgggtcttcgaattctggattggtaggcttgggtcttctgtatgcacttacgataaccaattatttgaattgggttgtgaggaacttggctgacctggaggtccagatgggtgcagtgaagaaggtgaacagtttcctgactatggagtcagagaactatgaaggcacaatggatccttctcaagttccagaacattggccacaagaaggggagatcaagatacatgatctgtgtgtcagatatgaaaataatctgaaacctgttcttaagcacgtcaaggcttacatcaaacctggacaaaaggtgggcatatgtggtcgcactggcagtgggaaatcatcgttatctctggctttcttcagaatggttgatatatttgatggaaaaattgtcattgatgggatagacatttccaaattaccactgcacacactacgttctagactttcaatcattctgcaggatccaatactattcagtggttccattagatttaatttagatccagagtgcaaatgcacagatgacagactctgggaagccttagaaattgctcagctgaagaatatggtcaaatctctacctggaggtctagatgcggttgtcactgaaggtggggagaattttagcgttggacagagacagctattttgccttgccagggcctttgtccgcaaaagcagcattcttattatggatgaggcaacagcttccattgacatggccacagagaatattttgcaaaaagtagtaatgacagcctttgcagaccggaccgtggtgacaatagctcaccgtgtctcttctattatggatgcaggccttgttttagtcttttctgagggtattttagtggagtgtgatactgtcccaaatttgctcgcccacaagaatggcctcttttccactttggtgatgaccaacaagtag

SEQ ID NO: 110218 - DNA, 2672 bp, Homo sapiens
  Payload ID: 1629
  Gene Symbol: ABCC9
  Gene Name: ATP-binding cassette, sub-family C (CFTR/MRP), member 9
  ENST ID: ENST00000538350
  CDS Start-End: 171-683
gtgcttcgcctaggggaggaaaactgtcatcggagagttctgcgtccgggtttgaaatttacatcttaagacagtgtaggaagtcggtgttttgaaggtagctcaagtgcaccggcaggggtttgaagcagcgtgaagctattgcccaagagtaaaccatataagaagaaatgagcctttcattttgtggtaacaacatttcttcatataatatcaacgatggtgtactacaaaattcctgctttgtggatgccctcaacctggtccctcatgtctttctgttgtttatcacttttccaatattgtttattgggtgggggagccaaagctcaaaagtacaaattcaccacaacacatggcttcattttccgggacataacctgagatggattcttacattcgctctcctgtttgtgcatgtctgtgaaatagcagaaggcattgtttcagactcgcggcgggaatcaaggcacctccacctctttatgccagccgtgatgggattcgttgccactacaacatcgatagtgtattatcataatatcgaaacatcaaattttcctaaattacttttagttccaggtgtttctgtctctggcttggagtccaaggacattttcccaaggttcaagcctttcactgatgctgtgggaatgccacattttactagaattactatgtagcagagtatgtttctagcataatgaaaagtatgctgtcctgaggagcagctgccattacatcacggcctttcgcacctgcattgtgactaaaattgttttattagcctctcttgcttccttgttctgtggaaatcagaggctctctaaaatattcctaattttatttttgccttgggtcaaaattatataacgcatctatatgagttatgttcaatactctgacccatcactgtattccttggagtatactttctttcttaaagagataaaggtatggaacaagaatcacagatgggctatgaacctcctgaaattgtagttcgaattatgtgtttgtgtgaatgatgcttactgtttctgattttatttgattgttgtataatgaaaatgatgttggctaatgatatagaaattaggagaagaaatattgaaaacacacacacagtattttattcatttgtccagaggacatgaaaatttaaaatggatgcatgaaagatattgattatttaattatatgttgtgtcacattatatgattgttaaaggcaatctaataaaaaaggtagagagggttaaatattaatttaaaaggctgtcacattttgaattatcttaatagaaaggtcttttgtgcaaaatgagaggcagacattattgcagaaaatgccaaaaaaagagaaagaaatttccaacaagtagctgcaaaaaaatatgtgaaattgagaatttaataagctaaatatctatttttgaaaagttgatggtaaaaagaaaggttataactagaaaggaatttagatattaataatgttttgatggaaatgcaatcagaagaggcctattattgttatttaggtgcaagacagcacaatttgatcatattgctggaaggacatggagataaaatataatatttcttgttattttaacagagaaaaatttggacctaggaaagttactcattttaagaccacaaagatagtaattttgtctcaacatttcattatgaaaatcaccaaatgtacagaaagttgaaagaatcatgtgaattcccacttacccaacatctgaattcttcaaattacattttttctgtttgttttatcacatatctacatcttttcatccttctattcatacctctctccatcttagttttgatgcattttaaggtaagttgtagacattagtatactttacctctgaacgcttcatgcgtatctttttgtgagacaaaatttatatacatgaaacacagcgatcttaatttgctaaatgcatgtacctatataacactatcatgacataactatcatccatgcaaattttcttatactcaatttcacctttacagaagcaatatctgttctgatttttacccccaccatggattaggtttgcctgttctagaacttcatgtaaattgaatgacacagtatagacttttaagtaaggcttctttttctaagcatgattttttgatgctcatccgtaatgtagcatagatcaatattttcttattgttgcatttcattgtataactatatcatagttttttcaatcccttgttaatagacatctgtactatttccaggttttagccatcatgagagtaaaagctgctatcaacattcttaagtattttgtggctatatgcatttatttctcctaggtaaatacctaagagtgaaatctctgggtcatacaataagtgggtaaatgttcatattttaagaaactgacatcttttcccaaaatgtttgtatcattttttatactcactaacaaggtgtaagagttccagttccacatgttcatcatttggtgatcttggtctaatttagtcatgctagtgggtgtgtactggtaatacattgcggttttaatttgcatttatctgattgctaattatgttgaacactctttgatgagtttattggccatttttaatctttgggatgtggctattcatatcttttgcccatgt

SEQ ID NO: 110219 - DNA, 450 bp, Homo sapiens
  Payload ID: 1629
  Gene Symbol: ABCC9
  Gene Name: ATP-binding cassette, sub-family C (CFTR/MRP), member 9
  ENST ID: ENST00000621589
  CDS Start-End: 1-450
atgagcctttcattttgtggtaacaacatttcttcatataatatcaacgatggtgtactacaaaattcctgctttgtggatgccctcaacctggtccctcatgtctttctgttgtttatcacttttccaatattgtttattgggtgggggagccaaagctcaaaagtacaaattcaccacaacacatggcttcattttccgggacataacctgagatggattcttacattcgctctcctgtttgtgcatgtctgtgaaatagcagaaggcattgtttcagactcgcggcgggaatcaaggcacctccacctctttatgccagccgtgatgggattcgttgccactacaacatcgatagtgtattatcataatatcgaaacatcaaattttcctaaattacttttaggttttagccatcatgagagtaaaagctgctatcaacattcttaa

SEQ ID NO: 110220 - DNA, 3664 bp, Homo sapiens
  Payload ID: 1630
  Gene Symbol: ABCD1
  Gene Name: ATP-binding cassette, sub-family D (ALD), member 1
  Uniprot ID: P33897
  ENST ID: ENST00000218104
  CDS Start-End: 400-2637
gccaggctgcggagcggacggacgcgcctggtgccccggggaggggcgccaccgggggaggaggaggaggagaaggtggagaggaagagacgccccctctgcccgagacctctcaaggccctgacctcaggggccagggcactgacaggacaggagagccaagttcctccacttgggctgcccgaagaggccgcgaccctggagggccctgagcccaccgcaccaggggccccagcaccaccccgggggcctaaagcgacagtctcaggggccatcgcaaggtttccagttgcctagacaacaggcccagggtcagagcaacaatccttccagccacctgcctcaactgctgccccaggcaccagccccagtccctacgcggcagccagcccaggtgacatgccggtgctctccaggccccggccctggcgggggaacacgctgaagcgcacggccgtgctcctggccctcgcggcctatggagcccacaaagtctaccccttggtgcgccagtgcctggccccggccaggggtcttcaggcgcccgccggggagcccacgcaggaggcctccggggtcgcggcggccaaagctggcatgaaccgggtattcctgcagcggctcctgtggctcctgcggctgctgttcccccgggtcctgtgccgggagacggggctgctggccctgcactcggccgccttggtgagccgcaccttcctgtcggtgtatgtggcccgcctggacggaaggctggcccgctgcatcgtccgcaaggacccgcgggcttttggctggcagctgctgcagtggctcctcatcgccctccctgctaccttcgtcaacagtgccatccgttacctggagggccaactggccctgtcgttccgcagccgtctggtggcccacgcctaccgcctctacttctcccagcagacctactaccgggtcagcaacatggacgggcggcttcgcaaccctgaccagtctctgacggaggacgtggtggcctttgcggcctctgtggcccacctctactccaacctgaccaagccactcctggacgtggctgtgacttcctacaccctgcttcgggcggcccgctcccgtggagccggcacagcctggccctcggccatcgccggcctcgtggtgttcctcacggccaacgtgctgcgggccttctcgcccaagttcggggagctggtggcagaggaggcgcggcggaagggggagctgcgctacatgcactcgcgtgtggtggccaactcggaggagatcgccttctatgggggccatgaggtggagctggccctgctacagcgctcctaccaggacctggcctcgcagatcaacctcatccttctggaacgcctgtggtatgttatgctggagcagttcctcatgaagtatgtgtggagcgcctcgggcctgctcatggtggctgtccccatcatcactgccactggctactcagagtcagatgcagaggccgtgaagaaggcagccttggaaaagaaggaggaggagctggtgagcgagcgcacagaagccttcactattgcccgcaacctcctgacagcggctgcagatgccattgagcggatcatgtcgtcgtacaaggaggtgacggagctggctggctacacagcccgggtgcacgagatgttccaggtatttgaagatgttcagcgctgtcacttcaagaggcccagggagctagaggacgctcaggcggggtctgggaccataggccggtctggtgtccgtgtggagggccccctgaagatccgaggccaggtggtggatgtggaacaggggatcatctgcgagaacatccccatcgtcacgccctcaggagaggtggtggtggccagcctcaacatcagggtggaggaaggcatgcatctgctcatcacaggccccaatggctgcggcaagagctccctgttccggatcctgggtgggctctggcccacgtacggtggtgtgctctacaagcccccaccccagcgcatgttctacatcccgcagaggccctacatgtctgtgggctccctgcgtgaccaggtgatctacccggactcagtggaggacatgcaaaggaagggctactcggagcaggacctggaagccatcctggacgtcgtgcacctgcaccacatcctgcagcgggagggaggttgggaggctatgtgtgactggaaggacgtcctgtcgggtggcgagaagcagagaatcggcatggcccgcatgttctaccacaggcccaagtacgccctcctggatgaatgcaccagcgccgtgagcatcgacgtggaaggcaagatcttccaggcggccaaggacgcgggcattgccctgctctccatcacccaccggccctccctgtggaaataccacacacacttgctacagttcgatggggagggcggctggaagttcgagaagctggactcagctgcccgcctgagcctgacggaggagaagcagcggctggagcagcagctggcgggcattcccaagatgcagcggcgcctccaggagctctgccagatcctgggcgaggccgtggccccagcgcatgtgccggcacctagcccgcaaggccctggtggcctccagggtgcctccacctgacacaaccgtccccggcccctgccccgcccccaagctcggatcacatgaaggagacagcagcacccacccatgcacgcaccccgcccctgcatgcctggcccctcctcctagaaaacccttcccgccctcgggaaagtagatgtggagggtggcgccctgcgtaaccctcgccctgtccctcccactccctgggggcgctgttccacagtgactgggccctgtccagggcagtgagtcctctactttgctccgtggaggaagctggggtacaaggggcccagtgctggccacacagcagcgcagccgagccccaggagcccgtcaggccacagcccctggcactgcaggtggcctccctccagagactcgagtccccatgattccctcctcgtcagtctctcaaagaccccatggtccatcccctgagggtggtcagccaaggctcccgttccgtgggatgccataaaagccgcccagtgggacccacagtcacacagagcgcctcacctgcatcctctcccccacaagagccccaaagatcccacgggagaggggagagggacgcacagcactgcctgccaagcgagaatgcaggccccgccccctcggcccctcaccacctctttctacagcctaatttattggattccctattcgtagccatctccgtggccaatgtgactaccgtgccagcagcgggggcggcccagcctctgagtcccgtggggccccggctcccaccggtgccaaacccagcccctgcggccgtcaccccgccagcctacactgccagccgccaccggggcacacgggcctctgcttgccagccaggagtgcggacaccatgttcccagctcagtgccaaagaggggtcaccagggggagctgtctgcggagccagcgcctgcccgagagagaccccaccgccaccgtgtgcctttcccgggccctcagccctcgggccgggcaccacccccagtccccccagtaaaagcctccactggcaaatgcagtccttcctccctgc

SEQ ID NO: 110221 - DNA, 1016 bp, Homo sapiens
  Payload ID: 1630
  Gene Symbol: ABCD1
  Gene Name: ATP-binding cassette, sub-family D (ALD), member 1
  ENST ID: ENST00000370129
  CDS Start-End: 6-689
gcaacatggacgggcggcttcgcaaccctgaccagtctctgacggaggacgtggtggcctttgcggcctctgtggcccacctctactccaacctgaccaagccactcctggacgtggctgtgacttcctacaccctgcttcgggcggcccgctcccgtggagccggcacagcctggccctcggccatcgccggcctcgtggtgttcctcacggccaacgtgctgcgggccttctcgcccaagttcggggagctggtggcagaggaggcgcggcggaagggggagctgcgctacatgcactcgcgtgtggtggccaactcggaggagatcgccttctatgggggccatgaggtggagctggccctgctacagcgctcctaccaggacctggcctcgcagatcaacctcatccttctggaacgcctgtggtatgttatgctggagcagttcctcatgaagtatgtgtggagcgcctcgggcctgctcatggtggctgtccccatcatcactgccactggctactcagagtcaggtgagacccagggctccaagaggatccaggccaggggcctgtcccccataccgctgggtgctgagctcacgagggcccaactcagccagcccgccgcccacttctgctgccggggccaccgaggccctgctgccagccttgatgctttcagaggttgagctcgccttgcccctccttgttgccttttgccctgcgcgcacctcacgccctttgttaccactcagacaagcccaggactgcaagtcaggaacactacatgtcacttctccaggcacagataccctcacccacctgtccctgtcctcaacccaactgcgacttagaggtgggagaatgtgcggagtacctggagtgagccccttcatcactccagccttggtttcctcgccctgaaacagctcttgcaccctaaggtgttttagaggagtgggaagcctgttctacctgttattttagtgataagattaaatgtttaggtttctgca

SEQ ID NO: 110222 - DNA, 6238 bp, Homo sapiens
  Payload ID: 1631
  Gene Symbol: ABCD2
  Gene Name: ATP-binding cassette, sub-family D (ALD), member 2
  Uniprot ID: Q9UBJ2
  ENST ID: ENST00000308666
  CDS Start-End: 137-2359
aaaacacaacagtggaagagaaacgctgcagactatgggacgctgtaggactttctaaaacatttgctggggatttctgtgaagcatgatcttttaaaacgaattcttttggaagccggtttgggtaactgggaaaatgacacatatgctaaatgcagcagctgatcgagtgaaatggaccagatcgagtgctgctaagagggctgcctgcctggtggctgcggcatatgctctgaaaaccctctatcccatcattggcaagcgtttaaagcaatctggccacgggaagaaaaaagcagcagcttaccctgctgcagagaacacagaaatactgcattgcaccgagaccatttgtgaaaaaccttcgcctggagtgaatgcagatttcttcaaacagctactagaacttcggaaaattttgtttccaaaacttgtgaccactgaaacagggtggctctgcctgcactcagtggctctaatctcaagaacctttctttctatctatgtggctggtctggatggaaaaatcgtgaaaagcattgtggaaaagaagcctcggactttcatcatcaaattaatcaagtggcttatgattgccatccctgctaccttcgtcaacagtgcaataaggtacctggaatgcaaattggctttggccttcagaactcgcctagtagaccacgcctatgaaacctattttacaaatcagacttattataaagtgatcaatatggatgggaggctggcaaaccctgaccaatctcttacggaggatattatgatgttctcccaatctgtggctcacttgtattccaatctgaccaaacctattttagatgtaatgctgacctcctatacactcattcaaactgctacatccagaggagcaagcccaattgggcccaccctactagcaggacttgtggtgtatgccactgctaaagtgttaaaagcctgttctcccaaatttggcaaactggtggcagaggaagcacatagaaaaggctatttgcggtatgtgcactcgagaattatagccaatgtagaagaaattgccttttacagaggacataaggtagaaatgaaacaacttcagaaaagttacaaagctttagcagatcagatgaacctcattttatccaaacgtttgtggtacatcatgatagaacagttcctgatgaagtatgtttggagcagcagtggactaattatggtggctatacctattatcactgcaactggctttgcagatggtgaggatggccaaaagcaagttatggttagtgaacggacagaagcctttaccactgctcgaaatttactggcctctggagctgatgctattgaaaggattatgtcttcatacaaagaggtcactgaattagcaggctacactgctcgagtgtacaatatgttttgggtctttgatgaagtaaaaagaggcatttataagagaactgctgtcattcaagaatctgaaagccatagcaagaatggagctaaggtagaattacctctcagtgacacattggcaattaaaggaaaagttattgatgtggatcacggaattatttgtgaaaatgttcccataattacaccagcaggagaagtggtggcttccaggctaaacttcaaagtagaagaaggaatgcatcttttgataactggtcccaatggttgtgggaaaagttctctcttcagaattctaagtgggctctggcctgtgtatgaaggagtcctctataaaccacctcctcaacatatgttttatattccacaaaggccatatatgtctcttggaagtcttcgggatcaagtcatttaccctgattcagtggatgatatgcatgataaaggttatacagaccaagatctggaacgtatcctacacaatgtccatctctatcacatagttcaaagagaaggaggatgggatgctgttatggactggaaagatgtcctgtcaggaggggaaaagcaaagaatgggcatggctcgtatgttttatcataaaccaaaatatgccttgctggatgaatgtaccagtgctgtcagcattgatgtcgaaggaaagatatttcaggctgcaaaaggggctggaatttccttactgtctataacacacagaccttctctttggaaataccacacacatttattacagtttgatggtgaaggaggttggcgctttgaacaattggatactgctatccgtttgacattgagtgaagaaaaacaaaagctagaatctcagctagctggaattcccaaaatgcagcagagactcaatgaactatgtaaaattttgggagaagactcagtgctgaaaacaattaaaaatgaagatgagacatcttaatttgttttgacatattttaaaagttaattattagataaaggctcaaagacattctgttatactgcatgaagtatgttaagctaagcacagagaaaaaaaggcagcaagacatgttttataagattttagcattaaggaagtatatgatctgacttttcagaagaaaataaacaaatgcattatgtaaggtcagtcattatgacttatactaattcctagtgaaggcctaatgcacttgtaaaacaggattttctaggtgaattcatgatgaataccagatttactatgtatatgtggtgtgtctgaagttcttaacaaacatgggcaatattctggaaatgaaacaagttaaactgagcagcatttgggttgataccaagtgcataagattcaaactttgagtgacatttagtccatttatggttgatattaggtttaatagctagaattcaaattgattattgctagtggccaactaaacctgtacaaaatagctgacagttttataaataatttcaatataaaaattgttttaatggcatttgttgaaagaaaaaagcatggctaaaatgtataaaatgccatatttttaaattttggactttaagcatcttaatgagggcatataacaaattaattttagtacaaatcttaaatatttttaataaatcctttcattttaaaaagagaattgccaatacagaaaaggagtatccaaacaatgtctcaacctgataatttccttagcagaattacctattgcaacttctgttcagaaatacacagcttgtttttttgcccaaggatgagtctacattttaagaactgcaatggtataaaggaacttaaggattctgagaatcatagtaataacatacattggaatagtactttataatttacaatccccatttacatcatttcaccttaatgttgatgacaatgttttgaaacaaatactatttttcctactttgcttttgagaaaattgacactcagacttgccctaatcatgcactttacttaaggaaagatcgagaaatcaaatgaagttctcctgactctctggtttagtgctcttttgttattatcctttaaatcaaactgggctataatagcaataaaagttagacgaagtgtagaaaataaaataaatttcataatgttagtcttattgttatttggttattgtttacaagaaatgaaaattaagtacaaagtgcaaagatcattgttctgcggcttaaaatgaaatgagaaagttagtaaatcattcagcaactatgcagtcttactcaatattaatgtacctctaaggcattagcaatgagaagggcaaataattatggttttggtaaagttaatatttattgaacataatgagaaataatctatatggactagtcatatgaaatagattttattctatttgtgtgcactggagctggaaagccaagactgaaactttatctcttgctgcctgtgataccacattgacataccagaagaatattggaatgatcagttgttagtggcctaggattttatttgcctgttgagacacagccataatagatgttaagtctgtgattcttagacttttcaggtgatagagtacctggaagtcattcataatgatcgttatagaacatcataacatttctacattttcaattctgccatgatagctagtgtatttttaattttcaataaatgtaaccaacttacatgaaggaatgcaatataaaattataatcagtacatttgtccaacgttttcattagtattatcacctacttattcatcagttactaatatttcctgttagaaaagtgaggcaggaattaaagatttttttttaagaagcatggaaccaaaacttaaacttgctaaaaattattcattaatcttttctacataagtgattatccagtttatactgctacaagggcaaaagtctgaggcaagtgttttaagttaacttttaaaggtacaagaagaaaatgaaaaatcctcatgtgaaagatgtgtataattttcatgccttaattttcataatataaaaataaaacataattttaaaacaacctgataattttgttttgaaacattgaaaagaatgccaaaacaaatattagatttgtaattagtcagtatttaatatattttacccatgagctaaagcaaaaaagactcattatttatgatgcacaggattcaaagatgcctaaaattctgtattaaaaactatgtacactgtaatttaaatgttaaagttctaatatgcacatgttttccatgagctttttgtgcctatttgttttctgaatttatttttcaggaccaacatccttaacttggaagggaaaacatctctgatttgaacttgtatttatgtaccattcaattgtttccaaatggtccaatgggtataccatattttactactcttatattttacggaaaacatgaaaaagactgagaaactagccatttttgaatacagcaagggatagatgaggaaaggaaaaaagaaagaatatttcaagtttcaaactacttttaccatgttatatctatttgcccaaacgtttgacatatttttggtcaaacaaaaagctataagtttatggagcttgagtttaaaatgtgcattctttaggttaactcttaaacttgaaaaataagttggattctatgaaaacgttgcattatatttctacagcatgtaatgttatgccaagcatgagtctaaaacagtttgtgttcttgtaagcaggataatgtgtaataatccctctgaaataatctcaagaagaatgatataccttaaaactcaactcaaatttacatttgtttacagtgggaatggttttctcttgatagaaatttggtttttgtctcaagttttggtctgtcagtaaaggcataaatgaatatcctagtttttatttgaaacattggttccaagtatagtttcatatttggcaatagattcatcttattctaatatgtttggaatagctttttgattcaatgagtctaggaaaatctgttacacattgaaacccaagtccagagaatgttacacacttctaatatatgcataaaatgatggtaaaggttattaaatcattgatttaaaaagatgactttgatataattactttatgggcaaaattgtcctcatttagaagtgaaaagtactttcacatagcctaggctatttacagttctgattatatacatttagatatgttgaatatgttttggggttgaatatgttttgccacatgagcgccttcaggtggatgtataaaatatttttttaaaaaccaatttcttcttcattgttgatgcttttcctgactaccaagttcagggctggtttacatttcatattgtgaaattttcaaaaccaatggtctatttataagccagaattgtattaatgaaaatgaatgagaaaaatgtccttaaaggtaaaaatcattatgtagctaaatgaaattgtggctgtgtgtgagtacattataatataatttccatctgatgtgtatttacttgaactcatcattccttatgaattccttaaccattaagaaaaagactagattaatcaaaggaattacaaattattccatttttacaaaataccctgtttctatactgcaaatggccatgttgggtatatgtctatatacgccttacttagacattgtattgtatataaccgtgtgtagaactatagacaatagtcaccaaatagttatttaaatattaattttctttattaatacaacacatttaataagtatctacctatgccaggcactgtgctaagttctattactaaataaaatttggtccctgtccgaa

SEQ ID NO: 110223 - DNA, 884 bp, Homo sapiens
  Payload ID: 1632
  Gene Symbol: ABCD3
  Gene Name: ATP-binding cassette, sub-family D (ALD), member 3
  Uniprot ID: P28288
  ENST ID: ENST00000315713
  CDS Start-End: 1-711
atggcggccttcagcaagtacttgacggcgcgaaactcctcgctggctggtgccgcgttcctgctgctctgcctgctccacaagcggcgccgcgccctcggcctgcacggtaagaaaagtggaaaaccaccattacagaacaatgagaaagaggggaaaaaggagcgagctgtggtggacaaggtgtttttctcaaggctcatacagattctgaaaatcatggtccctagaacattttgtaaagagacaggttacttggtacttattgctgttatgctggtgtctcgaacatattgtgatgtttggatgattcaaaatgggacactaattgaaagtggtatcattggtcgtagcaggaaagatttcaagagatacttactcaacttcatcgctgccatgcctcttatctctctggttaataacttcttgaagtatgggttaaatgagcttaaactgtgcttccgagtaaggctcactaaatacctctatgaggagtatcttcaagctttcacatattataaaatggggaatctggacaacagaatagctaatccagaccagctgcttacacaagatgtagaaaaattttgtaacagtgtagtcgatctgtattcaaatcttagtaagccatttttagacatagttttgtatatctttaagttaacgagtgcaattggagctcaggtacttggaaaaattttgtggcattaaaaaccagacaaatgtattggccaggcgtggtggctcatgcctgtaatcccagcactttgggaggctgagatgggaggatcgcttgaatccaggagttcgagacaagcctggacaaaaagcgagacccgcttctttaaaaaataataataaaacagaagttcttaaaccatgaa

SEQ ID NO: 110224 - DNA, 3538 bp, Homo sapiens
  Payload ID: 1632
  Gene Symbol: ABCD3
  Gene Name: ATP-binding cassette, sub-family D (ALD), member 3
  Uniprot ID: P28288
  ENST ID: ENST00000370214
  CDS Start-End: 25-2004
cggctcgctggtaccggcagtgccatggcggccttcagcaagtacttgacggcgcgaaactcctcgctggctggtgccgcgttcctgctgctctgcctgctccacaagcggcgccgcgccctcggcctgcacggtaagaaaagtggaaaaccaccattacagaacaatgagaaagaggggaaaaaggagcgagctgtggtggacaaggtgtttttctcaaggctcatacagattctgaaaatcatggtccctagaacattttgtaaagagacaggttacttggtacttattgctgttatgctggtgtctcgaacatattgtgatgtttggatgattcaaaatgggacactaattgaaagtggtatcattggtcgtagcaggaaagatttcaagagatacttactcaacttcatcgctgccatgcctcttatctctctggttaataacttcttgaagtatgggttaaatgagcttaaactgtgcttccgagtaaggctcactaaatacctctatgaggagtatcttcaagctttcacatattataaaatggggaatctggacaacagaatagctaatccagaccagctgcttacacaagatgtagaaaaattttgtaacagtgtagtcgatctgtattcaaatcttagtaagccatttttagacatagttttgtatatctttaagttaacgagtgcaattggagctcagggcccagcgagcatgatggcctacttggttgtttctgggctattcctaactcgacttcgaagacccattggtaagatgacaataactgagcaaaagtatgaaggagaatatagatatgttaattctcggctcatcacaaacagtgaagaaattgccttttacaatgggaataaaagagaaaagcagacagtccactcagtcttccgaaaactggtggaacacctacataatttcattttgtttcggttttcaatgggcttcattgatagtattattgccaaataccttgccactgttgttggttacctagttgtcagtcgccctttcttagatttgtctcatcctcgacatctcaagagtacacattcggaacttctagaggattactaccaaagtggaagaatgcttttgcgaatgtctcaagctctgggtcgaatagttttggctgggcgtgaaatgactagattggccggttttactgctcggattacagaattaatgcaagtactgaaggatttaaatcatggcaaatatgagcgcacaatggtctcacaacaggaaaagggtattgaaggagtacaagtcattcccttgatacctggtgctggagaaatcattattgcagataacattataaagtttgatcatgttcctttagcaacgccaaatggagatgttttgatccgagaccttaattttgaagttcgatctggggctaatgttctaatttgtggtccaaatggctgcggaaagagttcacttttccgtgttcttggtgaattatggcctctttttggaggacgtctaactaaacctgaaagaggaaaattattttatgttcctcagagaccttacatgacccttggaacacttcgagatcaagtgatatatccagatggacgagaagatcagaaaaggaagggaatttctgacctagtactgaaggaatacttagacaatgtccagttgggtcatatccttgaacgtgaaggaggctgggacagtgttcaggattggatggacgtactcagtggtggagaaaagcaaagaatggcgatggcaagattattttatcataaaccccagtttgccattttggatgaatgcacaagtgcagttagtgtcgacgtggaaggctacatttatagtcattgtcgaaaggttggcatcactctcttcactgtgtctcataggaaatctctttggaaacatcatgagtactacctgcatatggatggcagaggcaactatgaattcaaacagataacagaagatacagttgagtttggctcttagagaaatctggagaactatacctgcttcagtgaaataattacagaatatacttagaaaggcaaagtacattgtaaaataaagttgagcttagttttttttaaaaaaaaaaacaaagcaacaaattaactagatacagaataatggagaacaagttgttaaaacatttaatattatataggatattgctaattgtgtatatgttggtttaattaataatatgtactaagaatgtccttattcttgtggttaaaaacctgcctaaattaaattgggcttcaatcactgtaacctgattcatcctgggatgtaaaccattcgaagtcagctaattggacttttatggctctatcttttccttcagtgaagaaccctatttaaaactgggtcatcatttgtcctgttctagcaagatagtcttcagtttcattttcctgtgccctgtggtagttggaaacaaatcataatgtattatttaaatgtttaacatcattgcataacagcgtttattatacagtggcagatttctttagctgccacagtaatactcattccttgtgtgtgtcttggagtgcatttgactccaggaaaagccattttggttttccttaactaaatgataaatgtacccctctcagtctgcagtattgagttgtttaaagtatatgtgcagtcttgcttacaaggaggggttaccatgtatcacacctaatcttcccaatgtttgggatattaaaacacaaagtccttaacatgccaggctcaaggtcttataagagttctagatttttaagagaattagacaaatttgtgtgtgttagaagcccattcattagaagtgtggtggttatttggtattaaactccaaatgagccataggaaggcactacatgaaataatgcactgagtatgcaatgctatcactgtctttgactgtgattttatgtttaaaaagtatgttctaaaattattatatatacatgggtgaattatgtttccgaggcactgttttatctctgtgaatcttgaataacttttttatatttgggttatgatgtcaaacgatcctaagcgaagatgatttcagttcatcaaatcatcattaatgactttatgtattatttgcacagggagaattgaaactgagtataatcaataagctagatacgaaatcagtttctcaaactgagcttcagaaaggggcattttgtactcttgtttttgcataactggttttgtttttttgcagaattaactataacaatcactggctaccgaagtaaactgatgtactgaattccataatacataacattcaatttttaccacttctgtttagcgaacttgtatacttattttctgttcagattaaaaaaaaaaaaaaaaaactcagatatcctatacaacctttgcttgttctttttattctggtatctaaatactgagaagttcatttataattcagccttgacttgaaaacatagatagtttaatcttgacttgaaaaacacaaaaataaattcagaaaatgctttta

SEQ ID NO: 110225 - DNA, 3003 bp, Homo sapiens
  Payload ID: 1633
  Gene Symbol: ABCD4
  Gene Name: ATP-binding cassette, sub-family D (ALD), member 4
  Uniprot ID: O14678
  ENST ID: ENST00000356924
  CDS Start-End: 145-1965
cgcttccgggagagtccgcgtctcccgcaccttcctctctatcaaacgccgtctctgtggtagccggggccccgcccctcctcggactctacccagtactgaactaggggcagctgggctccagagtccctcgggtctcaggtcatggcggtcgcggggcccgcgcccggagctggcgccaggcccaggttagatctgcaatttctccagcggttcctgcagatactgaaggttttgtttccttcttggtcatcacaaaatgccttgatgttcctgacccttttgtgcctgaccctactggagcaatttgtgatctaccaggttggcttgatccccagtcagtactatggggtcctgggaaacaaagacttggaagggtttaagactctgacattcctggctgtcatgctcattgttctgaactccacgctgaagagctttgatcagttcacctgcaacctgctgtatgtgagctggaggaaggacctcactgagcaccttcaccgcctctacttccggggccgtgcgtactacaccctcaacgtgctgcgggatgacatcgataacccggaccagcgcatcagccaggacgtggagcgattctgccggcagctcagcagcatggccagcaagctcatcatctccccgttcaccctcgtctactacacttaccagtgcttccaaagcacaggctggctcgggcctgtgagcatcttcgggtatttcatcctggggaccgtggtgaacaaaactttgatgggccccattgtgatgaagctggtgcatcaggagaagctggagggagattttaggttcaagcacatgcagattcgggtgaatgcggagcctgctgctttctacagagctgggcatgtggagcacatgaggacagaccgcaggctgcagagactccttcagacccagagggagctgatgtccaaggagctctggctgtacatcggcatcaacacctttgactatctgggcagcatcctgagttacgttgtcatcgcaatccccattttcagcggggtctatggagacctgagtcccgcagagcttagcaccctggtcagcaagaatgcctttgtgtgcatctacctcatcagctgcttcacccagctcatcgacctgtccacgacgctctcagatgtggctggctacacgcacagaattgggcagcttcgggagacgcttctggacatgtccctgaagtcacaggactgcgagatcctgggcgagagcgagtggggcttggacacacccccagggtggccagcggcagagccagcagacacagcatttctccttgagcgggtctccatctctgccccctcctctgacaaacccctaatcaaggatctgagcctaaagatctccgagggacagagcctgctcatcacaggcaacacgggcactggcaagacctccttgctccgggttctgggtggcctctggacgagtacacggggctcagtgcagatgctgacggactttgggccccatggggtgctattcctgccacaaaagccattcttcactgacgggacccttcgggagcaggtgatatatcccctgaaggaggtctaccccgactcaggttctgccgatgatgagaggatcttgaggttcttggaattggcaggcctgtccaacttggtggcaaggacagagggcctggaccagcaggtggactggaactggtatgatgttctgtccccgggggagatgcaacggctctcctttgcccgactcttctacctgcagccgaagtacgcagtgcttgatgaagccaccagtgccctgacagaggaagtggagagcgagctctatcgcatcggccagcagctggggatgacgttcatcagtgtgggacatcggcagagccttgagaagtttcattccttggttctgaaactctgtggaggaggaagatgggagctgatgagaatcaaagtggaatgaagctctggcttttggaaggagagccacactgtggcgggtcggcggccctcaggagagaccaggaggactgacagcgaagatcgagctcaggttcgccacatagatcccgtgcaggagccacatgggtcctgtgcaggacccctagcagtggtgggctgagcccaggtctaggtttctgtgggggacactgaatctcccagtgttcagtctcccaggactctgctgcctcagccagagcctccatatgcttgaagtgctgattacctacaaatgatttcagatcatgtttgctaaagagaaatctggaagtgtgagatctgtaagaaatgaaagaaatgactcttggagtcaagagatctggaaatcttttaatcagttaaattgtgcagcaatagatttttaactttaactgaccatttaagttttttaataagttttttacaaagaaaagttaaacattaaaaagaattacagctttctgtcttctctatcatggaatgatcttttttattgaatctccagatttgtatttgacagcttggtgggaagggaagcacactctgctgttctggaatcttatgcccagggtttttcacttctccccacatctccctttccacttgccagtgttgtgtagttagaacctgaaccactaacttccaggggcctttggtctgccctaccttaacccaaatgaaagtaaatccctttccccttagccaaaataaggttgggttttctaaaaaaatagtctatattagggaacaacaacagcaaattagacaaaacccagaaagcacaaagcatgaggtggagttactgtgcccaaagtcctcactcagaccagtgcccctccagttcagttgtctatgtattaccttccttaccttcataatttttgccaggcttctgtacttctagtacttgagttacttaatatttttaaaaacaaaccttttaagtttaaatggatttttaagtgaaattttacacttaacatagatggaaagtaactaaaaataaatacaagaaaaacca

SEQ ID NO: 110226 - DNA, 794 bp, Homo sapiens
  Payload ID: 1633
  Gene Symbol: ABCD4
  Gene Name: ATP-binding cassette, sub-family D (ALD), member 4
  ENST ID: ENST00000474270
  CDS Start-End: 1-520
cgttgtcatcgcaatccccattttcagcggggtctatggagacctgagtcccgcagagcttagcaccctggtcagcaagaatgcctttgtgtgcatctacctcatcagctgcttcacccagctcatcgacctgtccacgacgctctcagatgtggctggctacacgcacagaattgggcagcttcgggagacgcttctggacatgtccctgaagtcacaggactgcgagatcctgggcgagagcgagtggggcttggacacacccccagggtggccagcggcagagccagcagacacagcatttctccttgagcgggtctccatctctgccccctcctctgacaaacccctaatcaaggatctgagcctaaagatctccgagggacagagcctgctcatcacaggcaacacgggcactggcaagacctccttgctccgggttctgggtggcctctggacgagtacacggggtgatatatcccctgaaggaggtctaccccgactcaggttctgccgatgatgagaggatcttgaggttcttggaattggcaggcctgtccaacttggtggcaaggacagagggcctggaccagcaggtggactggaactggtatgatgttctgtccccgggggagatgcaacggctctcctttgcccgactcttctacctgcagccgaagtacgcagtgcttgatgaagccaccagtgccctgacagaggaagtggagagcgagctctatcgcatcggccagcagctggggatgacgttcatcagtgtgggacatcggcagagc

SEQ ID NO: 110227 - DNA, 853 bp, Homo sapiens
  Payload ID: 1633
  Gene Symbol: ABCD4
  Gene Name: ATP-binding cassette, sub-family D (ALD), member 4
  ENST ID: ENST00000470637
  CDS Start-End: 48-218
actgaactaggggcagctgggctccagagtccctcgggtctcaggtcatggcggtcgcggggcccgcgcccggagctggcgccaggcccaggttagatctgcaatttctccagcggttcctgcagatactgaaggttttgtttccttcttggtcatcacaaaatgccttgatgttcctgacccttttgtgcctgaccctactggctgaagagctttgatcagttcacctgcaacctgctgtatgtgagctggaggaaggacctcactgagcaccttcaccgcctctacttccggggccgtgcgtactacaccctcaacgtgctgcgggatgacatcgataacccgtaggcgccccaactcagtcctttctacactctgtgtggtcctttccttctggcctagccctggagactgctggtggcagacaccaaggagatcatctgcagtcgttttcaaatgctgctgcccagagtcatgggggagggtgccctgcagaggactcctggagaagctgcagggctgtgaataggcagctaaaaagaagaagcctgccaggtgcagtggcatgcacctgtagtcccaacaactcaggaggctgaggcaggaggatcacttgagcccaggagtagtgcaccggaccagcgcatcagccaggacgtggagcgattctgccggcagctcagcagcatggccagcaagctcatcatctccccgttcaccctcgtctactacacttaccagtgcttccaaagcacaggctggctcgggcctgtgagcatcttcgggtatttcatcctggggaccgtggtgaacaaaactttgatgggccccattgtgatgaagctggtgcatc

SEQ ID NO: 110228 - DNA, 966 bp, Homo sapiens
  Payload ID: 1633
  Gene Symbol: ABCD4
  Gene Name: ATP-binding cassette, sub-family D (ALD), member 4
  ENST ID: ENST00000469672
  CDS Start-End: 81-200
cggggccccgcccctcctcggactctacccagtactgaactaggggcagctgggctccagagtccctcgggtctcaggtcatggcggtcgcggggcccgcgcccggagctggcgccagagcaatttgtgatctaccaggttggcttgatccccagtcagtactatggggtcctgggaaacaaagacttggaagggtttaagactctgacattcctggctgtcatgctcattgttctgaactccacgggaccagcgcatcagccaggacgtggagcgattctgccggcagctcagcagcatggccagcaagctcatcatctccccgttcaccctcgtctactacacttaccagtgcttccaaagcacaggctggctcgggcctgtgagcatcttcgggtatttcatcctggggaccgtggtgaacaaaactttgatgggccccattgtgatgaagctggtgcatcaggagaagctggagggagattttaggttcaagcacatgcagattcgggtgaatgcggagcctgctgctttctacagtcggcatcaacacctttgactatctgggcagcatcctgagttacgttgtcatcgcaatccccattttcagcggggtctatggagacctgagtcccgcagagcttagcaccctggtcagcaagaatgcctttgtgtgcatctacctcatcagctgcttcacccagctcatcgacctgtccacgacgctctcagatgtggctggctacacgcacagaattgggcagcttcgggagacgcttctggacatgtccctgaagtcacaggactgcgagatcctgggcgagagcgagtggggcttggacacacccccagggtggccagcggcagagccagcagacacagcatttctccttgagcgggtctccatctctgccccctcctctgacaaacccctaatcaaggatctgagcctaaagatctccgagg

SEQ ID NO: 110229 - DNA, 1177 bp, Homo sapiens
  Payload ID: 1633
  Gene Symbol: ABCD4
  Gene Name: ATP-binding cassette, sub-family D (ALD), member 4
  ENST ID: ENST00000481348
  CDS Start-End: 1-554
ttgagcgggtctccatctctgccccctcctctgacaaacccctaatcaaggatctgagcctaaagatctccgagggacagagcctgctcatcacaggcaacacgggcactggcaagacctccttgctccgggttctgggtggcctctggacgagtacacggggctcagtgcagatgctgacggactttgggccccatggggtgctattcctgccacaaaagccattcttcactgacgggacccttcgggagcaggtgatatatcccctgaaggaggtctaccccgactcaggttctgccgatgatgagaggatcttgaggttcttggaattggcaggcctggtaagtggggagagggaccctcaggacccgagcccacctgggagcaccagctacagtccaacttggtggcaaggacagagggcctggaccagcaggtggactggaactggtatgatgttctgtccccgggggagatgcaacggctctcctttgcccgactcttctacctgcagccgaagtacgcagtgcttgatgaagccaccagtgccctgacagaggaagtggagagcgagctctatcgcatcggccagcagctggggatgacgttcatcagtgtgggacatcggcagagccttgagaagtttcattccttggttctgaaactctgtggaggaggaagatgggagctgatgagaatcaaagtggaatgaagctctggcttttggaaggagagccacactgtggcgggtcggcggccctcaggagagaccaggaggactgacagcgaagatcgagctcaggttcgccacatagatcccgtgcaggagccacatgggtcctgtgcaggacccctagcagtggtgggctgagcccaggtctaggtttctgtgggggacactgaatctcccagtgttcagtctcccaggactctgctgcctcagccagagcctccatatgcttgaagtgctgattacctacaaatgatttcagatcatgtttgctaaagagaaatctggaagtgtgagatctgtaagaaatgaaagaaatgactcttggagtcaagagatctggaaatcttttaatcagttaaattgtgcagcaatagatttttaactttaactgaccatttaagttttttaataagttttttacaaagaaaagttaaacattaaaaa

SEQ ID NO: 110230 - DNA, 1003 bp, Homo sapiens
  Payload ID: 1633
  Gene Symbol: ABCD4
  Gene Name: ATP-binding cassette, sub-family D (ALD), member 4
  ENST ID: ENST00000460308
  CDS Start-End: 144-314
gcttccgggagagtccgcgtctcccgcaccttcctctctatcaaacgccgtctctgtggtagccggggccccgcccctcctcggactctacccagtactgaactaggggcagctgggctccagagtccctcgggtctcaggtcatggcggtcgcggggcccgcgcccggagctggcgccaggcccaggttagatctgcaatttctccagcggttcctgcagatactgaaggttttgtttccttcttggtcatcacaaaatgccttgatgttcctgacccttttgtgcctgaccctactggctgaagagctttgatcagttcacctgcaacctgctgtatgtgagctggaggaaggacctcactgagcaccttcaccgcctctacttccggggccgtgcgtactacaccctcaacgtgctgcgggatgacatcgataacccggaccagcgcatcagccaggacgtggagcgattctgccggcagctcagcagcatggccagcaagctcatcatctccccgttcaccctcgtctactacacttaccagtgcttccaaagcacaggctggctcgggcctgtgagcatcttcgggtatttcatcctggggaccgtggtgaacaaaactttgatgggccccattgtgatgaagctggtgcatcaggagaagctggagggagattttaggttcaagcacatgcagattcgggtgaatgcggagcctgctgctttctacagtcggcatcaacacctttgactatctgggcagcatcctgagttacgttgtcatcgcaatccccattttcagcggggtctatggagacctgagtcccgcagagcttagcaccctggtcagcaagaatgcctttgtgtgcatctacctcatcagctgcttcacccagctcatcgacctgtccacgacgctctcagatgtggctggctacacgcacagaattgggcagcttcgggagacgcttctggacatgtccctgaagtcacaggactgc

SEQ ID NO: 110231 - DNA, 2336 bp, Homo sapiens
  Payload ID: 1633
  Gene Symbol: ABCD4
  Gene Name: ATP-binding cassette, sub-family D (ALD), member 4
  ENST ID: ENST00000481935
  CDS Start-End: 26-196
tccagagtccctcgggtctcaggtcatggcggtcgcggggcccgcgcccggagctggcgccaggcccaggttagatctgcaatttctccagcggttcctgcagatactgaaggttttgtttccttcttggtcatcacaaaatgccttgatgttcctgacccttttgtgcctgaccctactggctgaagagctttgatcagttcacctgcaacctgctgtatgtgagctggaggaaggacctcactgagcaccttcaccgcctctacttccggggccgtgcgtactacaccctcaacgtgctgcgggatgacatcgataacccggaccagcgcatcagccaggacgtggagcgattctgccggcagctcagcagcatggccagcaagctcatcatctccccgttcaccctcgtctactacacttaccagtgcttccaaagcacaggctggctcgggcctgtgagcatcttcgggtatttcatcctggggaccgtggtgaacaaaactttgatgggccccattgtgatgaagctggtgcatcaggagaagctggagggagattttaggttcaagcacatgcagattcgggtgaatgcggagcctgctgctttctacagagctgggcatgtggagcacatgaggacagaccgcaggctgcagagactccttcagacccagagggagctgatgtccaaggagctctggctgtacatcggcatcaacacctttgactatctgggcagcatcctgagttacgttgtcatcgcaatccccattttcagcggggtctatggagacctgagtcccgcagagcttagcaccctggtcagcaagaatgcctttgtgtgcatctacctcatcagctgcttcacccagctcatcgacctgtccacgacgctctcagatgtggctggctacacgcacagaattgggcagcttcgggagacgcttctggacatgtccctgaagtcacaggactgcgagatcctgggcgagagcgagtggggcttggacacacccccagggtggccagcggcagagccagcagacacagcatttctccttgagcgggtctccatctctgccccctcctctgacaaacccctaatcaaggatctgagcctaaagatctccgagggacagagcctgctcatcacaggcaacacgggcactggcaagacctccttgctccgggttctgggtggcctctggacgagtacacggggctcagtgcagatgctgacggactttgggccccatggggtgctattcctgccacaaaagccattcttcactgacgggacccttcgggagcaggtgatatatcccctgaaggaggtctaccccgactcaggttctgccgatgatgagaggatcttgaggttcttggaattggcaggcctgtccaacttggtggcaaggacagagggcctggaccagcaggtggactggaactggtatgatgttctgtccccgggggagatgcaacggctctcctttgcccgactcttctacctgcagccgaagtacgcagtgcttgatgaagccaccagtgccctgacagaggaagtggagagcgagctctatcgcatcggccagcagctggggatgacgttcatcagtgtgggacatcggcagagccttgagaaggtacccgtgctcacaaggatggcctgaggaggagaaagaacccaaaggctcagcctggccagggccagaggcccctcaaaacggggagtagcagtagcagagagaaccgagtggcctcctctgccagcggccagggcagcctgatctccatgtggtggtggtctcttgtagtttcattccttggttctgaaactctgtggaggaggaagatgggagctgatgagaatcaaagtggaatgaagctctggcttttggaaggagagccacactgtggcgggtcggcggccctcaggagagaccaggaggactgacagcgaagatcgagctcaggttcgccacatagatcccgtgcaggagccacatgggtcctgtgcaggacccctagcagtggtgggctgagcccaggtctaggtttctgtgggggacactgaatctcccagtgttcagtctcccaggactctgctgcctcagccagagcctccatatgcttgaagtgctgattacctacaaatgatttcagatcatgtttgctaaagagaaatctggaagtgtgagatctgtaagaaatgaaagaaatgactcttggagtcaagagatctggaaatcttttaatcagttaaattgtgcagcaatagatttttaactttaactgaccatttaagttttttaataagttttttacaaaga

SEQ ID NO: 110232 - DNA, 838 bp, Homo sapiens
  Payload ID: 1633
  Gene Symbol: ABCD4
  Gene Name: ATP-binding cassette, sub-family D (ALD), member 4
  ENST ID: ENST00000556119
  CDS Start-End: 5-124
ggtcatggcggtcgcggggcccgcgcccggagctggcgccagagcaatttgtgatctaccaggttggcttgatccccagtcagtactatggggtcctgggaaacaaagacttggaagggtttaagactctgacattcctggctgtcatgctcattgttctgaactccacgggaccagcgcatcagccaggacgtggagcgattctgccggcagctcagcagcatggccagcaagctcatcatctccccgttcaccctcgtctactacacttaccagtgcttccaaagcacaggctggctcgggcctgtgagcatcttcgggtatttcatcctggggaccgtggtgaacaaaactttgatgggccccattgtgatgaagctggtgcatcaggagaagctggagggagattttaggttcaagcacatgcagattcgggtgaatgcggagcctgctgctttctacagagctgggcatgtggagcacatgaggacagaccgcaggctgcagagactccttcagacccagagggagctgatgtccaaggagctctggctgtacatcggcatcaacacctttgactatctgggcagcatcctgagttacgttgtcatcgcaatccccattttcagcggggtctatggagacctgagtcccgcagagcttagcaccctggtcagcaagaatgcctttgtgtgcatctacctcatcagctgcttcacccagctcatcgacctgtccacgacgctctcagatgtggctggctacacgcacagaattgggcagcttcgggagacgcttctggacatgtccctgaagtcacaggactgcgagatcctgg

SEQ ID NO: 110233 - DNA, 1842 bp, Homo sapiens
  Payload ID: 1633
  Gene Symbol: ABCD4
  Gene Name: ATP-binding cassette, sub-family D (ALD), member 4
  ENST ID: ENST00000553486
  CDS Start-End: 34-204
agctgggctccagagtccctcgggtctcaggtcatggcggtcgcggggcccgcgcccggagctggcgccaggcccaggttagatctgcaatttctccagcggttcctgcagatactgaaggttttgtttccttcttggtcatcacaaaatgccttgatgttcctgacccttttgtgcctgaccctactggctgaagagctttgatcagttcacctgcaacctgctgtatgtgagctggaggaaggacctcactgagcaccttcaccgcctctacttccggggccgtgcgtactacaccctcaacgtgctgcgggatgacatcgataacccggaccagcgcatcagccaggacgtggagcgattctgccggcagctcagcagcatggccagcaagctcatcatctccccgttcaccctcgtctactacacttaccagtgcttccaaagcacaggctggctcgggcctgtgagcatcttcgggtatttcatcctggggaccgtggtgaacaaaactttgatgggccccattgtgatgaagctggtgcatcaggagaagctggagggagattttaggttcaagcacatgcagattcgggtgaatgcggagcctgctgctttctacagagctgggcatgtggagcacatgaggacagaccgcaggctgcagagactccttcagacccagagggagctgatgtccaaggagctctggctgtacatcggcatcaacacctttgactatctgggcagcatcctgagttacgttgtcatcgcaatccccattttcagcggggtctatggagacctgagtcccgcagagcttagcaccctggtcagcaagaatgcctttgtgtgcatctacctcatcagctgcttcacccagctcatcgacctgtccacgacgctctcagatgtggctggctacacgcacagaattgggcagcttcgggagacgcttctggacatgtccctgaagtcacaggactgcgagatcctgggcgagagcgagtggggcttggacacacccccagggtggccagcggcagagccagcagacacagcatttctccttgagcgggtctccatctctgccccctcctctgacaaacccctaatcaaggatctgagcctaaagatctccgagggacagagcctgctcatcacaggcaacacgggcactggcaagacctccttgctccgggttctgggtggcctctggacgagtacacggggctcagtgcagatgctgacggactttgggccccatggggtgctattcctgccacaaaagccattcttcactgacgggacccttcgggagcaggtgatatatcccctgaaggaggtctaccccgactcaggttctgccgatgatgagaggatcttgaggttcttggaattggcaggcctgtccaacttggtggcaaggacagagggcctggaccagcaggtggactggaactggtatgatgttctgtccccgggggagatgcaacggctctcctttgcccgactcttctacctgcagccgaagtacgcagtgcttgatgaagccaccagtgccctgacagaggaagtggagagcgagctctatcgcatcggccagcagctggggatgacgttcatcagtgtgggacatcggcagagccttgagaagtttcattccttggttctgaaactctgtggaggaggaagatgggagctgatgagaatcaaagtggaatgaagctctggcttttggaaggagagccacactgtggcgggtcggcggccctcaggagagaccaggaggactgacagcgaagatcgagctcaggttcgccacatagatcccgtgcagga

SEQ ID NO: 110234 - DNA, 947 bp, Homo sapiens
  Payload ID: 1633
  Gene Symbol: ABCD4
  Gene Name: ATP-binding cassette, sub-family D (ALD), member 4
  ENST ID: ENST00000556517
  CDS Start-End: 1-554
ttgagcgggtctccatctctgccccctcctctgacaaacccctaatcaaggatctgagcctaaagatctccgagggacagagcctgctcatcacaggcaacacgggcactggcaagacctccttgctccgggttctgggtggcctctggacgagtacacggggctcagtgcagatgctgacggactttgggccccatggggtgctattcctgccacaaaagccattcttcactgacgggacccttcgggagcaggtgatatatcccctgaaggaggtctaccccgactcaggttctgccgatgatgagaggatcttgaggttcttggaattggcaggcctggtaagtggggagagggaccctcaggacccgagcccacctgggagcaccagctacagtccaacttggtggcaaggacagagggcctggaccagcaggtggactggaactggtatgatgttctgtccccgggggagatgcaacggctctcctttgcccgactcttctacctgcagccgaagtacgcagtgcttgatgaagccaccagtgccctgacagaggaagtggagagcgagctctatcgcatcggccagcagctggggatgacgttcatcagtgtgggacatcggcagagccttgagaaggtacccgtgctcacaaggatggcctgaggaggagaaagaacccaaaggctcagcctggccagggccagaggcccctcaaaacggggagtagcagtagcagagagaaccgagtggcctcctctgccagcggccagggcagcctgatctccatgtggtggtggtctcttgtagtttcattccttggttctgaaactctgtggaggaggaagatgggagctgatgagaatcaaagtggaatgaagctctggcttttggaaggagagccacactgtggcgggtcggcggccctcaggagagaccagga

SEQ ID NO: 110235 - DNA, 582 bp, Homo sapiens
  Payload ID: 1633
  Gene Symbol: ABCD4
  Gene Name: ATP-binding cassette, sub-family D (ALD), member 4
  ENST ID: ENST00000555904
  CDS Start-End: 1-476
caggttctgccgatgatgagaggatcttgaggttcttggaattggcaggcctgtccaacttggtggcaaggacagagggcctggaccagcaggtggactggaactggtatgatgttctgtccccgggggagatgcaacggctctcctttgcccgactcttctacctgcagccgaagtacgcagtgcttgatgaagccaccagtgccctgacagaggaagtggagagcgagctctatcgcatcggccagcagctggggatgacgttcatcagtgtgggacatcggcagagccttgagaagggcagcctgatctccatgtggtggtggtctcttgtagtttcattccttggttctgaaactctgtggaggaggaagatgggagctgatgagaatcaaagtggaatgaagctctggcttttggaaggagagccacactgtggcgggtcggcggccctcaggagagaccaggaggactgacagcgaagatcgagctcaggttcgccacatagatcccgtgcaggagccacatgggtcctgtgcaggacccctagcagtggtgggctgagcccaggtctaggtttct

SEQ ID NO: 110236 - DNA, 736 bp, Homo sapiens
  Payload ID: 1633
  Gene Symbol: ABCD4
  Gene Name: ATP-binding cassette, sub-family D (ALD), member 4
  ENST ID: ENST00000554453
  CDS Start-End: 7-303
caggtcatggcggtcgcggggcccgcgcccggagctggcgccaggcccaggttagatctgcaatttctccagcggttcctgcagatactgaaggttttgtttccttcttggtcatcacaaaatgccttgatgttcctgacccttttgtgcctgaccctactggggaccagcgcatcagccaggacgtggagcgattctgccggcagctcagcagcatggccagcaagctcatcatctccccgttcaccctcgtctactacacttaccagtgcttccaaagcacaggctggctcgggcctgtgagcatcttcgggtatttcatcctggggaccgtggtgaacaaaactttgatgggccccattgtgatgaagctggtgcatcaggagaagctggagggagattttaggttcaagcacatgcagattcgggtgaatgcggagcctgctgctttctacaggcggccccccaacctggctgaacctctccagccctgtggacatcccagcctttccttgtcagagctgggcatgtggagcacatgaggacagaccgcaggctgcagagactccttcagacccagagggagctgatgtccaaggagctctggctgtacatcggcatcaacacctttgactatctgggcagcatcctgagttacgttgtcatcgcaatccccattttcagcggggtctatggagacctgagtcccgcagagcttagcaccctggtcagcaag

SEQ ID NO: 110237 - DNA, 542 bp, Homo sapiens
  Payload ID: 1633
  Gene Symbol: ABCD4
  Gene Name: ATP-binding cassette, sub-family D (ALD), member 4
  ENST ID: ENST00000555617
  CDS Start-End: 48-167
actgaactaggggcagctgggctccagagtccctcgggtctcaggtcatggcggtcgcggggcccgcgcccggagctggcgccagagcaatttgtgatctaccaggttggcttgatccccagtcagtactatggggtcctgggaaacaaagacttggaagggtttaagactctgacattcctggctgtcatgctcattgttctgaactccacgggaccagcgcatcagccaggacgtggagcgattctgccggcagctcagcagcatggccagcaagctcatcatctccccgttcaccctcgtctactacacttaccagtgcttccaaaggttcaagcacatgcagattcgggtgaatgcggagcctgctgctttctacagtcggcatcaacacctttgactatctgggcagcatcctgagttacgttgtcatcgcaatccccattttcagcggggtctatggagacctgagtcccgcagagcttagcaccctggtcagcaagaatgcctttgtgtgcatctacctcatcagctgcttcacc

SEQ ID NO: 110238 - DNA, 637 bp, Homo sapiens
  Payload ID: 1633
  Gene Symbol: ABCD4
  Gene Name: ATP-binding cassette, sub-family D (ALD), member 4
  ENST ID: ENST00000556971
  CDS Start-End: 1-617
ggcggtcgcggggcccgcgcccggagctggcgccagagcaatttgtgatctaccaggttggcttgatccccagtcagtactatggggtcctgggaaacaaagacttggaagggtttaagactctgacattcctggctgtcatgctcattgttctgaactccacgctgaagagctttgatcagttcacctgcaacctgctgtatgtgagctggaggaaggacctcactgagcaccttcaccgcctctacttccggggccgtgcgtactacaccctcaacgtgctgcgggatgacatcgataacccggaccagcgcatcagccaggacgtggagcgattctgccggcagctcagcagcatggccagcaagctcatcatctccccgttcaccctcgtctactacacttaccagtgcttccaaagcacaggctggctcgggcctgtgagcatcttcgggtatttcatcctggggaccgtggtgaacaaaactttgatgggccccattgtgatgaagctggtgcatcaggagaagctggagggagattttaggttcaagcacatgcagattcgggtgaatgcggagcctgctgctttctacagtcggcatcaacacctttgactatctgggcagcatcctga

SEQ ID NO: 110239 - DNA, 1770 bp, Homo sapiens
  Payload ID: 1633
  Gene Symbol: ABCD4
  Gene Name: ATP-binding cassette, sub-family D (ALD), member 4
  ENST ID: ENST00000553745
  CDS Start-End: 58-177
tctacccagtactgaactaggggcagctgggctccagagtccctcgggtctcaggtcatggcggtcgcggggcccgcgcccggagctggcgccagagcaatttgtgatctaccaggttggcttgatccccagtcagtactatggggtcctgggaaacaaagacttggaagggtttaagactctgacattcctggctgtcatgctcattgttctgaactccacgctgaagagctttgatcagttcacctgcaacctgctgtatgtgagctggaggaaggacctcactgagcaccttcaccgcctctacttccggggccgtgcgtactacaccctcaacgtgctgcgggatgacatcgataacccggaccagcgcatcagccaggacgtggagcgattctgccggcagctcagcagcatggccagcaagctcatcatctccccgttcaccctcgtctactacacttaccagtgcttccaaagcacaggctggctcgggcctgtgagcatcttcgggtatttcatcctggggaccgtggtgaacaaaactttgatgggccccattgtgatgaagctggtgcatcaggagaagctggagggagattttagagctgggcatgtggagcacatgaggacagaccgcaggctgcagagactccttcagacccagagggagctgatgtccaaggagctctggctgtacatcggcatcaacacctttgactatctgggcagcatcctgagttacgttgtcatcgcaatccccattttcagcggggtctatggagacctgagtcccgcagagcttagcaccctggtcagcaagaatgcctttgtgtgcatctacctcatcagctgcttcacccagctcatcgacctgtccacgacgctctcagatgtggctggctacacgcacagaattgggcagcttcgggagacgcttctggacatgtccctgaagtcacaggactgcgagatcctgggcgagagcgagtggggcttggacacacccccagggtggccagcggcagagccagcagacacagcatttctccttgagcgggtctccatctctgccccctcctctgacaaacccctaatcaaggatctgagcctaaagatctccgagggacagagcctgctcatcacaggcaacacgggcactggcaagacctccttgctccgggttctgggtggcctctggacgagtacacggggctcagtgcagatgctgacggactttgggccccatggggtgctattcctgccacaaaagccattcttcactgacgggacccttcgggagcaggtgatatatcccctgaaggaggtctaccccgactcaggttctgccgatgatgagaggatcttgaggttcttggaattggcaggcctgtccaacttggtggcaaggacagagggcctggaccagcaggtggactggaactggtatgatgttctgtccccgggggagatgcaacggctctcctttgcccgactcttctacctgcagccgaagtacgcagtgcttgatgaagccaccagtgccctgacagaggaagtggagagcgagctctatcgcatcggccagcagctggggatgacgttcatcagtgtgggacatcggcagagccttgagaaggtacccgtgctcacaaggatggcctgaggaggagaaagaacccaaaggctcagcctggccagggccagaggcccctcaaaacggggagtagcagtagcagagagaaccgagtggcctcctctgccagcggc

SEQ ID NO: 110240 - DNA, 763 bp, Homo sapiens
  Payload ID: 1633
  Gene Symbol: ABCD4
  Gene Name: ATP-binding cassette, sub-family D (ALD), member 4
  ENST ID: ENST00000557588
  CDS Start-End: 76-687
ccccgcccctcctcggactctacccagtactgaactaggggcagctgggctccagagtccctcgggtctcaggtcatggcggtcgcggggcccgcgcccggagctggcgccaggcccaggttagatctgcaatttctccagcggttcctgcagatactgaaggttttgtttccttcttggtcatcacaaaatgccttgatgttcctgacccttttgtgcctgaccctactggagcaatttgtgatctaccaggttggcttgatccccagtcagtactatggggtcctgggaaacaaagacttggaagggtttaagactctgacattcctggctgtcatgctcattgttctgaactccacgctgaagagctttgatcagttcacctgcaacctgctgtatgtgagctggaggaaggacctcactgagcaccttcaccgcctctacttccggggccgtgcgtactacaccctcaacgtgctgcgggatgacatcgataacccggaccagcgcatcagccaggacgtggagcgattctgccggcagctcagcagcatggccagcaagctcatcatctccccgttcaccctcgtctactacacttaccagtgcttccaaaggttcaagcacatgcagattcgggtgaatgcggagcctgctgctttctacagtcggcatcaacacctttgactatctgggcagcatcctgagttacgttgtcatcgcaatccccattttcagcggggtctatggagacctgagtccc

SEQ ID NO: 110241 - DNA, 478 bp, Homo sapiens
  Payload ID: 1633
  Gene Symbol: ABCD4
  Gene Name: ATP-binding cassette, sub-family D (ALD), member 4
  ENST ID: ENST00000553998
  CDS Start-End: 1-283
catcctggggaccgtggtgaacaaaactttgatgggccccattgtgatgaagctggtgcatcaggagaagctggagggagattttaggttcaagcacatgcagattcgggtgaatgcggagcctgctgctttctacagccctgtggacatcccagcctttccttgtcagagctgggcatgtggagcacatgaggacagaccgcaggctgcagagactccttcagacccagagggagctgatgtccaaggagctctggctgtacatcggcatcaacacctttgactatctgggcagcatcctgagttacgttgtcatcgcaatccccattttcagcggggtctatggagacctgagtcccgcagagcttagcaccctggtcagcaagaatgcctttgtgtgcatctacctcatcagctgcttcacccagctcatcgacctgtccacgacgctctcagatgtggctggctacacgcacag

SEQ ID NO: 110242 - DNA, 3921 bp, Homo sapiens
  Payload ID: 1634
  Gene Symbol: ABCE1
  Gene Name: ATP-binding cassette, sub-family E (OABP), member 1
  Uniprot ID: P61221
  ENST ID: ENST00000296577
  CDS Start-End: 516-2315
aagccgtgtcggcaccagactctgttggtcctactgacacctccagcgttagaatgactaaggctccactcctgacccaccggccttgaggaaagcgcaaacgtaaaaaaagattgaaaccggagaggcgaatgcatctgtttacgctaggaccacgctcgacgtcggagaaaagcccacacactcacagtttccagacctggctgcttgccgaaactcagattctcggcacctccagcagctggcttcgccaacggcgttgaacaagggtcgcagctcaatgacgtcatatctccctacctacctccagggttccgcctcacgctctatgtcgcgcgcgcgcactacgtcctatggcttgcgcgtgcggcggctgggcaccgccattttggccggtggccgtgagaacacgctgtgtggctgaaaagtgaaggcaagagctgatttggcctctgtgctcccctccgcaaggggatcgttttctccagaagagctggatattctttcgcccagttatggcagacaagttaacgagaattgctattgtcaaccatgacaaatgtaaacctaagaaatgtcgacaggaatgcaaaaagagttgtcctgtagttcgaatgggaaaattatgcatagaggttacaccccagagcaaaatagcatggatttccgaaactctttgtattggttgtggtatctgtattaagaaatgcccctttggcgccttatcaattgtcaatctaccaagcaacttggaaaaagaaaccacacatcgatattgtgccaatgccttcaaacttcacaggttgcctatccctcgtccaggtgaagttttgggattagttggaactaatggtattggaaagtcaactgctttaaaaattttagcaggaaaacaaaagccaaaccttggaaagtacgatgatcctcctgactggcaggagattttgacttatttccgtggatctgaattacaaaattactttacaaagattctagaagatgacctaaaagccatcatcaaacctcaatatgtagaccagattcctaaggctgcaaaggggacagtgggatctattttggaccgaaaagatgaaacaaagacacaggcaattgtatgtcagcagcttgatttaacccacctaaaagaacgaaatgttgaagatctttcaggaggagagttgcagagatttgcttgtgctgtcgtttgcatacagaaagctgatattttcatgtttgatgagccttctagttacctagatgtcaagcagcgtttaaaggctgctattactatacgatctctaataaatccagatagatatatcattgtggtggaacatgatctaagtgtattagactatctctccgacttcatctgctgtttatatggtgtaccaagcgcctatggagttgtcactatgccttttagtgtaagagaaggcataaacatttttttggatggctatgttccaacagaaaacttgagattcagagatgcatcacttgtttttaaagtggctgagacagcaaatgaagaagaagttaaaaagatgtgtatgtataaatatccaggaatgaagaaaaaaatgggagaatttgagctagcaattgtagctggagagtttacagattctgaaattatggtgatgctgggggaaaatggaacgggtaaaacgacatttatcagaatgcttgctggaagacttaaacctgatgaaggaggagaagtaccagttctaaatgtcagttataagccacagaaaattagtcccaaatcaactggaagtgttcgccagttactacatgaaaagataagagatgcttatactcacccacaatttgtgaccgatgtaatgaagcctctgcaaattgaaaacatcattgatcaagaggtgcagacattatctggtggtgaactacagcgagtagctttagccctttgcttgggcaaacctgctgatgtctatttaattgatgaaccatctgcatatttggattctgagcaaagactgatggcagctcgagttgtcaaacgtttcatactccatgcaaaaaagacagcctttgttgtggaacatgacttcatcatggccacctatctagcggatcgcgtcatcgtttttgatggtgttccatctaagaacacagttgcaaacagtcctcaaacccttttggctggcatgaataaatttttgtctcagcttgaaattacattcagaagagatccaaacaactataggccacgaataaacaaacttaattcaattaaggatgtagaacaaaagaagagtggaaactactttttcttggatgattagactgactctgagaatattgataagccatttattaaaaggagtatttactagaattttttgtcatataaaacttgaatcaggattttatgccccacatactctggaacttgaagtataatatacttaatataacataaaaagccagttgggttctaaattgtagttgaaacacagaaaatgccacttttctgttcctgaagaggctcttttgtgcataatattctaaaatgaagacatttcaagctatacaaattacttccaagttttcatgatgtatgggaagattttcagtaggtgtattatattcacggtaccaaatgctgaccagtgttgctccattttttaaatcttgaaaagggtttctgtacttacctggtttgccaagtatgccagtgtaatgaaactgcccttattttaaaagccagtcaaagattccactgattgacatttgataaataaacatcaggattatgtttattgtttgttttcagtctttgcactatattaccagtatatggtttccgaggaagattatctactgcaaaacaccactgttggaaaaataggtatttttaaattgtttttaatcttttttggtgcttttaaacatgtttagcaaaaaccaattcagttccattccccgcaaaaaacccctaactttactctgaactttttttgtttttgcattccatgaggttctgtattcagtcattctctaggtaatgtcatttttgtacacatatatttatataatcactgattgagatttaggaaaaagcatttctaaagaatatttgcttcccttagaactacagactcgaaatctttaaagatggtgcctaagcatctatgtattttttttaagttccacagatttttctgttgggcagccaaggattataaaccacttccctaaaggcaacattaatgcaaaagtccccagatggcaatacaaagtatcccctggtaccacatatattcatttgtgagtttggatatagagcacattatctaaaccattttgtagttccaaaaacccatctaaatttcttgagttcctgaattttgaacaggattacctggagcctggagccactttaagttgtacttctgactaaactggaattatgagtgaggaagagtgtttactaaataaatgactggggcaagcaaaattgaggaggaaattagaaactgtttgacaaactttaagagctacttgaaataacagaagtcttgattaatatgcaaataatggctagaaagtatggtttaactggaccctattatgccttttaaaaataatttcagtaacccataaatacatgttgtaaaaaattcaaatatacagaatggaataaaaaaatgatctccctttattaccctcccaaaggttaccagcgtttgaatttaataatgtatattctttcatgcttttttctgtgcacttacctaagtgtgaatatgtaaagggtttgttttgtatacaaatgggattatactaaaataagtaatgcctatttttaaggataggttaaatttgtgaatgatcatttcaaatatattgaataaaataagcaaaagctattgttatttactgatcctg

SEQ ID NO: 110243 - DNA, 786 bp, Homo sapiens
  Payload ID: 1634
  Gene Symbol: ABCE1
  Gene Name: ATP-binding cassette, sub-family E (OABP), member 1
  ENST ID: ENST00000502586
  CDS Start-End: 157-786
gcttgcgcgtgcggcggctgggcaccgccattttggccggtggccgtgagaacacgctgtgtggctgaaaagtgaaggcaagagctgatttggcctctgtgctcccctccgcaaggggatcgttttctccagagctggatattctttcgcccagttatggcagacaagttaacgagaattgctattgtcaaccatgacaaatgtaaacctaagaaatgtcgacaggaatgcaaaaagagttgtcctgtagttcgaatgggaaaattatgcatagaggttacaccccagagcaaaatagcatggatttccgaaactctttgtattggttgtggtatctgtattaagaaatgcccctttggcgccttatcaattgtcaatctaccaagcaacttggaaaaagaaaccacacatcgatattgtgccaatgccttcaaacttcacaggttgcctatccctcgtccaggtgaagttttgggattagttggaactaatggtattggaaagtcaactgctttaaaaattttagcaggaaaacaaaagccaaaccttggaaagtacgatgatcctcctgactggcaggagattttgacttatttccgtggatctgaattacaaaattactttacaaagattctagaagatgacctaaaagccatcatcaaacctcaatatgtagaccagattcctaaggctgcaaaggggacagtgggatctattttggaccgaaaagatgaaacaaagacacaggcaattgtatgtcagcagcttgatttaacccacctaaaa

SEQ ID NO: 110244 - DNA, 2146 bp, Homo sapiens
  Payload ID: 1634
  Gene Symbol: ABCE1
  Gene Name: ATP-binding cassette, sub-family E (OABP), member 1
  ENST ID: ENST00000507193
  CDS Start-End: 137-1402
accgccattttggccggtggccgtgagaacacgctgtgtggctgaaaagtgaaggcaagagctgatttggcctctgtgctcccctccgcaaggggatcgttttctccagaagagctggatattctttcgcccagttatggcagacaagttaacgagaattgctattgtcaaccatgacaaatgtaaacctaagaaatgtcgacaggaatgcaaaaagagttgtcctgtagttcgaatgggaaaattatgcatagaggttacaccccagagcaaaatagcatggatttccgaaactctttgtattggttgtggtatctgtattaagaaatgcccctttggcgccttatcaattgtcaatctaccaagcaacttggaaaaagaaaccacacatcgatattgtgccaatgccttcaaacttcacaggttgcctatccctcgtccaggtgaagttttgggattagttggaactaatggtattggaaagtcaactgctttaaaaattttagcaggaaaacaaaagccaaaccttggaaagtacgatgatcctcctgactggcaggagattttgacttatttccgtggatctgaattacaaaattactttacaaagattctagaagatgacctaaaagccatcatcaaacctcaatatgtagaccagattcctaaggctgcaaaggggacagtgggatctattttggaccgaaaagatgaaacaaagacacaggcaattgtatgtcagcagcttgatttaacccacctaaaagaacgaaatgttgaagatctttcaggaggagagttgcagagatttgcttgtgctgtcgtttgcatacagaaagctgatattttcatgtttgatgagccttctagttacctagatgtcaagcagcgtttaaaggctgctattactatacgatctctaataaatccagatagatatatcattgtggtggaacatgatctaagtgtattagactatctctccgacttcatctgctgtttatatggtgtaccaagcgcctatggagttgtcactatgccttttagtgtaagagaaggcataaacatttttttggatggctatgttccaacagaaaacttgagattcagagatgcatcacttgtttttaaagtggctgagacagcaaatgaagaagaagttaaaaagatgtgtatgtataaatatccaggaatgaagaaaaaaatgggagaatttgagctagcaattgtagctggagagtttacagattctgaaattatggtgatgctgggggaaaatggaacgggtaaaacgacatttatcagaatgcttgctggaagacttaaacctgatgaaggaggagaagtaccagttctaaatgtcagttataagccacagaaaattagtcccaaatcaacttagctcacgcctgtaatgccaacacttcgggaggcctaggccagcagatcacgaggtcaggagatcgagaccatcctggctaacatggtgaaaccctgtctctactaaaactacaaaaaactagccgagcgtggtggcagcgcctgtagtcccagctactcaggaggctgaggcaggagaatggcgtgaacctgggaggcagagcttgcaggaagtgttcgccagttactacatgaaaagataagagatgcttatactcacccacaatttgtgaccgatgtaatgaagcctctgcaaattgaaaacatcattgatcaagaggtgcagacattatctggtggtgaactacagcgagtagctttagccctttgcttgggcaaacctgctgatgtctatttaattgatgaaccatctgcatatttggattctgagcaaagactgatggcagctcgagttgtcaaacgtttcatactccatgcaaaaaagacagcctttgttgtggaacatgacttcatcatggccacctatctagcggatcgcgtcatcgtttttgatggtgttccatctaagaacacagttgcaaacagtcctcaaacccttttggctggcatgaataaatttttgtctcagcttgaaattacattcagaagagatccaaacaactataggccacgaataaacaaacttaattcaattaaggatgtagaacaaaagaagagtggaaactactttttcttggatgattag

SEQ ID NO: 110245 - DNA, 625 bp, Homo sapiens
  Payload ID: 1634
  Gene Symbol: ABCE1
  Gene Name: ATP-binding cassette, sub-family E (OABP), member 1
  ENST ID: ENST00000504292
  CDS Start-End: 1-444
ggcgccttatcaattgtcaatctaccaagcaacttggaaaaagaaaccacacatcgatattgtgccaatgccttcaaacttcacaggttgcctatccctcgtccaggtgaagttttgggattagttggaactaatggtattggaaagtcaactgctttaaaaattttagcaggaaaacaaaagccaaaccttggaaagtacgatgatcctcctgactggcaggagattttgacttatttccgtggatctgaattacaaaattactttacaaagattctagaagatgacctaaaagccatcatcaaacctcaatatgtagaccagattcctaaggctgcaaaggggacagtgggatctattttggaccgaaaagatgaaacaaagacacaggcaattgtatgtcagcagcttgtttcatgtttgatgagccttctagttacctagatgtcaagcagcgtttaaaggctgctattactatacgatctctaataaatccagatagatatatcattgtggtggaacatgatctaagtgtattagactatctctccgacttcatctgctgtttatatggtgtaccaagcgcctatggagttgtcactatgccttttagtgtaagagaagg

SEQ ID NO: 110246 - DNA, 3481 bp, Homo sapiens
  Payload ID: 1635
  Gene Symbol: ABCF1
  Gene Name: ATP-binding cassette, sub-family F (GCN20), member 1
  Uniprot ID: Q8NE71
  ENST ID: ENST00000326195
  CDS Start-End: 113-2650
cgggggcggggttggccgcgccagcttggagagccagccccatcggggttccccgccgccggaagcggaaatagcaccgggcgccgccacagtagctgtaactgccaccgcgatgccgaaggcgcccaagcagcagccgccggagcccgagtggatcggggacggagagagcacgagcccatcagacaaagtggtgaagaaagggaagaaggacaagaagatcaaaaaaacgttctttgaagagctggcagtagaagataaacaggctggggaagaagagaaagtgctcaaggagaaggagcagcagcagcagcaacagcaacagcagcaaaaaaaaaagcgagatacccgaaaaggcaggcggaagaaggatgtggatgatgatggagaagagaaagagctcatggagcgtcttaagaagctctcagtgccaaccagtgatgaggaggatgaagtacccgccccaaaaccccgcggagggaagaaaaccaagggtggtaatgtttttgcagccctgattcaggatcagagtgaggaagaggaggaggaagaaaaacatcctcctaagcctgccaagccggagaagaatcggatcaataaggccgtatctgaggaacagcagcctgcactcaagggcaaaaagggaaaggaagagaagtcaaaagggaaggctaagcctcaaaataaattcgctgctctggacaatgaagaggaggataaagaagaagaaattataaaggaaaaggagcctcccaaacaagggaaggagaaggccaagaaggcagagcagggttcagaggaagaaggagaaggggaagaagaggaggaggaaggaggagagtctaaggcagatgatccctatgctcatcttagcaaaaaggagaagaaaaagctgaaaaaacagatggagtatgagcgccaagtggcttcattaaaagcagccaatgcagctgaaaatgacttctccgtgtcccaggcggagatgtcctcccgccaagccatgttagaaaatgcatctgacatcaagctggagaagttcagcatctccgctcatggcaaggagctgttcgtcaatgcagacctgtacattgtagccggccgccgctacgggctggtaggacccaatggcaagggcaagaccacactcctcaagcacattgccaaccgagccctgagcatccctcccaacattgatgtgttgctgtgtgagcaggaggtggtagcagatgagacaccagcagtccaggctgttcttcgagctgacaccaagcgattgaagctgctggaagaggagcggcggcttcagggacagctggaacaaggggatgacacagctgctgagaggctagagaaggtgtatgaggaattgcgggccactggggcggcagctgcagaggccaaagcacggcggatcctggctggcctgggctttgaccctgaaatgcagaatcgacccacacagaagttctcagggggctggcgcatgcgtgtctccctggccagggcactgttcatggagcccacactgctgatgctggatgagcccaccaaccacctggacctcaacgctgtcatctggcttaataactacctccagggctggcggaagaccttgctgatcgtctcccatgaccagggcttcttggatgatgtctgcactgatatcatccacctcgatgcccagcggctccactactataggggcaattacatgaccttcaaaaagatgtaccagcagaagcagaaagaactgctgaaacagtatgagaagcaagagaaaaagctgaaggagctgaaggcaggcgggaagtccaccaagcaggcggaaaaacaaacgaaggaagccctgactcggaagcagcagaaatgccgacggaaaaaccaagatgaggaatcccaggaggcccctgagctcctgaagcgccctaaggagtacactgtgcgcttcacttttccagaccccccaccactcagccctccagtgctgggtctgcatggtgtgacattcggctaccagggacagaaaccactctttaagaacttggattttggcatcgacatggattcaaggatttgcattgtgggccctaatggtgtggggaagagtacgctactcctgctgctgactggcaagctgacaccgacccatggggaaatgagaaagaaccaccggctgaaaattggcttcttcaaccagcagtatgcagagcagctgcgcatggaggagacgcccactgagtacctgcagcggggcttcaacctgccctaccaggatgcccgcaagtgcctgggccgcttcggcctggagagtcacgcccacaccatccagatctgcaaactctctggtggtcagaaggcgcgagttgtgtttgctgagctggcctgtcgggaacctgatgtcctcatcttggacgagccaaccaataacctggacatagagtctattgatgctctaggggaggccatcaatgaatacaagggtgctgtgatcgttgtcagccatgatgcccgactcatcacagaaaccaattgccagctgtgggtggtggaggagcagagtgttagccaaatcgatggtgactttgaagactacaagcgggaggtgttggaggccctgggtgaagtcatggtcagccggccccgagagtgagctttccttcccagaagtctcccgagagacatatttgtgtggcctagaagtcctctgtggtctcccctcctctgaagactgcctctggcctgcagctgacctggcaaccattcaggcacatgaaggtggagtgtgaccttgatgtgaccgggatcccactctgattgcatccatttctctgaaagacttgtttgttctgcttctcttcatataactgagctggccttatccttggcatccccctaaacaaacaagaggtgaccaccttattgtgaggttccatccagccaagtttatgtggcctattgtctcaggactctcatcactcagaagcctgcctctgatttaccctacagcttcaggcccagctgccccccagtctttgggtggtgctgttcttttctggtggatttaatgctgactcactggtacaaacagctgttgaagctcagagctggaggtgagcttctgaggcctttgccattatccagcccaagatttggtgcctgcagcctcttgtctggttgaggacttggggcaggaaaggaatgctgctgaacttgaatttccctttacaaggggaagaaataaaggaaaggagttgctgccgacctgtcactgtttggagattgatgggagttggaactgttctcagtcttgatttgctttattcagttttctagcagcttttaatagtcccctcttccccactaaatggatcttgtttgcagtcttgctgacagtgtttgctgtttaaggatcataggattcctttcccccaacccttcacgcaaggaaaaagcaaagtgattcataccttctatcttggaa

SEQ ID NO: 110247 - DNA, 3131 bp, Homo sapiens
  Payload ID: 1635
  Gene Symbol: ABCF1
  Gene Name: ATP-binding cassette, sub-family F (GCN20), member 1
  Uniprot ID: Q8NE71
  ENST ID: ENST00000376545
  CDS Start-End: 96-2519
gcgccagcttggagagccagccccatcggggttccccgccgccggaagcggaaatagcaccgggcgccgccacagtagctgtaactgccaccgcgatgccgaaggcgcccaagcagcagccgccggagcccgagtggatcggggacggagagagcacgagcccatcagacaaagtggtgaagaaagggaagaaggacaagaagatcaaaaaaacgttctttgaagagctggcagtagaagataaacaggctggggaagaagagaaagtgctcaaggagaaggagcagcagcagcagcaacagcaacagcagcaaaaaaaaaagcgagatacccgaaaaggcaggcggaagaaggatgtggatgatgatggagaagagaaagagctcatggagcgtcttaagaagctctcagtgccaaccagtgatgaggaggatgaagtacccgccccaaaaccccgcggagggaagaaaaccaagggtggtaatgtttttgcagccctgattcaggatcagagtgaggaagaggaggaggaagaaaaacatcctcctaagcctgccaagccggagaagaatcggatcaataaggccgtatctgaggaacagcagcctgcactcaagggcaaaaagggaaaggaagagaagtcaaaagggaaggctaagcctcaaaataaattcgctgctctggacaatgaagaggaggataaagaagaagaaattataaaggaaaaggagcctcccaaacaagggaaggagaaggccaagaaggcagagcagatggagtatgagcgccaagtggcttcattaaaagcagccaatgcagctgaaaatgacttctccgtgtcccaggcggagatgtcctcccgccaagccatgttagaaaatgcatctgacatcaagctggagaagttcagcatctccgctcatggcaaggagctgttcgtcaatgcagacctgtacattgtagccggccgccgctacgggctggtaggacccaatggcaagggcaagaccacactcctcaagcacattgccaaccgagccctgagcatccctcccaacattgatgtgttgctgtgtgagcaggaggtggtagcagatgagacaccagcagtccaggctgttcttcgagctgacaccaagcgattgaagctgctggaagaggagcggcggcttcagggacagctggaacaaggggatgacacagctgctgagaggctagagaaggtgtatgaggaattgcgggccactggggcggcagctgcagaggccaaagcacggcggatcctggctggcctgggctttgaccctgaaatgcagaatcgacccacacagaagttctcagggggctggcgcatgcgtgtctccctggccagggcactgttcatggagcccacactgctgatgctggatgagcccaccaaccacctggacctcaacgctgtcatctggcttaataactacctccagggctggcggaagaccttgctgatcgtctcccatgaccagggcttcttggatgatgtctgcactgatatcatccacctcgatgcccagcggctccactactataggggcaattacatgaccttcaaaaagatgtaccagcagaagcagaaagaactgctgaaacagtatgagaagcaagagaaaaagctgaaggagctgaaggcaggcgggaagtccaccaagcaggcggaaaaacaaacgaaggaagccctgactcggaagcagcagaaatgccgacggaaaaaccaagatgaggaatcccaggaggcccctgagctcctgaagcgccctaaggagtacactgtgcgcttcacttttccagaccccccaccactcagccctccagtgctgggtctgcatggtgtgacattcggctaccagggacagaaaccactctttaagaacttggattttggcatcgacatggattcaaggatttgcattgtgggccctaatggtgtggggaagagtacgctactcctgctgctgactggcaagctgacaccgacccatggggaaatgagaaagaaccaccggctgaaaattggcttcttcaaccagcagtatgcagagcagctgcgcatggaggagacgcccactgagtacctgcagcggggcttcaacctgccctaccaggatgcccgcaagtgcctgggccgcttcggcctggagagtcacgcccacaccatccagatctgcaaactctctggtggtcagaaggcgcgagttgtgtttgctgagctggcctgtcgggaacctgatgtcctcatcttggacgagccaaccaataacctggacatagagtctattgatgctctaggggaggccatcaatgaatacaagggtgctgtgatcgttgtcagccatgatgcccgactcatcacagaaaccaattgccagctgtgggtggtggaggagcagagtgttagccaaatcgatggtgactttgaagactacaagcgggaggtgttggaggccctgggtgaagtcatggtcagccggccccgagagtgagctttccttcccagaagtctcccgagagacatatttgtgtggcctagaagtcctctgtggtctcccctcctctgaagactgcctctggcctgcagctgacctggcaaccattcaggcacatgaaggtggagtgtgaccttgatgtgaccgggatcccactctgattgcatccatttctctgaaagacttgtttgttctgcttctcttcatataactgagctggccttatccttggcatccccctaaacaaacaagaggtgaccaccttattgtgaggttccatccagccaagtttatgtggcctattgtctcaggactctcatcactcagaagcctgcctctgatttaccctacagcttcaggcccagctgccccccagtctttgggtggtgctgttcttttctggtggatttaatgctgactcactggtacaaacagctgttgaagctcagagctggaggtgagcttctgaggcctttgccattatccagcccaagatttggtgcctgcagcctcttgtctggttgaggacttggggcaggaaaggaatgctgctgaacttgaatttccctttacaaggggaagaaataaaggaaaggagttgctgccgac

SEQ ID NO: 110248 - DNA, 3250 bp, Homo sapiens
  Payload ID: 1635
  Gene Symbol: ABCF1
  Gene Name: ATP-binding cassette, sub-family F (GCN20), member 1
  Uniprot ID: Q8NE71
  ENST ID: ENST00000383587
  CDS Start-End: 96-2519
gcgccagcttggagagccagccccatcggggttccccgccgccggaagcggaaatagcaccgggcgccgccacagtagctgtaactgccaccgcgatgccgaaggcgcccaagcagcagccgccggagcccgagtggatcggggacggagagagcacgagcccatcagacaaagtggtgaagaaagggaagaaggacaagaagatcaaaaaaacgttctttgaagagctggcagtagaagataaacaggctggggaagaagagaaagtgctcaaggagaaggagcagcagcagcagcaacagcaacagcagcaaaaaaaaaagcgagatacccgaaaaggcaggcggaagaaggatgtggatgatgatggagaagagaaagagctcatggagcgtcttaagaagctctcagtgccaaccagtgatgaggaggatgaagtacccgccccaaaaccccgcggagggaagaaaaccaagggtggtaatgtttttgcagccctgattcaggatcagagtgaggaagaggaggaggaagaaaaacatcctcctaagcctgccaagccggagaagaatcggatcaataaggccgtatctgaggaacagcagcctgcactcaagggcaaaaagggaaaggaagagaagtcaaaagggaaggctaagcctcaaaataaattcgctgctctggacaatgaagaggaggataaagaagaagaaattataaaggaaaaggagcctcccaaacaagggaaggagaaggccaagaaggcagagcagatggagtatgagcgccaagtggcttcattaaaagcagccaatgcagctgaaaatgacttctccgtgtcccaggcggagatgtcctcccgccaagccatgttagaaaatgcatctgacatcaagctggagaagttcagcatctccgctcatggcaaggagctgttcgtcaatgcagacctgtacattgtagccggccgccgctacgggctggtaggacccaatggcaagggcaagaccacactcctcaagcacattgccaaccgagccctgagcatccctcccaacattgatgtgttgctgtgtgagcaggaggtggtagcagatgagacaccagcagtccaggctgttcttcgagctgacaccaagcgattgaagctgctggaagaggagcggcggcttcagggacagctggaacaaggggatgacacagctgctgagaggctagagaaggtgtatgaggaattgcgggccactggggcggcagctgcagaggccaaagcacggcggatcctggctggcctgggctttgaccctgaaatgcagaatcgacccacacagaagttctcagggggctggcgcatgcgtgtctccctggccagggcactgttcatggagcccacactgctgatgctggatgagcccaccaaccacctggacctcaacgctgtcatctggcttaataactacctccagggctggcggaagaccttgctgatcgtctcccatgaccagggcttcttggatgatgtctgcactgatatcatccacctcgatgcccagcggctccactactataggggcaattacatgaccttcaaaaagatgtaccagcagaagcagaaagaactgctgaaacagtatgagaagcaagagaaaaagctgaaggagctgaaggcaggcgggaagtccaccaagcaggcggaaaaacaaacgaaggaagccctgactcggaagcagcagaaatgccgacggaaaaaccaagatgaggaatcccaggaggcccctgagctcctgaagcgccctaaggagtacactgtgcgcttcacttttccagaccccccaccactcagccctccagtgctgggtctgcatggtgtgacattcggctaccagggacagaaaccactctttaagaacttggattttggcatcgacatggattcaaggatttgcattgtgggccctaatggtgtggggaagagtacgctactcctgctgctgactggcaagctgacaccgacccatggggaaatgagaaagaaccaccggctgaaaattggcttcttcaaccagcagtatgcagagcagctgcgcatggaggagacgcccactgagtacctgcagcggggcttcaacctgccctaccaggatgcccgcaagtgcctgggccgcttcggcctggagagtcacgcccacaccatccagatctgcaaactctctggtggtcagaaggcgcgagttgtgtttgctgagctggcctgtcgggaacctgatgtcctcatcttggacgagccaaccaataacctggacatagagtctattgatgctctaggggaggccatcaatgaatacaagggtgctgtgatcgttgtcagccatgatgcccgactcatcacagaaaccaattgccagctgtgggtggtggaggagcagagtgttagccaaatcgatggtgactttgaagactacaagcgggaggtgttggaggccctgggtgaagtcatggtcagccggccccgagagtgaagctttccttcccagaagtctcccgagagacatatttgtgtggcctagaagtcctctgtggtctcccctcctctgaagactgcctctggcctgcagctgacctggcaaccattcaggcacatgaaggtggagtgtgaccttgatgtgaccgggatcccactctgattgcatccatttctctgaaagacttgtttgttctgcttctcttcatataactgagctggccttatccttggcatccccctaaacaaacaagaggtgaccaccttattgtgaggttccatccagccaagtttatgtggcctattgtctcaggactctcatcactcagaagcctgcctctgatttaccctacagcttcaggcccagctgccccccagtctttgggtggtgctgttcttttctggtggatttaatgctgactcactggtacaaacagctgttgaagctcagagctggaggtgagcttctgaggcctttgccattatccagcccaagatttggtgcctgcagcctcttgtctggttgaggacttggggcaggaaaggaatgctgctgaacttgaatttccctttacaaggggaagaaataaaggaaaggagttgctgccgacctgtcactgtttggagattgatgggagttggaactgttctcagtcttgatttgctttattcagttttctagcagcttttaatagtcccctcttccccactaaatggatcttgtttgca

SEQ ID NO: 110249 - DNA, 3381 bp, Homo sapiens
  Payload ID: 1635
  Gene Symbol: ABCF1
  Gene Name: ATP-binding cassette, sub-family F (GCN20), member 1
  Uniprot ID: Q8NE71
  ENST ID: ENST00000383588
  CDS Start-End: 113-2650
cgggggcggggttggccgcgccagcttggagagccagccccatcggggttccccgccgccggaagcggaaatagcaccgggcgccgccacagtagctgtaactgccaccgcgatgccgaaggcgcccaagcagcagccgccggagcccgagtggatcggggacggagagagcacgagcccatcagacaaagtggtgaagaaagggaagaaggacaagaagatcaaaaaaacgttctttgaagagctggcagtagaagataaacaggctggggaagaagagaaagtgctcaaggagaaggagcagcagcagcagcaacagcaacagcagcaaaaaaaaaagcgagatacccgaaaaggcaggcggaagaaggatgtggatgatgatggagaagagaaagagctcatggagcgtcttaagaagctctcagtgccaaccagtgatgaggaggatgaagtacccgccccaaaaccccgcggagggaagaaaaccaagggtggtaatgtttttgcagccctgattcaggatcagagtgaggaagaggaggaggaagaaaaacatcctcctaagcctgccaagccggagaagaatcggatcaataaggccgtatctgaggaacagcagcctgcactcaagggcaaaaagggaaaggaagagaagtcaaaagggaaggctaagcctcaaaataaattcgctgctctggacaatgaagaggaggataaagaagaagaaattataaaggaaaaggagcctcccaaacaagggaaggagaaggccaagaaggcagagcagggttcagaggaagaaggagaaggggaagaagaggaggaggaaggaggagagtctaaggcagatgatccctatgctcatcttagcaaaaaggagaagaaaaagctgaaaaaacagatggagtatgagcgccaagtggcttcattaaaagcagccaatgcagctgaaaatgacttctccgtgtcccaggcggagatgtcctcccgccaagccatgttagaaaatgcatctgacatcaagctggagaagttcagcatctccgctcatggcaaggagctgttcgtcaatgcagacctgtacattgtagccggccgccgctacgggctggtaggacccaatggcaagggcaagaccacactcctcaagcacattgccaaccgagccctgagcatccctcccaacattgatgtgttgctgtgtgagcaggaggtggtagcagatgagacaccagcagtccaggctgttcttcgagctgacaccaagcgattgaagctgctggaagaggagcggcggcttcagggacagctggaacaaggggatgacacagctgctgagaggctagagaaggtgtatgaggaattgcgggccactggggcggcagctgcagaggccaaagcacggcggatcctggctggcctgggctttgaccctgaaatgcagaatcgacccacacagaagttctcagggggctggcgcatgcgtgtctccctggccagggcactgttcatggagcccacactgctgatgctggatgagcccaccaaccacctggacctcaacgctgtcatctggcttaataactacctccagggctggcggaagaccttgctgatcgtctcccatgaccagggcttcttggatgatgtctgcactgatatcatccacctcgatgcccagcggctccactactataggggcaattacatgaccttcaaaaagatgtaccagcagaagcagaaagaactgctgaaacagtatgagaagcaagagaaaaagctgaaggagctgaaggcaggcgggaagtccaccaagcaggcggaaaaacaaacgaaggaagccctgactcggaagcagcagaaatgccgacggaaaaaccaagatgaggaatcccaggaggcccctgagctcctgaagcgccctaaggagtacactgtgcgcttcacttttccagaccccccaccactcagccctccagtgctgggtctgcatggtgtgacattcggctaccagggacagaaaccactctttaagaacttggattttggcatcgacatggattcaaggatttgcattgtgggccctaatggtgtggggaagagtacgctactcctgctgctgactggcaagctgacaccgacccatggggaaatgagaaagaaccaccggctgaaaattggcttcttcaaccagcagtatgcagagcagctgcgcatggaggagacgcccactgagtacctgcagcggggcttcaacctgccctaccaggatgcccgcaagtgcctgggccgcttcggcctggagagtcacgcccacaccatccagatctgcaaactctctggtggtcagaaggcgcgagttgtgtttgctgagctggcctgtcgggaacctgatgtcctcatcttggacgagccaaccaataacctggacatagagtctattgatgctctaggggaggccatcaatgaatacaagggtgctgtgatcgttgtcagccatgatgcccgactcatcacagaaaccaattgccagctgtgggtggtggaggagcagagtgttagccaaatcgatggtgactttgaagactacaagcgggaggtgttggaggccctgggtgaagtcatggtcagccggccccgagagtgaagctttccttcccagaagtctcccgagagacatatttgtgtggcctagaagtcctctgtggtctcccctcctctgaagactgcctctggcctgcagctgacctggcaaccattcaggcacatgaaggtggagtgtgaccttgatgtgaccgggatcccactctgattgcatccatttctctgaaagacttgtttgttctgcttctcttcatataactgagctggccttatccttggcatccccctaaacaaacaagaggtgaccaccttattgtgaggttccatccagccaagtttatgtggcctattgtctcaggactctcatcactcagaagcctgcctctgatttaccctacagcttcaggcccagctgccccccagtctttgggtggtgctgttcttttctggtggatttaatgctgactcactggtacaaacagctgttgaagctcagagctggaggtgagcttctgaggcctttgccattatccagcccaagatttggtgcctgcagcctcttgtctggttgaggacttggggcaggaaaggaatgctgctgaacttgaatttccctttacaaggggaagaaataaaggaaaggagttgctgccgacctgtcactgtttggagattgatgggagttggaactgttctcagtcttgatttgctttattcagttttctagcagcttttaatagtcccctcttccccactaaatggatcttgtttgca

SEQ ID NO: 110250 - DNA, 1484 bp, Homo sapiens
  Payload ID: 1635
  Gene Symbol: ABCF1
  Gene Name: ATP-binding cassette, sub-family F (GCN20), member 1
  ENST ID: ENST00000400609
  CDS Start-End: 37-753
ccgggcgccgccacagtagctgtaactgccaccgcgatgccgaaggcgcccaagcagcagccgccggagcccgagtggatcggggacggagagagcacgagcccatcagacaaagtggtgaagaaagggaagaaggacaagaagatcaaaaaaacgttctttgaagagctggcagtagaagataaacaggctggggaagaagagaaagtgctcaaggagaaggagcagcagcagcagcaacagcaacagcagcaaaaaaaaaagcgagatacccgaaaaggcaggcggaagaaggatgtggatgatgatggagaagagaaagagctcatggagcgtcttaagaagctctcacggggcttcaacctgccctaccaggatgcccgcaagtgcctgggccgcttcggcctggagagtcacgcccacaccatccagatctgcaaactctctggtggtcagaaggcgcgagttgtgtttgctgagctggcctgtcgggaacctgatgtcctcatcttggacgagccaaccaataacctggacatagagtctattgatgctctaggggaggccatcaatgaatacaagggtgctgtgatcgttgtcagccatgatgcccgactcatcacagaaaccaattgccagctgtgggtggtggaggagcagagtgttagccaaatcgatggtgactttgaagactacaagcgggaggtgttggaggccctgggtgaagtcatggtcagccggccccgagagtgaagctttccttcccagaagtctcccgagagacatatttgtgtggcctagaagtcctctgtggtctcccctcctctgaagactgcctctggcctgcagctgacctggcaaccattcaggcacatgaaggtggagtgtgaccttgatgtgaccgggatcccactctgattgcatccatttctctgaaagacttgtttgttctgcttctcttcatataactgagctggccttatccttggcatccccctaaacaaacaagaggtgaccaccttattgtgaggttccatccagccaagtttatgtggcctattgtctcaggactctcatcactcagaagcctgcctctgatttaccctacagcttcaggcccagctgccccccagtctttgggtggtgctgttcttttctggtggatttaatgctgactcactggtacaaacagctgttgaagctcagagctggaggtgagcttctgaggcctttgccattatccagcccaagatttggtgcctgcagcctcttgtctggttgaggacttggggcaggaaaggaatgctgctgaacttgaatttccctttacaaggggaagaaataaaggaaaggagttgctgccgacctgtcactgtttggagattgatgggagttggaactgttctcagtcttgatttgctttattcagttttctagcagcttttaatagtcccctcttccccactaaatggatcttgtttgca

SEQ ID NO: 110251 - DNA, 3381 bp, Homo sapiens; identical to SEQ ID NO: 110249
  Payload ID: 1635
  Gene Symbol: ABCF1
  Gene Name: ATP-binding cassette, sub-family F (GCN20), member 1
  Uniprot ID: Q8NE71
  ENST ID: ENST00000419893
  CDS Start-End: 113-2650

SEQ ID NO: 110252 - DNA, 3250 bp, Homo sapiens; identical to SEQ ID NO: 110248
  Payload ID: 1635
  Gene Symbol: ABCF1
  Gene Name: ATP-binding cassette, sub-family F (GCN20), member 1
  Uniprot ID: Q8NE71
  ENST ID: ENST00000452530
  CDS Start-End: 96-2519

SEQ ID NO: 110253 - DNA, 1483 bp, Homo sapiens
  Payload ID: 1635
  Gene Symbol: ABCF1
  Gene Name: ATP-binding cassette, sub-family F (GCN20), member 1
  ENST ID: ENST00000454094
  CDS Start-End: 37-753
ccgggcgccgccacagtagctgtaactgccaccgcgatgccgaaggcgcccaagcagcagccgccggagcccgagtggatcggggacggagagagcacgagcccatcagacaaagtggtgaagaaagggaagaaggacaagaagatcaaaaaaacgttctttgaagagctggcagtagaagataaacaggctggggaagaagagaaagtgctcaaggagaaggagcagcagcagcagcaacagcaacagcagcaaaaaaaaaagcgagatacccgaaaaggcaggcggaagaaggatgtggatgatgatggagaagagaaagagctcatggagcgtcttaagaagctctcacggggcttcaacctgccctaccaggatgcccgcaagtgcctgggccgcttcggcctggagagtcacgcccacaccatccagatctgcaaactctctggtggtcagaaggcgcgagttgtgtttgctgagctggcctgtcgggaacctgatgtcctcatcttggacgagccaaccaataacctggacatagagtctattgatgctctaggggaggccatcaatgaatacaagggtgctgtgatcgttgtcagccatgatgcccgactcatcacagaaaccaattgccagctgtgggtggtggaggagcagagtgttagccaaatcgatggtgactttgaagactacaagcgggaggtgttggaggccctgggtgaagtcatggtcagccggccccgagagtgagctttccttcccagaagtctcccgagagacatatttgtgtggcctagaagtcctctgtggtctcccctcctctgaagactgcctctggcctgcagctgacctggcaaccattcaggcacatgaaggtggagtgtgaccttgatgtgaccgggatcccactctgattgcatccatttctctgaaagacttgtttgttctgcttctcttcatataactgagctggccttatccttggcatccccctaaacaaacaagaggtgaccaccttattgtgaggttccatccagccaagtttatgtggcctattgtctcaggactctcatcactcagaagcctgcctctgatttaccctacagcttcaggcccagctgccccccagtctttgggtggtgctgttcttttctggtggatttaatgctgactcactggtacaaacagctgttgaagctcagagctggaggtgagcttctgaggcctttgccattatccagcccaagatttggtgcctgcagcctcttgtctggttgaggacttggggcaggaaaggaatgctgctgaacttgaatttccctttacaaggggaagaaataaaggaaaggagttgctgccgacctgtcactgtttggagattgatgggagttggaactgttctcagtcttgatttgctttattcagttttctagcagcttttaatagtcccctcttccccactaaatggatcttgtttgca

SEQ ID NO: 110254 - DNA, 3250 bp, Homo sapiens; identical to SEQ ID NO: 110248
  Payload ID: 1635
  Gene Symbol: ABCF1
  Gene Name: ATP-binding cassette, sub-family F (GCN20), member 1
  Uniprot ID: Q8NE71
  ENST ID: ENST00000420257
  CDS Start-End: 96-2519

SEQ ID NO: 110255 - DNA, 3249 bp, Homo sapiens
  Payload ID: 1635
  Gene Symbol: ABCF1
  Gene Name: ATP-binding cassette, sub-family F (GCN20), member 1
  Uniprot ID: Q8NE71
  ENST ID: ENST00000421042
  CDS Start-End: 96-2519
gcgccagcttggagagccagccccatcggggttccccgccgccggaagcggaaatagcaccgggcgccgccacagtagctgtaactgccaccgcgatgccgaaggcgcccaagcagcagccgccggagcccgagtggatcggggacggagagagcacgagcccatcagacaaagtggtgaagaaagggaagaaggacaagaagatcaaaaaaacgttctttgaagagctggcagtagaagataaacaggctggggaagaagagaaagtgctcaaggagaaggagcagcagcagcagcaacagcaacagcagcaaaaaaaaaagcgagatacccgaaaaggcaggcggaagaaggatgtggatgatgatggagaagagaaagagctcatggagcgtcttaagaagctctcagtgccaaccagtgatgaggaggatgaagtacccgccccaaaaccccgcggagggaagaaaaccaagggtggtaatgtttttgcagccctgattcaggatcagagtgaggaagaggaggaggaagaaaaacatcctcctaagcctgccaagccggagaagaatcggatcaataaggccgtatctgaggaacagcagcctgcactcaagggcaaaaagggaaaggaagagaagtcaaaagggaaggctaagcctcaaaataaattcgctgctctggacaatgaagaggaggataaagaagaagaaattataaaggaaaaggagcctcccaaacaagggaaggagaaggccaagaaggcagagcagatggagtatgagcgccaagtggcttcattaaaagcagccaatgcagctgaaaatgacttctccgtgtcccaggcggagatgtcctcccgccaagccatgttagaaaatgcatctgacatcaagctggagaagttcagcatctccgctcatggcaaggagctgttcgtcaatgcagacctgtacattgtagccggccgccgctacgggctggtaggacccaatggcaagggcaagaccacactcctcaagcacattgccaaccgagccctgagcatccctcccaacattgatgtgttgctgtgtgagcaggaggtggtagcagatgagacaccagcagtccaggctgttcttcgagctgacaccaagcgattgaagctgctggaagaggagcggcggcttcagggacagctggaacaaggggatgacacagctgctgagaggctagagaaggtgtatgaggaattgcgggccactggggcggcagctgcagaggccaaagcacggcggatcctggctggcctgggctttgaccctgaaatgcagaatcgacccacacagaagttctcagggggctggcgcatgcgtgtctccctggccagggcactgttcatggagcccacactgctgatgctggatgagcccaccaaccacctggacctcaacgctgtcatctggcttaataactacctccagggctggcggaagaccttgctgatcgtctcccatgaccagggcttcttggatgatgtctgcactgatatcatccacctcgatgcccagcggctccactactataggggcaattacatgaccttcaaaaagatgtaccagcagaagcagaaagaactgctgaaacagtatgagaagcaagagaaaaagctgaaggagctgaaggcaggcgggaagtccaccaagcaggcggaaaaacaaacgaaggaagccctgactcggaagcagcagaaatgccgacggaaaaaccaagatgaggaatcccaggaggcccctgagctcctgaagcgccctaaggagtacactgtgcgcttcacttttccagaccccccaccactcagccctccagtgctgggtctgcatggtgtgacattcggctaccagggacagaaaccactctttaagaacttggattttggcatcgacatggattcaaggatttgcattgtgggccctaatggtgtggggaagagtacgctactcctgctgctgactggcaagctgacaccgacccatggggaaatgagaaagaaccaccggctgaaaattggcttcttcaaccagcagtatgcagagcagctgcgcatggaggagacgcccactgagtacctgcagcggggcttcaacctgccctaccaggatgcccgcaagtgcctgggccgcttcggcctggagagtcacgcccacaccatccagatctgcaaactctctggtggtcagaaggcgcgagttgtgtttgctgagctggcctgtcgggaacctgatgtcctcatcttggacgagccaaccaataacctggacatagagtctattgatgctctaggggaggccatcaatgaatacaagggtgctgtgatcgttgtcagccatgatgcccgactcatcacagaaaccaattgccagctgtgggtggtggaggagcagagtgttagccaaatcgatggtgactttgaagactacaagcgggaggtgttggaggccctgggtgaagtcatggtcagccggccccgagagtgagctttccttcccagaagtctcccgagagacatatttgtgtggcctagaagtcctctgtggtctcccctcctctgaagactgcctctggcctgcagctgacctggcaaccattcaggcacatgaaggtggagtgtgaccttgatgtgaccgggatcccactctgattgcatccatttctctgaaagacttgtttgttctgcttctcttcatataactgagctggccttatccttggcatccccctaaacaaacaagaggtgaccaccttattgtgaggttccatccagccaagtttatgtggcctattgtctcaggactctcatcactcagaagcctgcctctgatttaccctacagcttcaggcccagctgccccccagtctttgggtggtgctgttcttttctggtggatttaatgctgactcactggtacaaacagctgttgaagctcagagctggaggtgagcttctgaggcctttgccattatccagcccaagatttggtgcctgcagcctcttgtctggttgaggacttggggcaggaaaggaatgctgctgaacttgaatttccctttacaaggggaagaaataaaggaaaggagttgctgccgacctgtcactgtttggagattgatgggagttggaactgttctcagtcttgatttgctttattcagttttctagcagcttttaatagtcccctcttccccactaaatggatcttgtttgca

SEQ ID NO: 110256 - DNA, 1484 bp, Homo sapiens; identical to SEQ ID NO: 110250
  Payload ID: 1635
  Gene Symbol: ABCF1
  Gene Name: ATP-binding cassette, sub-family F (GCN20), member 1
  ENST ID: ENST00000416932
  CDS Start-End: 37-753

SEQ ID NO: 110257 - DNA, 1074 bp, Homo sapiens
  Payload ID: 1635
  Gene Symbol: ABCF1
  Gene Name: ATP-binding cassette, sub-family F (GCN20), member 1
  ENST ID: ENST00000426591
  CDS Start-End: 56-1074
gccggaagcggaaatagcaccgggcgccgccacagtagctgtaactgccaccgcgatgccgaaggcgcccaagcagcagccgccggagcccgagtggatcggggacggagagagcacgagcccatcagacaaagtggtgaagaaagggaagaaggacaagaagatcaaaaaaacgttctttgaagagctggcagtagaagataaacaggctggggaagaagagaaagtgctcaaggagaaggagcagcagcagcagcaacagcaacagcagcagcaaaaaaaaaagcgagatacccgaaaaggcaggcggaagaaggatgtggatgatgatggagaagagaaagagctcatggagcgtcttaagaagctctcagtgccaaccagtgatgaggaggatgaagtacccgccccaaaaccccgcggagggaagaaaaccaagggtggtaatgtttttgcagccctgattcaggatcagagtgaggaagaggaggaggaagaaaaacatcctcctaagcctgccaagccggagaagaatcggatcaataaggccgtatctgaggaacagcagcctgcactcaagggcaaaaagggaaaggaagagaagtcaaaagggaaggctaagcctcaaaataaattcgctgctctggacaatgaagaggaggataaagaagaagaaattataaaggaaaaggagcctcccaaacaagggaaggagaaggccaagaaggcagagcagggttcagaggaagaaggagaaggggaagaagaggaggaggaaggaggagagtctaaggcagatgatccctatgctcatcttagcaaaaaggagaagaaaaagctgaaaaaacagatggagtatgagcgccaagtggcttcattaaaagcagccaatgcagctgaaaatgacttctccgtgtcccaggcggagatgtcctcccgccaagccatgttagaaaatgcatctgacatcaagctggagaagttcagcatctccgctcatggcaaggagctgttcgtcaatgcagacctgtacattgtagccggccgccgctacgggctggtaggacccaatgg

SEQ ID NO: 110258 - DNA, 1483 bp, Homo sapiens; identical to SEQ ID NO: 110253
  Payload ID: 1635
  Gene Symbol: ABCF1
  Gene Name: ATP-binding cassette, sub-family F (GCN20), member 1
  ENST ID: ENST00000421608
  CDS Start-End: 37-753

SEQ ID NO: 110259 - DNA, 1484 bp, Homo sapiens; identical to SEQ ID NO: 110250
  Payload ID: 1635
  Gene Symbol: ABCF1
  Gene Name: ATP-binding cassette, sub-family F (GCN20), member 1
  ENST ID: ENST00000456791
  CDS Start-End: 37-753

SEQ ID NO: 110260 - DNA, 1484 bp, Homo sapiens; identical to SEQ ID NO: 110250
  Payload ID: 1635
  Gene Symbol: ABCF1
  Gene Name: ATP-binding cassette, sub-family F (GCN20), member 1
  ENST ID: ENST00000457970
  CDS Start-End: 37-753

SEQ ID NO: 110261 - DNA, 1074 bp, Homo sapiens; identical to SEQ ID NO: 110257
  Payload ID: 1635
  Gene Symbol: ABCF1
  Gene Name: ATP-binding cassette, sub-family F (GCN20), member 1
  ENST ID: ENST00000418552
  CDS Start-End: 56-1074

SEQ ID NO: 110262 - DNA, 3250 bp, Homo sapiens; identical to SEQ ID NO: 110248
  Payload ID: 1635
  Gene Symbol: ABCF1
  Gene Name: ATP-binding cassette, sub-family F (GCN20), member 1
  Uniprot ID: Q8NE71
  ENST ID: ENST00000448939
  CDS Start-End: 96-2519

SEQ ID NO: 110263 - DNA, 3249 bp, Homo sapiens; identical to SEQ ID NO: 110255
  Payload ID: 1635
  Gene Symbol: ABCF1
  Gene Name: ATP-binding cassette, sub-family F (GCN20), member 1
  Uniprot ID: Q8NE71
  ENST ID: ENST00000412443
  CDS Start-End: 96-2519

SEQ ID NO: 110264 - DNA, 1074 bp, Homo sapiens; identical to SEQ ID NO: 110257
  Payload ID: 1635
  Gene Symbol: ABCF1
  Gene Name: ATP-binding cassette, sub-family F (GCN20), member 1
  ENST ID: ENST00000441867
  CDS Start-End: 56-1074

SEQ ID NO: 110265 - DNA, 1074 bp, Homo sapiens; identical to SEQ ID NO: 110257
  Payload ID: 1635
  Gene Symbol: ABCF1
  Gene Name: ATP-binding cassette, sub-family F (GCN20), member 1
  ENST ID: ENST00000441688
  CDS Start-End: 56-1074

SEQ ID NO: 110266 - DNA, 1074 bp, Homo sapiens; identical to SEQ ID NO: 110257
  Payload ID: 1635
  Gene Symbol: ABCF1
  Gene Name: ATP-binding cassette, sub-family F (GCN20), member 1
  ENST ID: ENST00000424994
  CDS Start-End: 56-1074

SEQ ID NO: 110267 - DNA, 1074 bp, Homo sapiens; identical to SEQ ID NO: 110257
  Payload ID: 1635
  Gene Symbol: ABCF1
  Gene Name: ATP-binding cassette, sub-family F (GCN20), member 1
  ENST ID: ENST00000429395
  CDS Start-End: 56-1074

SEQ ID NO: 110268 - DNA, 3381 bp, Homo sapiens; identical to SEQ ID NO: 110249
  Payload ID: 1635
  Gene Symbol: ABCF1
  Gene Name: ATP-binding cassette, sub-family F (GCN20), member 1
  Uniprot ID: Q8NE71
  ENST ID: ENST00000423247
  CDS Start-End: 113-2650

SEQ ID NO: 110269 - DNA, 3380 bp, Homo sapiens
  Payload ID: 1635
  Gene Symbol: ABCF1
  Gene Name: ATP-binding cassette, sub-family F (GCN20), member 1
  Uniprot ID: Q8NE71
  ENST ID: ENST00000457078
  CDS Start-End: 113-2650
cgggggcggggttggccgcgccagcttggagagccagccccatcggggttccccgccgccggaagcggaaatagcaccgggcgccgccacagtagctgtaactgccaccgcgatgccgaaggcgcccaagcagcagccgccggagcccgagtggatcggggacggagagagcacgagcccatcagacaaagtggtgaagaaagggaagaaggacaagaagatcaaaaaaacgttctttgaagagctggcagtagaagataaacaggctggggaagaagagaaagtgctcaaggagaaggagcagcagcagcagcaacagcaacagcagcaaaaaaaaaagcgagatacccgaaaaggcaggcggaagaaggatgtggatgatgatggagaagagaaagagctcatggagcgtcttaagaagctctcagtgccaaccagtgatgaggaggatgaagtacccgccccaaaaccccgcggagggaagaaaaccaagggtggtaatgtttttgcagccctgattcaggatcagagtgaggaagaggaggaggaagaaaaacatcctcctaagcctgccaagccggagaagaatcggatcaataaggccgtatctgaggaacagcagcctgcactcaagggcaaaaagggaaaggaagagaagtcaaaagggaaggctaagcctcaaaataaattcgctgctctggacaatgaagaggaggataaagaagaagaaattataaaggaaaaggagcctcccaaacaagggaaggagaaggccaagaaggcagagcagggttcagaggaagaaggagaaggggaagaagaggaggaggaaggaggagagtctaaggcagatgatccctatgctcatcttagcaaaaaggagaagaaaaagctgaaaaaacagatggagtatgagcgccaagtggcttcattaaaagcagccaatgcagctgaaaatgacttctccgtgtcccaggcggagatgtcctcccgccaagccatgttagaaaatgcatctgacatcaagctggagaagttcagcatctccgctcatggcaaggagctgttcgtcaatgcagacctgtacattgtagccggccgccgctacgggctggtaggacccaatggcaagggcaagaccacactcctcaagcacattgccaaccgagccctgagcatccctcccaacattgatgtgttgctgtgtgagcaggaggtggtagcagatgagacaccagcagtccaggctgttcttcgagctgacaccaagcgattgaagctgctggaagaggagcggcggcttcagggacagctggaacaaggggatgacacagctgctgagaggctagagaaggtgtatgaggaattgcgggccactggggcggcagctgcagaggccaaagcacggcggatcctggctggcctgggctttgaccctgaaatgcagaatcgacccacacagaagttctcagggggctggcgcatgcgtgtctccctggccagggcactgttcatggagcccacactgctgatgctggatgagcccaccaaccacctggacctcaacgctgtcatctggcttaataactacctccagggctggcggaagaccttgctgatcgtctcccatgaccagggcttcttggatgatgtctgcactgatatcatccacctcgatgcccagcggctccactactataggggcaattacatgaccttcaaaaagatgtaccagcagaagcagaaagaactgctgaaacagtatgagaagcaagagaaaaagctgaaggagctgaaggcaggcgggaagtccaccaagcaggcggaaaaacaaacgaaggaagccctgactcggaagcagcagaaatgccgacggaaaaaccaagatgaggaatcccaggaggcccctgagctcctgaagcgccctaaggagtacactgtgcgcttcacttttccagaccccccaccactcagccctccagtgctgggtctgcatggtgtgacattcggctaccagggacagaaaccactctttaagaacttggattttggcatcgacatggattcaaggatttgcattgtgggccctaatggtgtggggaagagtacgctactcctgctgctgactggcaagctgacaccgacccatggggaaatgagaaagaaccaccggctgaaaattggcttcttcaaccagcagtatgcagagcagctgcgcatggaggagacgcccactgagtacctgcagcggggcttcaacctgccctaccaggatgcccgcaagtgcctgggccgcttcggcctggagagtcacgcccacaccatccagatctgcaaactctctggtggtcagaaggcgcgagttgtgtttgctgagctggcctgtcgggaacctgatgtcctcatcttggacgagccaaccaataacctggacatagagtctattgatgctctaggggaggccatcaatgaatacaagggtgctgtgatcgttgtcagccatgatgcccgactcatcacagaaaccaattgccagctgtgggtggtggaggagcagagtgttagccaaatcgatggtgactttgaagactacaagcgggaggtgttggaggccctgggtgaagtcatggtcagccggccccgagagtgagctttccttcccagaagtctcccgagagacatatttgtgtggcctagaagtcctctgtggtctcccctcctctgaagactgcctctggcctgcagctgacctggcaaccattcaggcacatgaaggtggagtgtgaccttgatgtgaccgggatcccactctgattgcatccatttctctgaaagacttgtttgttctgcttctcttcatataactgagctggccttatccttggcatccccctaaacaaacaagaggtgaccaccttattgtgaggttccatccagccaagtttatgtggcctattgtctcaggactctcatcactcagaagcctgcctctgatttaccctacagcttcaggcccagctgccccccagtctttgggtggtgctgttcttttctggtggatttaatgctgactcactggtacaaacagctgttgaagctcagagctggaggtgagcttctgaggcctttgccattatccagcccaagatttggtgcctgcagcctcttgtctggttgaggacttggggcaggaaaggaatgctgctgaacttgaatttccctttacaaggggaagaaataaaggaaaggagttgctgccgacctgtcactgtttggagattgatgggagttggaactgttctcagtcttgatttgctttattcagttttctagcagcttttaatagtcccctcttccccactaaatggatcttgtttgca

SEQ ID NO: 110270 - DNA, 3381 bp, Homo sapiens; identical to SEQ ID NO: 110249
  Payload ID: 1635
  Gene Symbol: ABCF1
  Gene Name: ATP-binding cassette, sub-family F (GCN20), member 1
  Uniprot ID: Q8NE71
  ENST ID: ENST00000457111
  CDS Start-End: 113-2650

SEQ ID NO: 110271 - DNA, 3380 bp, Homo sapiens; identical to SEQ ID NO: 110269
  Payload ID: 1635
  Gene Symbol: ABCF1
  Gene Name: ATP-binding cassette, sub-family F (GCN20), member 1
  Uniprot ID: Q8NE71
  ENST ID: ENST00000426219
  CDS Start-End: 113-2650

SEQ ID NO: 110272 - DNA, 1074 bp, Homo sapiens; identical to SEQ ID NO: 110257
  Payload ID: 1635
  Gene Symbol: ABCF1
  Gene Name: ATP-binding cassette, sub-family F (GCN20), member 1
  ENST ID: ENST00000423030
  CDS Start-End: 56-1074

SEQ ID NO: 110273 - DNA, 606 bp, Homo sapiens
  Payload ID: 1635
  Gene Symbol: ABCF1
  Gene Name: ATP-binding cassette, sub-family F (GCN20), member 1
  ENST ID: ENST00000468958
  CDS Start-End: 291-606
ggaaatagcaccgggcgccgccacagtagctgtaactgccaccgcgatgccgaaggcgcccaagcagcagccgccggagcccgagtggatcggggacggagagagcacgagcccatcagttctttgaagagctggcagtagaagataaacaggctggggaagaagagaaagtgctcaaggagaaggagcagcagcagcagcaacagcaacagcagcaaaaaaaaaagcgagatacccgaaaaggcaggcggaagaaggatgtggatgatgatggagaagagaaagagctcatggagcgtcttaagaagctctcagtgccaaccagtgatgaggaggatgaagtacccgccccaaaaccccgcggagggaagaaaaccaagggtggtaatgtttttgcagccctgattcaggatcagagtgaggaagaggaggaggaagaaaaacatcctcctaagcctgccaagccggagaagaatcggatcaataaggccgtatctgaggaacagcagcctgcactcaagggcaaaaagggaaaggaagagaagtcaaaagggaaggctaagcctcaaaataaattcgctgctctggacaatgaagaggaggata

SEQ ID NO: 110274 - DNA, 2860 bp, Homo sapiens
  Payload ID: 1635
  Gene Symbol: ABCF1
  Gene Name: ATP-binding cassette, sub-family F (GCN20), member 1
  ENST ID: ENST00000475993
  CDS Start-End: 1-1789
tgctcatcttagcaaaaaggagaagaaaaagctgaaaaaacagatggagtatgagcgccaagtggcttcattaaaagcagccaatgcagctgaaaatgacttctccgtgtcccaggcggagatgtcctcccgccaagccatgttagaaaatgcatctgacatcaagctggagaagttcagcatctccgctcatggcaaggagctgttcgtcaatgcagacctgtacattgtagccggccgccgctacgggctggtaggacccaatggcaagggcaagaccacactcctcaagcacattgccaaccgagccctgagcatccctcccaacattgatgtgttgctgtgtgagcaggaggtggtagcagatgagacaccagcagtccaggctgttcttcgagctgacaccaagcgattgaagctgctggaagaggagcggcggcttcagggacagctggaacaaggggatgacacagctgctgagaggctagagaaggtgtatgaggaattgcgggccactggggcggcagctgcagaggccaaagcacggcggatcctggctggcctgggctttgaccctgaaatgcagaatcgacccacacagaagttctcagggggctggcgcatgcgtgtctccctggccagggcactgttcatggagcccacactgctgatgctggatgagcccaccaaccacctggacctcaacgctgtcatctggcttaataactacctccagggctggcggaagaccttgctgatcgtctcccatgaccagggcttcttggatgatgtctgcactgatatcatccacctcgatgcccagcggctccactactataggggcaattacatgaccttcaaaaagatgtaccagcagaagcagaaagaactgctgaaacagtatgagaagcaagagaaaaagctgaaggagctgaaggcaggcgggaagtccaccaagcaggcggaaaaacaaacgaaggaagccctgactcggaagcagcagaaatgccgacggaaaaaccaagatgaggaatcccaggaggcccctgagctcctgaagcgccctaaggagtacactgtgcgcttcacttttccagaccccccaccactcagccctccagtgctgggtctgcatggtgtgacattcggctaccagggacagaaaccactctttaagaacttggattttggcatcgacatggattcaaggatttgcattgtgggccctaatggtgtggggaagagtacgctactcctgctgctgactggcaagctgacaccgacccatggggaaatgagaaagaaccaccggctgaaaattggcttcttcaaccagcagtatgcagagcagctgcgcatggaggagacgcccactgagtacctgcagcggggcttcaacctgccctaccaggatgcccgcaagtgcctgggccgcttcggcctggagagtcacgcccacaccatccagatctgcaaactctctggtggtcagaaggcgcgagttgtgtttgctgagctggcctgtcgggaacctgatgtcctcatcttggacgagccaaccaataacctggacatagagtctattgatgctctaggggaggccatcaatgaatacaagggtgctgtgatcgttgtcagccatgatgcccgactcatcacagaaaccaattgccagctgtgggtggtggaggagcagagtgttagccaaatcgatggtgactttgaagactacaagcgggaggtgttggaggccctgggtgaagtcatggtcagccggccccgagagtgagctttccttcccagaagtctcccgagagacatatttgtgtggcctagaagtcctctgtggtctcccctcctctgaagactgcctctggcctgcagctgacctggcaaccattcaggcacatgaaggtggagtgtgaccttgatgtgaccgggatcccactctgattgcatccatttctctgaaagacttgtttgttctgcttctcttcatataactgagctggccttatccttggcatccccctaaacaaacaagaggtgaccaccttattgtgaggttccatccagccaagtttatgtggcctattgtctcaggactctcatcactcagaagcctgcctctgatttaccctacagcttcaggcccagctgccccccagtctttgggtggtgctgttcttttctggtggatttaatgctgactcactggtacaaacagctgttgaagctcagagctggagacggagtcttgctctgtcgccatcctggaatgcagtagcgttatctcggctcactgcaacctctgcctcctggattcaagcgattcccctgcctcagcctcccaagtagctgggactacaggtgcgtgccaccactcccggctaatttttttttttttttgagacagagtcttgctctgtcgcccaggctggagtgcagtggcgcgatctctgctcgctgcaagctccacctcccgggttcatgccattctcctgcctcagtctcctcagtagctgggattacaggcacccgccaccacacccacctaagtttttgtatttttagtagagaaggggtttcaccttgttagccaggatggtctccatctcctgacctcatgatctgcccgcttcggcctcccaaagtgctgggattacaggcgtgagccaccgcgcctggcaatttttgtatttttaatagagacggggtttcaccatgttggctaggatggtctccatctcctgaccttgggatttgcccgcctcggcctcccagagtgttgggattacaggtgtgagccaccgcgctcggccgagcttattcttaaaatacagtaaaaactttaagctct

SEQ ID NO: 110275 - DNA, 2185 bp, Homo sapiens
  Payload ID: 1636
  Gene Symbol: ABCF2
  Gene Name: ATP-binding cassette, sub-family F (GCN20), member 2
  Uniprot ID: Q9UG63
  ENST ID: ENST00000222388
  CDS Start-End: 47-1951
cccagctccctgaaacaacagtaacctacccctgtgggtcatcatcatgccctccgacctggccaagaagaaggcagccaaaaagaaggaggctgccaaagctcgacagcggcccagaaaaggacatgaagaaaatggagatgttgtcacagaaccacaggtggcagagaagaatgaggccaatggcagagagaccacagaagtagatttgctgaccaaggagctagaggactttgagatgaagaaagctgctgctcgagctgtcactggcgtcctggcctctcaccccaacagtactgatgttcacatcatcaacctctcacttacctttcatggtcaagagctgctcagtgacaccaaactggaattaaactcaggccgtcgttatggcctcattggtttaaatggaattggaaagtccatgctgctctctgctattgggaagcgtgaagtgcccatccctgagcacatcgacatctaccatctgactcgagagatgccccctagtgacaagacacccttgcattgtgtgatggaagtcgacacagagcgggccatgctggagaaagaggcagagcggctggctcatgaggatgcggagtgtgagaagctcatggagctctacgagcgcctggaggagctggatgccgacaaggcagagatgagggcctcgcggatcttgcatggactgggtttcacacctgccatgcagcgcaagaagctaaaagacttcagtgggggctggaggatgagggttgcccttgccagagccctctttattcggcccttcatgctgctcctggatgagcctaccaaccacctggacctagatgcttgcgtgtggttggaagaagaactaaaaacttttaagcgcatcttggtcctcgtctcccattcccaggattttctgaatggtgtctgtaccaatatcattcacatgcacaacaagaaactgaagtattatacgggtaattatgatcagtacgtgaagacgcggctagagctggaggagaaccagatgaagaggtttcactgggagcaagatcagattgcacacatgaagaactacattgcgaggtttggtcatggcagtgccaagctggcccggcaggcccagagcaaggagaagacgctacagaaaatgatggcatcaggactgacagagagggtcgtgagcgataagacactgtcattttatttcccaccatgtggcaagatccctccacctgtcattatggtgcaaaatgtgagcttcaagtatacaaaagatgggccttgcatctacaataatctagaatttggaattgaccttgacacacgagtggctctggtagggcccaatggagcagggaagtcaactcttctgaagctgctaactggagagctactacccacagatggcatgatccgaaaacactctcatgtcaagatagggcgttaccatcagcatttacaagagcagctggacttagatctctcacctttggagtacatgatgaagtgctacccagagatcaaggagaaggaagaaatgaggaagatcattgggcgatacggtctcactgggaaacaacaggtgagcccaatccggaacttgtcagacgggcagaagtgccgagtgtgtctggcctggctggcctggcagaacccccacatgctcttcctggatgaacccaccaatcacctggatatcgagaccatcgacgccctggcagatgccatcaatgagtttgagggtggtatgatgctggtcagccatgacttcagactcattcagcaggttgcacaggaaatttgggtctgtgagaagcagacaatcaccaagtggcctggagacatcctggcttacaaggagcacctcaagtccaagctggtggatgaggagccccagctcaccaagaggacccacaacgtgtgcaccctgacattggcatctctgccaaggccatgagcatcatgaactcgtttgtaaacgacgtgtttgagcagctggcgtgtgaggctgcccggctggcccagtactcgggccggaccaccctgacatcccgagaagtccagacggctgtgcgtctgctgctgcctggggagctggccaagcacgctgtgtctgagggcaccaaggctgtcaccaagtacaccagctccaagtgacccagggcctgacaaaaataaagggtgaactgtt

SEQ ID NO: 110276 - DNA, 3546 bp, Homo sapiens
  Payload ID: 1636
  Gene Symbol: ABCF2
  Gene Name: ATP-binding cassette, sub-family F (GCN20), member 2
  Uniprot ID: Q9UG63
  ENST ID: ENST00000287844
  CDS Start-End: 111-1982
gagccggccgcacgcggaggatcctaaggagcagctctgttgcgacataggccgagcagcgaggcccagctccctgaaacaacagtaacctacccctgtgggtcatcatcatgccctccgacctggccaagaagaaggcagccaaaaagaaggaggctgccaaagctcgacagcggcccagaaaaggacatgaagaaaatggagatgttgtcacagaaccacaggtggcagagaagaatgaggccaatggcagagagaccacagaagtagatttgctgaccaaggagctagaggactttgagatgaagaaagctgctgctcgagctgtcactggcgtcctggcctctcaccccaacagtactgatgttcacatcatcaacctctcacttacctttcatggtcaagagctgctcagtgacaccaaactggaattaaactcaggccgtcgttatggcctcattggtttaaatggaattggaaagtccatgctgctctctgctattgggaagcgtgaagtgcccatccctgagcacatcgacatctaccatctgactcgagagatgccccctagtgacaagacacccttgcattgtgtgatggaagtcgacacagagcgggccatgctggagaaagaggcagagcggctggctcatgaggatgcggagtgtgagaagctcatggagctctacgagcgcctggaggagctggatgccgacaaggcagagatgagggcctcgcggatcttgcatggactgggtttcacacctgccatgcagcgcaagaagctaaaagacttcagtgggggctggaggatgagggttgcccttgccagagccctctttattcggcccttcatgctgctcctggatgagcctaccaaccacctggacctagatgcttgcgtgtggttggaagaagaactaaaaacttttaagcgcatcttggtcctcgtctcccattcccaggattttctgaatggtgtctgtaccaatatcattcacatgcacaacaagaaactgaagtattatacgggtaattatgatcagtacgtgaagacgcggctagagctggaggagaaccagatgaagaggtttcactgggagcaagatcagattgcacacatgaagaactacattgcgaggtttggtcatggcagtgccaagctggcccggcaggcccagagcaaggagaagacgctacagaaaatgatggcatcaggactgacagagagggtcgtgagcgataagacactgtcattttatttcccaccatgtggcaagatccctccacctgtcattatggtgcaaaatgtgagcttcaagtatacaaaagatgggccttgcatctacaataatctagaatttggaattgaccttgacacacgagtggctctggtagggcccaatggagcagggaagtcaactcttctgaagctgctaactggagagctactacccacagatggcatgatccgaaaacactctcatgtcaagatagggcgttaccatcagcatttacaagagcagctggacttagatctctcacctttggagtacatgatgaagtgctacccagagatcaaggagaaggaagaaatgaggaagatcattgggcgatacggtctcactgggaaacaacaggtgagcccaatccggaacttgtcagacgggcagaagtgccgagtgtgtctggcctggctggcctggcagaacccccacatgctcttcctggatgaacccaccaatcacctggatatcgagaccatcgacgccctggcagatgccatcaatgagtttgagggtggtatgatgctggtcagccatgacttcagactcattcagcaggttgcacaggaaatttgggtctgtgagaagcagacaatcaccaagtggcctggagacatcctggcttacaaggagcacctcaagtccaagctggtggatgaggagccccagctcaccaagaggacccacaacgtgtgagccctctacctgggttcgggtcaggagctccatctgggaactaacagctgctaacctgaccagccgctcaggacaggaccctggggctacactcctgcattgctgcaatactgctcccccagcctctcccctgcccctcaacctgccttagctgcactctcttacctacagctggacagtacctgtctgtttcctgtcctccttccagttacatctgtccatgtctggactcggctggccgttccctccagccccttgctggttatcttactctgagtgtgatgcagtcagaggcacctgcgggttagcccaggggcccaagccctggatttggcctgcggaggagcttaggatcctcgttttctgggttttggtgatgttggaggagtaccccccagcccaccgccccgattcctttttgcttctggtttggagctccggaccaggaccttcgtcctggtcagtttttaaataattatttagcagtgtaacttttagacctgcgtgacatctacaaagcgcccaataaagaaagaggaagccacggtccctaccttccttctcgggtctctggggccttctcctccctgcagtgccaacatgcactgcccacagcaggagctggatccagcgtcagtgtgtcgatgggaactgaagactagtccataggagctggaagaactttgtccctttacttctgatttgaaattgtaccttttctcaggcctgtgattcacagactttaacatgaatcagaatcacctggagggctcatgcaatcagattgccagatctcgcctcagcgtttctggttcaataggttttgggggagaccaagaacgttaacatttctagcaagtttccaggtgatgctgttgttgctggtctagagactattttgagaaccactgtccaggagcgtggttttctgattgtgatctgaggttctgccccaactgcacagcagttgggctgcttgttaaaaatgcaggccaggtgcggtggctcacacctgtaatcccagcgctttgggaggctgaggcaggtggatcacttgagctcaggagttcaagaccagcttgggaaacatggcaaaacccgtctttatgtgcctggaatcccacctgctcaggtggctagggtggatggatcgcttgagcccaggaggtggaggttgcagtgagctgagattgcaccactgcattccagcctggatgacagagcaaaaccctgtctcaaaaaaatgcagactggccaggcacagtggctcacacctgtaatccgactgtaagctcatcaccttgggaggccactgtaggaggatcaattgagcctagaagttcaagaccagcctgggcaaagtagggagaccccttctctacaaatagtaataaaatgaaccgggcatagtagcatgtgcctgcggtcccagctgctctgataagaggaggctcacttgagcccaggaggttgaggctgcagtgagcagagcgtgccgctacactccagcctgatgacagaccgagacactgtctcaaaaaaataaaaaaattcagattgctga

SEQ ID NO: 110277 - DNA, 941 bp, Homo sapiens
  Payload ID: 1636
  Gene Symbol: ABCF2
  Gene Name: ATP-binding cassette, sub-family F (GCN20), member 2
  ENST ID: ENST00000441774
  CDS Start-End: 222-941
gagaagctgacgggcggggtgggggaggacccgggggtgacgagcgtggagactcggaggggactcacgcgggcgaggacgagtgcgtcccggcaagaggctgggctcgacggccgggtgatgtggagagggacgatcgagaagaggcccgagacggacgggaggaggaagcccggaaagctccctgaaacaacagtaacctacccctgtgggtcatcatcatgccctccgacctggccaagaagaaggcagccaaaaagaaggaggctgccaaagctcgacagcggcccagaaaaggacatgaagaaaatggagatgttgtcacagaaccacaggtggcagagaagaatgaggccaatggcagagagaccacagaagtagatttgctgaccaaggagctagaggactttgagatgaagaaagctgctgctcgagctgtcactggcgtcctggcctctcaccccaacagtactgatgttcacatcatcaacctctcacttacctttcatggtcaagagctgctcagtgacaccaaactggaattaaactcaggccgtcgttatggcctcattggtttaaatggaattggaaagtccatgctgctctctgctattgggaagcgtgaagtgcccatccctgagcacatcgacatctaccatctgactcgagagatgccccctagtgacaagacacccttgcattgtgtgatggaagtcgacacagagcgggccatgctggagaaagaggcagagcggctggctcatgaggatgcggagtgtgagaagctcatggagctctacgagcgcctggaggagctggatgccgacaaggcagagatgagggcctcgcggatcttgcatggactgggtttcacacctgccatgcagcgcaagaagctaaaagacttcagtgggggctggaggatgagggttgcccttgcc

SEQ ID NO: 110278 - DNA, 1031 bp, Homo sapiens
  Payload ID: 1636
  Gene Symbol: ABCF2
  Gene Name: ATP-binding cassette, sub-family F (GCN20), member 2
  ENST ID: ENST00000468073
  CDS Start-End: 169-1031
gcgggggcaggccagggcatcagaggcttgatgttgatacgaagattcctgagagggatggagcagggcccaggcattcttactagtaagtttagggtttgggggtatctgtttgccttccttcaggctccctgaaacaacagtaacctacccctgtgggtcatcatcatgccctccgacctggccaagaagaaggcagccaaaaagaaggaggctgccaaagctcgacagcggcccagaaaaggacatgaagaaaatggagatgttgtcacagaaccacaggtggcagagaagaatgaggccaatggcagagagaccacagaagtagatttgctgaccaaggagctagaggactttgagatgaagaaagctgctgctcgagctgtcactggcgtcctggcctctcaccccaacagtactgatgttcacatcatcaacctctcacttacctttcatggtcaagagctgctcagtgacaccaaactggaattaaactcaggccgtcgttatggcctcattggtttaaatggaattggaaagtccatgctgctctctgctattgggaagcgtgaagtgcccatccctgagcacatcgacatctaccatctgactcgagagatgccccctagtgacaagacacccttgcattgtgtgatggaagtcgacacagagcgggccatgctggagaaagaggcagagcggctggctcatgaggatgcggagtgtgagaagctcatggagctctacgagcgcctggaggagctggatgccgacaaggcagagatgagggcctcgcggatcttgcatggactgggtttcacacctgccatgcagcgcaagaagctaaaagacttcagtgggggctggaggatgagggttgcccttgccagagccctctttattcggcccttcatgctgctcctggatgagcctaccaaccacctggacctagatgcttgcgtgtggttggaagaagaactaaaaacttttaagcgcatcttggtcctcgtctcccattcccaggattttct

SEQ ID NO: 110279 - DNA, 2453 bp, Homo sapiens
  Payload ID: 1637
  Gene Symbol: ABCF3
  Gene Name: ATP-binding cassette, sub-family F (GCN20), member 3
  Uniprot ID: Q9NUQ8
  ENST ID: ENST00000292808
  CDS Start-End: 35-2146
acagcgactgcgcggacgggttcctgagtggaacatggcgacttgcgccgaaatcctgcggagcgagttccccgaaattgacggacaagtcttcgactacgtgaccggcgtcttgcacagcggcagcgcggacttcgagtctgtggatgacctggtggaagctgtaggggaactattgcaagaggtgtccggggacagcaaggatgacgcgggcatcagggccgtgtgccagcgcatggctgagccacaaagccagggaaatagccaggtgctactggacgcccctatccagttgtcaaagataacggagaactacgactgtggaaccaaacttccaggactgctaaagagggaacagtcctcgacagtgaatgcaaagaagttagagaaggccgaggctcgacttaaggcaaagcaggagaagcgctcagagaaggacacgctcaagaccagcaaccctctagtcttagaagaggcatcagccagccaggcaggcagcagaaaggagagtcggttggaatcatctggcaagaacaaatcctatgatgtgcgaattgagaactttgatgtgtcttttggcgatagagtactgctggctggagcggatgtgaacctggcatggggccgccgttacgggctggtggggcggaatgggttggggaagacaacgttactgaagatgctggccacccggagtctgcgggttccagcccacatttccctgctgcacgttgagcaagaggttgctggagatgacactcctgccctgcagagtgtgctggagagtgacagtgtgcgagaggatttgctacggagggagcgggagctcactgcccagattgctgctggcagggcggagggctctgaagctgcagagctggcagaaatctatgccaaactggaggagattgaggctgacaaggcacctgccagggcatcagtcattctcgctgggcttggctttacccctaaaatgcagcagcagcccacccgggagttctcaggtggctggaggatgaggctggccctggcccgggccctctttgctaggccagatcttctgctgttagatgaacctacaaacatgctggatgtcagggccatcctgtggctggagaattacctgcagacgtggccctccaccatcctagtcgtctcccacgaccgcaacttcttgaatgccatcgccacagacatcatccacctgcacagccagcggctagatggttaccggggagactttgagaccttcatcaagagtaagcaggagcggctgctcaaccagcagcgtgaatatgaggcgcagcagcagtatcgccagcacatccaggttttcattgaccggtttcgctacaatgccaacagggcctctcaagtgcagagtaaactcaagatgctggagaagctgcctgagctgaagcctgtggacaaggaatcagaggtcgtaatgaagttccctgatgggtttgagaagttctcgccgccaattctgcagctagatgaggtggatttctactacgatccgaagcacgtcatcttcagtcgcctctctgtgtctgctgatctcgagtctcgcatctgtgtggttggagagaatggggctgggaagtctaccatgctgaagctgcttttgggggacctggcacctgttcggggcatcagacacgctcacaggaatctgaagattggctatttcagccagcaccatgtggagcagctggacctaaacgtcagtgctgtggaactgctggcacgcaagtttcctgggcggcctgaggaggagtaccgtcaccagctgggtcggtatggcatctccggagaactggccatgcgtcctcttgccagcctgtctgggggccagaagagccgagtggcctttgctcagatgactatgccctgccccaacttctacattctggatgaacccacaaaccacctggacatggagaccattgaggctctgggccgtgccctcaacaatttcaggggtggtgtgattctggtgtcccacgatgagcgctttatcaggctggtgtgccgggagttgtgggtatgcgaaggaggcggcgtcacccgtgtggaaggaggatttgaccagtaccgcgccctcctccaggaacagttccgccgcgaaggcttcctctagggccaccaggctgaggactcgcccaggacatggactggtctctcagacccctgggccaccatgtaggccaccactccaggccgtggacttcccccaacttggggacagccttattcccaaatgtctctatccttttgactggagcatcttctgcacaaccttgggagcccatccaagggttggtgaggactggtctcccgggggtgggggtctggggggtaccctctggggttatagattcccccactgccccagctctgactggaccccaagtggctgctatgtaaattaaatctctccccgcgtc

SEQ ID NO: 110280 - DNA, 2624 bp, Homo sapiens
  Payload ID: 1637
  Gene Symbol: ABCF3
  Gene Name: ATP-binding cassette, sub-family F (GCN20), member 3
  Uniprot ID: Q9NUQ8
  ENST ID: ENST00000429586
  CDS Start-End: 186-2315
agactcggcgcctctcctcaaggccccgctcgccccgcccaccgggctctgcgcactccgctcctttcctgcgtcaccgctacacatgcgccttgcaaggaagggcgagatttcgggggcagggcggggggcgggcctaggccggggtctcacagcgactgcgcggacgggttcctgagtggaacatggcgacttgcgccgaaatcctgcggagcgagttccccgaaattgacggacaagtcttcgactacgtgaccggcgtcttgcacagcggcagcgcggacttcgagtctgtggatgacctggtggaagctgtaggggaactattgcaagaggtgtccggggacagcaaggatgacgcgggcatcagggccgtgtgccagcgcatgtacaacactctgcgtctggctgagccacaaagccagggaaatagccaggtgctactggacgcccctatccagttgtcaaagataacggagaactacgactgtggaaccaaacttccaggactgctaaagagggaacagtcctcgacagtgaatgcaaagaagttagagaaggccgaggctcgacttaaggcaaagcaggagaagcgctcagagaaggacacgctcaagaccagcaaccctctagtcttagaagaggcatcagccagccaggcaggcagcagaaaggagagtcggttggaatcatctggcaagaacaaatcctatgatgtgcgaattgagaactttgatgtgtcttttggcgatagagtactgctggctggagcggatgtgaacctggcatggggccgccgttacgggctggtggggcggaatgggttggggaagacaacgttactgaagatgctggccacccggagtctgcgggttccagcccacatttccctgctgcacgttgagcaagaggttgctggagatgacactcctgccctgcagagtgtgctggagagtgacagtgtgcgagaggatttgctacggagggagcgggagctcactgcccagattgctgctggcagggcggagggctctgaagctgcagagctggcagaaatctatgccaaactggaggagattgaggctgacaaggcacctgccagggcatcagtcattctcgctgggcttggctttacccctaaaatgcagcagcagcccacccgggagttctcaggtggctggaggatgaggctggccctggcccgggccctctttgctaggccagatcttctgctgttagatgaacctacaaacatgctggatgtcagggccatcctgtggctggagaattacctgcagacgtggccctccaccatcctagtcgtctcccacgaccgcaacttcttgaatgccatcgccacagacatcatccacctgcacagccagcggctagatggttaccggggagactttgagaccttcatcaagagtaagcaggagcggctgctcaaccagcagcgtgaatatgaggcgcagcagcagtatcgccagcacatccaggttttcattgaccggtttcgctacaatgccaacagggcctctcaagtgcagagtaaactcaagatgctggagaagctgcctgagctgaagcctgtggacaaggaatcagaggtcgtaatgaagttccctgatgggtttgagaagttctcgccgccaattctgcagctagatgaggtggatttctactacgatccgaagcacgtcatcttcagtcgcctctctgtgtctgctgatctcgagtctcgcatctgtgtggttggagagaatggggctgggaagtctaccatgctgaagctgcttttgggggacctggcacctgttcggggcatcagacacgctcacaggaatctgaagattggctatttcagccagcaccatgtggagcagctggacctaaacgtcagtgctgtggaactgctggcacgcaagtttcctgggcggcctgaggaggagtaccgtcaccagctgggtcggtatggcatctccggagaactggccatgcgtcctcttgccagcctgtctgggggccagaagagccgagtggcctttgctcagatgactatgccctgccccaacttctacattctggatgaacccacaaaccacctggacatggagaccattgaggctctgggccgtgccctcaacaatttcaggggtggtgtgattctggtgtcccacgatgagcgctttatcaggctggtgtgccgggagttgtgggtatgcgaaggaggcggcgtcacccgtgtggaaggaggatttgaccagtaccgcgccctcctccaggaacagttccgccgcgaaggcttcctctagggccaccaggctgaggactcgcccaggacatggactggtctctcagacccctgggccaccatgtaggccaccactccaggccgtggacttcccccaacttggggacagccttattcccaaatgtctctatccttttgactggagcatcttctgcacaaccttgggagcccatccaagggttggtgaggactggtctcccgggggtgggggtctggggggtaccctctggggttatagattcccccactgccccagctctgactggaccccaagtggctgctatgtaaattaaatctctccccgcgtctc

SEQ ID NO: 110281 - DNA, 690 bp, Homo sapiens
  Payload ID: 1637
  Gene Symbol: ABCF3
  Gene Name: ATP-binding cassette, sub-family F (GCN20), member 3
  ENST ID: ENST00000421340
  CDS Start-End: 114-425
gtcaccgctacacatgcgccttgcaaggaagggcgagatttcgggggcagggcggggggcgggcctaggccggggtctcacagcgactgcgcggacgggttcctgagtggaacatggcgacttgcgccgaaatcctgcggagcgagttccccgaaattgacggacaagtcttcgactacgtgaccggcgtcttgcacagcggcagcgcggacttcgagtctgtggatgacctggtggaagctgtaggggaactattgcaagaggtgtccggggacagcaaggatgacgcgggcatcagggccgtgtgccagcgcatgtacaacactctgcgtctggctgagccacaaagccagggaaatagccaggtgctactggacgcccctatccagttgtcaaagataacggagaactacgggagaaggtgactgcttttcttatcgcttacagactgtggaaccaaacttccaggactgctaaagagggaacagtcctcgacagtgaatgcaaagaagttagagaaggccgaggctcgacttaaggcaaagcaggagaagcgctcagagaaggacacgctcaagaccagcaaccctctagtcttagaagaggcatcagccagccaggcaggcagcagaaaggagagtcggttggaatcatctggcaagaacaaatcctatgatgtgcgaattgaga

SEQ ID NO: 110282 - DNA, 2923 bp, Homo sapiens
  Payload ID: 1638
  Gene Symbol: ABCG1
  Gene Name: ATP-binding cassette, sub-family G (WHITE), member 1
  Uniprot ID: P45844
  ENST ID: ENST00000347800
  CDS Start-End: 80-2071
gctttataaaggggagtttccctgcacaagctctctctcttgtctgccgccatgtgagacatgcctttcaccttccgccatgatcatgaggcttccccagccacatggaactaatgccagcagttactctgcagagatgacggagcccaagtcggtgtgtgtctcggtggatgaggtggtgtccagcaacatggaggccactgagacggacctgctgaatggacatctgaaaaaagtagataataacctcacggaagcccagcgcttctcctccttgcctcggagggcagctgtgaacattgaattcagggacctttcctattcggttcctgaaggaccctggtggaggaagaaaggatacaagaccctcctgaaaggaatttccgggaagttcaatagtggtgagttggtggccattatgggtccttccggggccgggaagtccacgctgatgaacatcctggctggatacagggagacgggcatgaagggggccgtcctcatcaacggcctgccccgggacctgcgctgcttccggaaggtgtcctgctacatcatgcaggatgacatgctgctgccgcatctcactgtgcaggaggccatgatggtgtcggcacatctgaagcttcaggagaaggatgaaggcagaagggaaatggtcaaggagatactgacagcgctgggcttgctgtcttgcgccaacacgcggaccgggagcctgtcaggtggtcagcgcaagcgcctggccatcgcgctggagctggtgaacaaccctccagtcatgttcttcgatgagcccaccagcggcctggacagcgcctcctgcttccaggtggtctcgctgatgaaagggctcgctcaagggggtcgctccatcatttgcaccatccaccagcccagcgccaaactcttcgagctgttcgaccagctttacgtcctgagtcaaggacaatgtgtgtaccggggaaaagtctgcaatcttgtgccatatttgagggatttgggtctgaactgcccaacctaccacaacccagcagattttgtcatggaggttgcatccggcgagtacggtgatcagaacagtcggctggtgagagcggttcgggagggcatgtgtgactcagaccacaagagagacctcgggggtgatgccgaggtgaacccttttctttggcaccggccctctgaagaggactcctcgtccatggaaggctgccacagcttctctgccagctgcctcacgcagttctgcatcctcttcaagaggaccttcctcagcatcatgagggactcggtcctgacacacctgcgcatcacctcgcacattgggatcggcctcctcattggcctgctgtacttggggatcgggaacgaagccaagaaggtcttgagcaactccggcttcctcttcttctccatgctgttcctcatgttcgcggccctcatgcctactgttctgacatttcccctggagatgggagtctttcttcgggaacacctgaactactggtacagcctgaaggcctactacctggccaagaccatggcagacgtgccctttcagatcatgttcccagtggcctactgcagcatcgtgtactggatgacgtcgcagccgtccgacgccgtgcgctttgtgctgtttgccgcgctgggcaccatgacctccctggtggcacagtccctgggcctgctgatcggagccgcctccacgtccctgcaggtggccactttcgtgggcccagtgacagccatcccggtgctcctgttctcggggttcttcgtcagcttcgacaccatccccacgtacctacagtggatgtcctacatctcctatgtcaggtatgggttcgaaggggtcatcctctccatctatggcttagaccgggaagatctgcactgtgacatcgacgagacgtgccacttccagaagtcggaggccatcctgcgggagctggacgtggaaaatgccaagctgtacctggacttcatcgtactcgggattttcttcatctccctccgcctcattgcctattttgtcctcaggtacaaaatccgggcagagaggtaaaacacctgaatgccaggaaacaggaagattagacactgtggccgagggcacgtctagaatcgaggaggcaagcctgtgcccgaccgacgacacagagactcttctgatccaacccctagaaccgcgttgggtttgtgggtgtctcgtgctcagccactctgcccagctgggttggatcttctctccattcccctttctagctttaactaggaagatgtaggcagattggtggtttttttttttttaacatacagaattttaaataccacaactggggcagaatttaaagctgcaacacagctggtgatgagaggcttcctcagtccagtcgctccttagcaccaggcaccgtgggtcctggatggggaactgcaagcagcctctcagctgatggctgcacagtcagatgtctggtggcagagagtccgagcatggagcgattccattttatgactgttgtttttcacattttcatctttctaaggtgtgtctcttttccaatgagaagtcatttttgcaagccaaaagtcgatcaatcgcattcattttaagaaattatacctttttagtacttgctgaagaatgattcagggtaaatcacatactttgtttagagaggcgaggggtttaaccgagtcacccagctggtctcatacatagacagcacttgtgaaggattgaatgcaggttccaggtggagggaagacgtggacaccatctccactgagccatgcagacatttttaaaagctatacaaaaaattgtgagaagacattggccaactctttcaaagtctttctttttccacgtgcttcttattttaagcgaaatatattgtttgtttcttcctaa

SEQ ID NO: 110283 - DNA, 3037 bp, Homo sapiens
  Payload ID: 1638
  Gene Symbol: ABCG1
  Gene Name: ATP-binding cassette, sub-family G (WHITE), member 1
  Uniprot ID: P45844
  ENST ID: ENST00000343687
  CDS Start-End: 152-2185
agcctgcgactgcactcccggggacaccctctcccggacccactcggggaggcggcggcgaaggcccggggagacccgcgaggggcaagcccggattcctgccggccgcctttctgcgcgcgccggagagagagacgcggtggggacagggatgcgcatttcacttccccgagctccggagagggatggcggggtgtcggcgagttcactgctggacacagttactaatgccagcagttactctgcagagatgacggagcccaagtcggtgtgtgtctcggtggatgaggtggtgtccagcaacatggaggccactgagacggacctgctgaatggacatctgaaaaaagtagataataacctcacggaagcccagcgcttctcctccttgcctcggagggcagctgtgaacattgaattcagggacctttcctattcggttcctgaaggaccctggtggaggaagaaaggatacaagaccctcctgaaaggaatttccgggaagttcaatagtggtgagttggtggccattatgggtccttccggggccgggaagtccacgctgatgaacatcctggctggatacagggagacgggcatgaagggggccgtcctcatcaacggcctgccccgggacctgcgctgcttccggaaggtgtcctgctacatcatgcaggatgacatgctgctgccgcatctcactgtgcaggaggccatgatggtgtcggcacatctgaagcttcaggagaaggatgaaggcagaagggaaatggtcaaggagatactgacagcgctgggcttgctgtcttgcgccaacacgcggaccgggagcctgtcaggtggtcagcgcaagcgcctggccatcgcgctggagctggtgaacaaccctccagtcatgttcttcgatgagcccaccagcggcctggacagcgcctcctgcttccaggtggtctcgctgatgaaagggctcgctcaagggggtcgctccatcatttgcaccatccaccagcccagcgccaaactcttcgagctgttcgaccagctttacgtcctgagtcaaggacaatgtgtgtaccggggaaaagtctgcaatcttgtgccatatttgagggatttgggtctgaactgcccaacctaccacaacccagcagattttgtcatggaggttgcatccggcgagtacggtgatcagaacagtcggctggtgagagcggttcgggagggcatgtgtgactcagaccacaagagagacctcgggggtgatgccgaggtgaacccttttctttggcaccggccctctgaagaggactcctcgtccatggaaggctgccacagcttctctgccagctgcctcacgcagttctgcatcctcttcaagaggaccttcctcagcatcatgagggactcggtcctgacacacctgcgcatcacctcgcacattgggatcggcctcctcattggcctgctgtacttggggatcgggaacgaagccaagaaggtcttgagcaactccggcttcctcttcttctccatgctgttcctcatgttcgcggccctcatgcctactgttctgacatttcccctggagatgggagtctttcttcgggaacacctgaactactggtacagcctgaaggcctactacctggccaagaccatggcagacgtgccctttcagatcatgttcccagtggcctactgcagcatcgtgtactggatgacgtcgcagccgtccgacgccgtgcgctttgtgctgtttgccgcgctgggcaccatgacctccctggtggcacagtccctgggcctgctgatcggagccgcctccacgtccctgcaggtggccactttcgtgggcccagtgacagccatcccggtgctcctgttctcggggttcttcgtcagcttcgacaccatccccacgtacctacagtggatgtcctacatctcctatgtcaggtatgggttcgaaggggtcatcctctccatctatggcttagaccgggaagatctgcactgtgacatcgacgagacgtgccacttccagaagtcggaggccatcctgcgggagctggacgtggaaaatgccaagctgtacctggacttcatcgtactcgggattttcttcatctccctccgcctcattgcctattttgtcctcaggtacaaaatccgggcagagaggtaaaacacctgaatgccaggaaacaggaagattagacactgtggccgagggcacgtctagaatcgaggaggcaagcctgtgcccgaccgacgacacagagactcttctgatccaacccctagaaccgcgttgggtttgtgggtgtctcgtgctcagccactctgcccagctgggttggatcttctctccattcccctttctagctttaactaggaagatgtaggcagattggtggtttttttttttttaacatacagaattttaaataccacaactggggcagaatttaaagctgcaacacagctggtgatgagaggcttcctcagtccagtcgctccttagcaccaggcaccgtgggtcctggatggggaactgcaagcagcctctcagctgatggctgcacagtcagatgtctggtggcagagagtccgagcatggagcgattccattttatgactgttgtttttcacattttcatctttctaaggtgtgtctcttttccaatgagaagtcatttttgcaagccaaaagtcgatcaatcgcattcattttaagaaattatacctttttagtacttgctgaagaatgattcagggtaaatcacatactttgtttagagaggcgaggggtttaaccgagtcacccagctggtctcatacatagacagcacttgtgaaggattgaatgcaggttccaggtggagggaagacgtggacaccatctccactgagccatgcagacatttttaaaagctatacaaaaaattgtgagaagacattggccaactctttcaaagtctttctttttccacgtgcttcttattttaagcgaaatatattgtttgtttcttcctaa

SEQ ID NO: 110284 - DNA, 3034 bp, Homo sapiens
  Payload ID: 1638
  Gene Symbol: ABCG1
  Gene Name: ATP-binding cassette, sub-family G (WHITE), member 1
  Uniprot ID: P45844
  ENST ID: ENST00000361802
  CDS Start-End: 146-2182
gagccggagccggatcccagccggagcccaagcgcagcccgcaccccgcgcagcggctgagccgggagccagcgcagcctcggccccgcagctcaagcctcgtccccgccgccgccgccgccgccgccgccgccgcccccggggcatggcctgtctgatggccgctttctcggtcggcaccgccatgaatgccagcagttactctgcagagatgacggagcccaagtcggtgtgtgtctcggtggatgaggtggtgtccagcaacatggaggccactgagacggacctgctgaatggacatctgaaaaaagtagataataacctcacggaagcccagcgcttctcctccttgcctcggagggcagctgtgaacattgaattcagggacctttcctattcggttcctgaaggaccctggtggaggaagaaaggatacaagaccctcctgaaaggaatttccgggaagttcaatagtggtgagttggtggccattatgggtccttccggggccgggaagtccacgctgatgaacatcctggctggatacagggagacgggcatgaagggggccgtcctcatcaacggcctgccccgggacctgcgctgcttccggaaggtgtcctgctacatcatgcaggatgacatgctgctgccgcatctcactgtgcaggaggccatgatggtgtcggcacatctgaagcttcaggagaaggatgaaggcagaagggaaatggtcaaggagatactgacagcgctgggcttgctgtcttgcgccaacacgcggaccgggagcctgtcaggtggtcagcgcaagcgcctggccatcgcgctggagctggtgaacaaccctccagtcatgttcttcgatgagcccaccagcggcctggacagcgcctcctgcttccaggtggtctcgctgatgaaagggctcgctcaagggggtcgctccatcatttgcaccatccaccagcccagcgccaaactcttcgagctgttcgaccagctttacgtcctgagtcaaggacaatgtgtgtaccggggaaaagtctgcaatcttgtgccatatttgagggatttgggtctgaactgcccaacctaccacaacccagcagattttgtcatggaggttgcatccggcgagtacggtgatcagaacagtcggctggtgagagcggttcgggagggcatgtgtgactcagaccacaagagagacctcgggggtgatgccgaggtgaacccttttctttggcaccggccctctgaagaggtaaagcagacaaaacgattaaaggggttgagaaaggactcctcgtccatggaaggctgccacagcttctctgccagctgcctcacgcagttctgcatcctcttcaagaggaccttcctcagcatcatgagggactcggtcctgacacacctgcgcatcacctcgcacattgggatcggcctcctcattggcctgctgtacttggggatcgggaacgaagccaagaaggtcttgagcaactccggcttcctcttcttctccatgctgttcctcatgttcgcggccctcatgcctactgttctgacatttcccctggagatgggagtctttcttcgggaacacctgaactactggtacagcctgaaggcctactacctggccaagaccatggcagacgtgccctttcagatcatgttcccagtggcctactgcagcatcgtgtactggatgacgtcgcagccgtccgacgccgtgcgctttgtgctgtttgccgcgctgggcaccatgacctccctggtggcacagtccctgggcctgctgatcggagccgcctccacgtccctgcaggtggccactttcgtgggcccagtgacagccatcccggtgctcctgttctcggggttcttcgtcagcttcgacaccatccccacgtacctacagtggatgtcctacatctcctatgtcaggtatgggttcgaaggggtcatcctctccatctatggcttagaccgggaagatctgcactgtgacatcgacgagacgtgccacttccagaagtcggaggccatcctgcgggagctggacgtggaaaatgccaagctgtacctggacttcatcgtactcgggattttcttcatctccctccgcctcattgcctattttgtcctcaggtacaaaatccgggcagagaggtaaaacacctgaatgccaggaaacaggaagattagacactgtggccgagggcacgtctagaatcgaggaggcaagcctgtgcccgaccgacgacacagagactcttctgatccaacccctagaaccgcgttgggtttgtgggtgtctcgtgctcagccactctgcccagctgggttggatcttctctccattcccctttctagctttaactaggaagatgtaggcagattggtggtttttttttttttaacatacagaattttaaataccacaactggggcagaatttaaagctgcaacacagctggtgatgagaggcttcctcagtccagtcgctccttagcaccaggcaccgtgggtcctggatggggaactgcaagcagcctctcagctgatggctgcacagtcagatgtctggtggcagagagtccgagcatggagcgattccattttatgactgttgtttttcacattttcatctttctaaggtgtgtctcttttccaatgagaagtcatttttgcaagccaaaagtcgatcaatcgcattcattttaagaaattatacctttttagtacttgctgaagaatgattcagggtaaatcacatactttgtttagagaggcgaggggtttaaccgagtcacccagctggtctcatacatagacagcacttgtgaaggattgaatgcaggttccaggtggagggaagacgtggacaccatctccactgagccatgcagacatttttaaaagctatacaaaaaattgtgagaagacattggccaactctttcaaagtctttctttttccacgtgcttcttattttaagcgaaatatattgtttgtttcttcctaa

SEQ ID NO: 110285 - DNA, 3475 bp, Homo sapiens
  Payload ID: 1638
  Gene Symbol: ABCG1
  Gene Name: ATP-binding cassette, sub-family G (WHITE), member 1
  ENST ID: ENST00000398437
  CDS Start-End: 149-2623
ttctttccaagggtctctgggtgaggcccgtgaccttcccaagcctctccctgtcttgtgaaacctgggcgtgatatacctcccttttagggctgctgcgatcatttaggcagattaaacctcataagtggtttcccatacaagaaagatgctagcagtgcaacagacagaacacttacctgcctgccctcccgccaggaggtggtcttccaacttttgcccggagtctacagagggtgggccctctctgctggggctccgggacatggtcaggagaggttggtctgtctgtaccgccattctcttggccagactgtggtgtctggtccctactcacaccttcctgtcagagtatccagaggccgcagagtatccacaccctggctgggtgtactggctacagatggctgtggctccaggtcacctgcgtgcctgggtgatgagaaataatgtcacaacaaatatcccatctgcattctctgggacactgacccatgaagagaaagcagttctcacagtttttacaggcacagccacagccgtgcatgtacaggtggcagctttagcttctgctaaactggagagctcagtgtttgtgacagactgcgtgtcctgcaaaatcgaaaatgtctgtgattcagctcttcagggaaaaagggtgccgatgtctggcctacagggctcaagcattgtcatcatgcccccatccaaccgtccactcgccagtgcggcatcctgcacgtggtcagtccaagtccagggagggccccatcacctgggggtggtcgctatcagtggcaaagtcttgtcagcagctcatggggcaggaagggcctatggttgggggtttcctggcgatcccatggaggaaggatacaagaccctcctgaaaggaatttccgggaagttcaatagtggtgagttggtggccattatgggtccttccggggccgggaagtccacgctgatgaacatcctggctggatacagggagacgggcatgaagggggccgtcctcatcaacggcctgccccgggacctgcgctgcttccggaaggtgtcctgctacatcatgcaggatgacatgctgctgccgcatctcactgtgcaggaggccatgatggtgtcggcacatctgaagcttcaggagaaggatgaaggcagaagggaaatggtcaaggagatactgacagcgctgggcttgctgtcttgcgccaacacgcggaccgggagcctgtcaggtggtcagcgcaagcgcctggccatcgcgctggagctggtgaacaaccctccagtcatgttcttcgatgagcccaccagcggcctggacagcgcctcctgcttccaggtggtctcgctgatgaaagggctcgctcaagggggtcgctccatcatttgcaccatccaccagcccagcgccaaactcttcgagctgttcgaccagctttacgtcctgagtcaaggacaatgtgtgtaccggggaaaagtctgcaatcttgtgccatatttgagggatttgggtctgaactgcccaacctaccacaacccagcagattttgtcatggaggttgcatccggcgagtacggtgatcagaacagtcggctggtgagagcggttcgggagggcatgtgtgactcagaccacaagagagacctcgggggtgatgccgaggtgaacccttttctttggcaccggccctctgaagaggtaaagcagacaaaacgattaaaggggttgagaaaggactcctcgtccatggaaggctgccacagcttctctgccagctgcctcacgcagttctgcatcctcttcaagaggaccttcctcagcatcatgagggactcggtcctgacacacctgcgcatcacctcgcacattgggatcggcctcctcattggcctgctgtacttggggatcgggaacgaagccaagaaggtcttgagcaactccggcttcctcttcttctccatgctgttcctcatgttcgcggccctcatgcctactgttctgacatttcccctggagatgggagtctttcttcgggaacacctgaactactggtacagcctgaaggcctactacctggccaagaccatggcagacgtgccctttcagatcatgttcccagtggcctactgcagcatcgtgtactggatgacgtcgcagccgtccgacgccgtgcgctttgtgctgtttgccgcgctgggcaccatgacctccctggtggcacagtccctgggcctgctgatcggagccgcctccacgtccctgcaggtggccactttcgtgggcccagtgacagccatcccggtgctcctgttctcggggttcttcgtcagcttcgacaccatccccacgtacctacagtggatgtcctacatctcctatgtcaggtatgggttcgaaggggtcatcctctccatctatggcttagaccgggaagatctgcactgtgacatcgacgagacgtgccacttccagaagtcggaggccatcctgcgggagctggacgtggaaaatgccaagctgtacctggacttcatcgtactcgggattttcttcatctccctccgcctcattgcctattttgtcctcaggtacaaaatccgggcagagaggtaaaacacctgaatgccaggaaacaggaagattagacactgtggccgagggcacgtctagaatcgaggaggcaagcctgtgcccgaccgacgacacagagactcttctgatccaacccctagaaccgcgttgggtttgtgggtgtctcgtgctcagccactctgcccagctgggttggatcttctctccattcccctttctagctttaactaggaagatgtaggcagattggtggtttttttttttttaacatacagaattttaaataccacaactggggcagaatttaaagctgcaacacagctggtgatgagaggcttcctcagtccagtcgctccttagcaccaggcaccgtgggtcctggatggggaactgcaagcagcctctcagctgatggctgcacagtcagatgtctggtggcagagagtccgagcatggagcgattccattttatgactgttgtttttcacattttcatctttctaaggtgtgtctcttttccaatgagaagtcatttttgcaagccaaaagtcgatcaatcgcattcattttaagaaattatacctttttagtacttgctgaagaatgattcagggtaaatcacatactttgtttagagaggcgaggggtttaaccgagtcacccagctggtctcatacatagacagcacttgtgaaggattgaatgcaggttccaggtggagggaagacgtggacaccatctccactgagccatgcagacatttttaaaagctatacaaaaaattgtgagaagacattggccaactctttcaaagtctttctttttccacgtgcttcttattttaagcgaaatatattgtttgtttcttcctaa

SEQ ID NO: 110286 - DNA, 2998 bp, Homo sapiens
  Payload ID: 1638
  Gene Symbol: ABCG1
  Gene Name: ATP-binding cassette, sub-family G (WHITE), member 1
  Uniprot ID: P45844
  ENST ID: ENST00000398449
  CDS Start-End: 146-2146
gagccggagccggatcccagccggagcccaagcgcagcccgcaccccgcgcagcggctgagccgggagccagcgcagcctcggccccgcagctcaagcctcgtccccgccgccgccgccgccgccgccgccgccgcccccggggcatggcctgtctgatggccgctttctcggtcggcaccgccatgaatgccagcagttactctgcagagatgacggagcccaagtcggtgtgtgtctcggtggatgaggtggtgtccagcaacatggaggccactgagacggacctgctgaatggacatctgaaaaaagtagataataacctcacggaagcccagcgcttctcctccttgcctcggagggcagctgtgaacattgaattcagggacctttcctattcggttcctgaaggaccctggtggaggaagaaaggatacaagaccctcctgaaaggaatttccgggaagttcaatagtggtgagttggtggccattatgggtccttccggggccgggaagtccacgctgatgaacatcctggctggatacagggagacgggcatgaagggggccgtcctcatcaacggcctgccccgggacctgcgctgcttccggaaggtgtcctgctacatcatgcaggatgacatgctgctgccgcatctcactgtgcaggaggccatgatggtgtcggcacatctgaagcttcaggagaaggatgaaggcagaagggaaatggtcaaggagatactgacagcgctgggcttgctgtcttgcgccaacacgcggaccgggagcctgtcaggtggtcagcgcaagcgcctggccatcgcgctggagctggtgaacaaccctccagtcatgttcttcgatgagcccaccagcggcctggacagcgcctcctgcttccaggtggtctcgctgatgaaagggctcgctcaagggggtcgctccatcatttgcaccatccaccagcccagcgccaaactcttcgagctgttcgaccagctttacgtcctgagtcaaggacaatgtgtgtaccggggaaaagtctgcaatcttgtgccatatttgagggatttgggtctgaactgcccaacctaccacaacccagcagattttgtcatggaggttgcatccggcgagtacggtgatcagaacagtcggctggtgagagcggttcgggagggcatgtgtgactcagaccacaagagagacctcgggggtgatgccgaggtgaacccttttctttggcaccggccctctgaagaggactcctcgtccatggaaggctgccacagcttctctgccagctgcctcacgcagttctgcatcctcttcaagaggaccttcctcagcatcatgagggactcggtcctgacacacctgcgcatcacctcgcacattgggatcggcctcctcattggcctgctgtacttggggatcgggaacgaagccaagaaggtcttgagcaactccggcttcctcttcttctccatgctgttcctcatgttcgcggccctcatgcctactgttctgacatttcccctggagatgggagtctttcttcgggaacacctgaactactggtacagcctgaaggcctactacctggccaagaccatggcagacgtgccctttcagatcatgttcccagtggcctactgcagcatcgtgtactggatgacgtcgcagccgtccgacgccgtgcgctttgtgctgtttgccgcgctgggcaccatgacctccctggtggcacagtccctgggcctgctgatcggagccgcctccacgtccctgcaggtggccactttcgtgggcccagtgacagccatcccggtgctcctgttctcggggttcttcgtcagcttcgacaccatccccacgtacctacagtggatgtcctacatctcctatgtcaggtatgggttcgaaggggtcatcctctccatctatggcttagaccgggaagatctgcactgtgacatcgacgagacgtgccacttccagaagtcggaggccatcctgcgggagctggacgtggaaaatgccaagctgtacctggacttcatcgtactcgggattttcttcatctccctccgcctcattgcctattttgtcctcaggtacaaaatccgggcagagaggtaaaacacctgaatgccaggaaacaggaagattagacactgtggccgagggcacgtctagaatcgaggaggcaagcctgtgcccgaccgacgacacagagactcttctgatccaacccctagaaccgcgttgggtttgtgggtgtctcgtgctcagccactctgcccagctgggttggatcttctctccattcccctttctagctttaactaggaagatgtaggcagattggtggtttttttttttttaacatacagaattttaaataccacaactggggcagaatttaaagctgcaacacagctggtgatgagaggcttcctcagtccagtcgctccttagcaccaggcaccgtgggtcctggatggggaactgcaagcagcctctcagctgatggctgcacagtcagatgtctggtggcagagagtccgagcatggagcgattccattttatgactgttgtttttcacattttcatctttctaaggtgtgtctcttttccaatgagaagtcatttttgcaagccaaaagtcgatcaatcgcattcattttaagaaattatacctttttagtacttgctgaagaatgattcagggtaaatcacatactttgtttagagaggcgaggggtttaaccgagtcacccagctggtctcatacatagacagcacttgtgaaggattgaatgcaggttccaggtggagggaagacgtggacaccatctccactgagccatgcagacatttttaaaagctatacaaaaaattgtgagaagacattggccaactctttcaaagtctttctttttccacgtgcttcttattttaagcgaaatatattgtttgtttcttcctaa

SEQ ID NO: 110287 - DNA, 3119 bp, Homo sapiens
  Payload ID: 1638
  Gene Symbol: ABCG1
  Gene Name: ATP-binding cassette, sub-family G (WHITE), member 1
  Uniprot ID: P45844
  ENST ID: ENST00000398457
  CDS Start-End: 261-2267
agacactgaatcatcatttgtagtttggggggctttacatgcctgcagtggtgaaaactgaaattttgtcccacttaagggagtttcttcttccctttattaattgcaaaataaatatatgtcacttcagagggcagcagctggactacctatgtttgtggcgctacaccaacctgaacttcgcttcctgagacctaagattcagccccgtgctcagcagacatcagggatcaccgactctgtgccaggagctgttcttgatgctgggaacgcaggggtggacaaaacagagaaagccctgccctcagaatgccagcagttactctgcagagatgacggagcccaagtcggtgtgtgtctcggtggatgaggtggtgtccagcaacatggaggccactgagacggacctgctgaatggacatctgaaaaaagtagataataacctcacggaagcccagcgcttctcctccttgcctcggagggcagctgtgaacattgaattcagggacctttcctattcggttcctgaaggaccctggtggaggaagaaaggatacaagaccctcctgaaaggaatttccgggaagttcaatagtggtgagttggtggccattatgggtccttccggggccgggaagtccacgctgatgaacatcctggctggatacagggagacgggcatgaagggggccgtcctcatcaacggcctgccccgggacctgcgctgcttccggaaggtgtcctgctacatcatgcaggatgacatgctgctgccgcatctcactgtgcaggaggccatgatggtgtcggcacatctgaagcttcaggagaaggatgaaggcagaagggaaatggtcaaggagatactgacagcgctgggcttgctgtcttgcgccaacacgcggaccgggagcctgtcaggtggtcagcgcaagcgcctggccatcgcgctggagctggtgaacaaccctccagtcatgttcttcgatgagcccaccagcggcctggacagcgcctcctgcttccaggtggtctcgctgatgaaagggctcgctcaagggggtcgctccatcatttgcaccatccaccagcccagcgccaaactcttcgagctgttcgaccagctttacgtcctgagtcaaggacaatgtgtgtaccggggaaaagtctgcaatcttgtgccatatttgagggatttgggtctgaactgcccaacctaccacaacccagcagattttgtcatggaggttgcatccggcgagtacggtgatcagaacagtcggctggtgagagcggttcgggagggcatgtgtgactcagaccacaagagagacctcgggggtgatgccgaggtgaacccttttctttggcaccggccctctgaagaggactcctcgtccatggaaggctgccacagcttctctgccagctgcctcacgcagttctgcatcctcttcaagaggaccttcctcagcatcatgagggactcggtcctgacacacctgcgcatcacctcgcacattgggatcggcctcctcattggcctgctgtacttggggatcgggaacgaagccaagaaggtcttgagcaactccggcttcctcttcttctccatgctgttcctcatgttcgcggccctcatgcctactgttctgacatttcccctggagatgggagtctttcttcgggaacacctgaactactggtacagcctgaaggcctactacctggccaagaccatggcagacgtgccctttcagatcatgttcccagtggcctactgcagcatcgtgtactggatgacgtcgcagccgtccgacgccgtgcgctttgtgctgtttgccgcgctgggcaccatgacctccctggtggcacagtccctgggcctgctgatcggagccgcctccacgtccctgcaggtggccactttcgtgggcccagtgacagccatcccggtgctcctgttctcggggttcttcgtcagcttcgacaccatccccacgtacctacagtggatgtcctacatctcctatgtcaggtatgggttcgaaggggtcatcctctccatctatggcttagaccgggaagatctgcactgtgacatcgacgagacgtgccacttccagaagtcggaggccatcctgcgggagctggacgtggaaaatgccaagctgtacctggacttcatcgtactcgggattttcttcatctccctccgcctcattgcctattttgtcctcaggtacaaaatccgggcagagaggtaaaacacctgaatgccaggaaacaggaagattagacactgtggccgagggcacgtctagaatcgaggaggcaagcctgtgcccgaccgacgacacagagactcttctgatccaacccctagaaccgcgttgggtttgtgggtgtctcgtgctcagccactctgcccagctgggttggatcttctctccattcccctttctagctttaactaggaagatgtaggcagattggtggtttttttttttttaacatacagaattttaaataccacaactggggcagaatttaaagctgcaacacagctggtgatgagaggcttcctcagtccagtcgctccttagcaccaggcaccgtgggtcctggatggggaactgcaagcagcctctcagctgatggctgcacagtcagatgtctggtggcagagagtccgagcatggagcgattccattttatgactgttgtttttcacattttcatctttctaaggtgtgtctcttttccaatgagaagtcatttttgcaagccaaaagtcgatcaatcgcattcattttaagaaattatacctttttagtacttgctgaagaatgattcagggtaaatcacatactttgtttagagaggcgaggggtttaaccgagtcacccagctggtctcatacatagacagcacttgtgaaggattgaatgcaggttccaggtggagggaagacgtggacaccatctccactgagccatgcagacatttttaaaagctatacaaaaaattgtgagaagacattggccaactctttcaaagtctttctttttccacgtgcttcttattttaagcgaaatatattgtttgtttcttcctaa

SEQ ID NO: 110288 - DNA, 918 bp, Homo sapiens
  Payload ID: 1638
  Gene Symbol: ABCG1
  Gene Name: ATP-binding cassette, sub-family G (WHITE), member 1
  ENST ID: ENST00000450121
  CDS Start-End: 147-918
agagccggagccggatcccagccggagcccaagcgcagcccgcaccccgcgcagcggctgagccgggagccagcgcagcctcggccccgcagctcaagcctcgtccccgccgccgccgccgccgccgccgccgccgcccccggggcatggcctgtctgatggccgctttctcggtcggcaccgccatgaatgccagcagttactctgcagagatgacggagcccaagtcggtgtgtgtctcggtggatgaggtggtgtccagcaacatggaggccactgagacggacctgctgaatggacatctgaaaaaagtagataataacctcacggaagcccagcgcttctcctccttgcctcggagggcagctgtgaacattgaattcagggacctttcctattcggttcctgaaggaccctggtggaggaagaaaggatacaagaccctcctgaaaggaatttccgggaagttcaatagtggtgagttggtggccattatgggtccttccggggccgggaagtccacgctgatgaacatcctggctggatacagggagacgggcatgaagggggccgtcctcatcaacggcctgccccgggacctgcgctgcttccggaaggtgtcctgctacatcatgcaggatgacatgctgctgccgcatctcactgtgcaggaggccatgatggtcaaggagatactgacagcgctgggcttgctgtcttgcgccaacacgcggaccgggagcctgtcaggtggtcagcgcaagcgcctggccatcgcgctggagctggtgaacaaccctccagtcatgttcttcgatgagcccaccagcggcctggacagcgcctcctgcttccaggtggtctcgctgatgaaagggctcgctcaagggggtcgctccatcatttgcaccatccacc

SEQ ID NO: 110289 - DNA, 4479 bp, Homo sapiens
  Payload ID: 1639
  Gene Symbol: ABCG2
  Gene Name: ATP-binding cassette, sub-family G (WHITE), member 2 (Junior blood group)
  Uniprot ID: Q9UNQ0
  ENST ID: ENST00000237612
  CDS Start-End: 547-2514
actgcgttcagctctggcggtccacagcccgaagcgcggcttaggaagttcgtgtcagcgctgcctgagctcgtcccctggatgtccgggtctccccaggcggccacccgccggctcccatcgtgacctccagccgcagcgcctcccacgccggccgccgcgcgaggggagcgctcgggcgcgccgggtgtggttgggggaaggggttgtgccgcgcgcgggctgcgtgctgtgcccactcaaaaggttccgggcgcgcaggagggaagaggcagtgcccgccactcccactgagattgagagacgcggcaaggaggcagcctgtggaggaactgggtaggatttaggaacgcaccgtgcacatgcttggtggtcttgttaagtggaaactgctgctttagagtttgtttggaaggtccgggtgactcatcccaacatttacatccttaattgttaaagcgctgcctccgagcgcacgcatcctgagatcctgagcctttggttaagaccgagctctattaagctgaaaagataaaaactctccagatgtcttccagtaatgtcgaagtttttatcccagtgtcacaaggaaacaccaatggcttccccgcgacagcttccaatgacctgaaggcatttactgaaggagctgtgttaagttttcataacatctgctatcgagtaaaactgaagagtggctttctaccttgtcgaaaaccagttgagaaagaaatattatcgaatatcaatgggatcatgaaacctggtctcaacgccatcctgggacccacaggtggaggcaaatcttcgttattagatgtcttagctgcaaggaaagatccaagtggattatctggagatgttctgataaatggagcaccgcgacctgccaatttcaaatgtaattcaggttacgtggtacaagatgatgttgtgatgggcactctgacggtgagagaaaacttacagttctcagcagctcttcggcttgcaacaactatgacgaatcatgaaaaaaacgaacggattaacagggtcattcaagagttaggtctggataaagtggcagactccaaggttggaactcagtttatccgtggtgtgtctggaggagaaagaaaaaggactagtataggaatggagcttatcactgatccttccatcttgttcttggatgagcctacaactggcttagactcaagcacagcaaatgctgtccttttgctcctgaaaaggatgtctaagcagggacgaacaatcatcttctccattcatcagcctcgatattccatcttcaagttgtttgatagcctcaccttattggcctcaggaagacttatgttccacgggcctgctcaggaggccttgggatactttgaatcagctggttatcactgtgaggcctataataaccctgcagacttcttcttggacatcattaatggagattccactgctgtggcattaaacagagaagaagactttaaagccacagagatcatagagccttccaagcaggataagccactcatagaaaaattagcggagatttatgtcaactcctccttctacaaagagacaaaagctgaattacatcaactttccgggggtgagaagaagaagaagatcacagtcttcaaggagatcagctacaccacctccttctgtcatcaactcagatgggtttccaagcgttcattcaaaaacttgctgggtaatccccaggcctctatagctcagatcattgtcacagtcgtactgggactggttataggtgccatttactttgggctaaaaaatgattctactggaatccagaacagagctggggttctcttcttcctgacgaccaaccagtgtttcagcagtgtttcagccgtggaactctttgtggtagagaagaagctcttcatacatgaatacatcagcggatactacagagtgtcatcttatttccttggaaaactgttatctgatttattacccatgaggatgttaccaagtattatatttacctgtatagtgtacttcatgttaggattgaagccaaaggcagatgccttcttcgttatgatgtttacccttatgatggtggcttattcagccagttccatggcactggccatagcagcaggtcagagtgtggtttctgtagcaacacttctcatgaccatctgttttgtgtttatgatgattttttcaggtctgttggtcaatctcacaaccattgcatcttggctgtcatggcttcagtacttcagcattccacgatatggatttacggctttgcagcataatgaatttttgggacaaaacttctgcccaggactcaatgcaacaggaaacaatccttgtaactatgcaacatgtactggcgaagaatatttggtaaagcagggcatcgatctctcaccctggggcttgtggaagaatcacgtggccttggcttgtatgattgttattttcctcacaattgcctacctgaaattgttatttcttaaaaaatattcttaaatttccccttaattcagtatgatttatcctcacataaaaaagaagcactttgattgaagtattcaatcaagtttttttgttgttttctgttcccttgccatcacactgttgcacagcagcaattgttttaaagagatacatttttagaaatcacaacaaactgaattaaacatgaaagaacccaagacatcatgtatcgcatattagttaatctcctcagacagtaaccatggggaagaaatctggtctaatttattaatctaaaaaaggagaattgaattctggaaactcctgacaagttattactgtctctggcatttgtttcctcatctttaaaatgaataggtaggttagtagcccttcagtcttaatactttatgatgctatggtttgccattatttaataaatgacaaatgtattaatgctatactggaaatgtaaaattgaaaatatgttggaaaaaagattctgtcttatagggtaaaaaaagccaccgtgatagaaaaaaaatctttttgataagcacattaaagttaatagaacttactgatattcctgtctagtggtataatatctcaggaatcttggctgagggtttggaactgtgggtagagtagagggccaggagtccagtaatagaattcttgcaccatttctggaacattctagctctgggaggtcacgtaaccttcttggggtagttcagtggtttagtggtttataatccaggtgtgcgtcagaatcatctgaggaactttgctaaaatacaaaaatctggcctaagtagctccagatctaccttcataaaggaatctgaccactcctggatttggtaatttccaagttctgaaaattttacttaggatttaataactattaacatctgtccctacataggttttctttcctacttatataccttatgttctcttcattctaaccttcatcagtaatagggaaatgttttaattttatttttttagttgaagggtaatgtaccaaaaaatatagttcagtgaattaaaatgaacacacatgtgcaaccatcaattcaggtcaagaaatagaagattgtagcacacaaaagcctactcagccattctcccagtcactacttccttccttacccctgggttatttttgaaatgacacttgatgtatttccctctgttgctgttatgagaacattgctacagccaagtgttgtgtttctgtgtgcataggttgatacttaattatctccccactttttaataaacttttaatttggaaataattttagattgacagaaaagttgcaaagatagtgaggaaagttcctgtctactctttgctcagcttcccttaatgttaacattttatatagcaagatgcatttgtcaaagctaacaagttaacattggtacaatcactgttaattaaactgcacacaatattcagatttcaccacttttccactaatattctttcattgttctaggattcaattcaggagaccacatttcatctagccctcttttttaaaagtaaatacttttcagcacttacaggagttaactgagctggggcatcatggtgtatagacgccctgacactggtcatcttggaattcatttagtttgtcagtgggtgccctgacattctgtcacaacatcaatttgggaacatggcattatatttttatctttgaacttttttctttttggatgacatttgattaatgcgtcatcttggaacacattatcttttttcttggttatgtgatcaggaagattaatcagtttttcctgttcttggtataattcctgcttttcacatacctgtcccttacagttctctatatatacccttcccttattacacagagagaaatatctatctatactttttacacaaaatatacttcaaaagaaacaaaacagccacaattattaactttttaaataaatgagaatttaattata

SEQ ID NO: 110290 - DNA, 451 bp, Homo sapiens
  Payload ID: 1639
  Gene Symbol: ABCG2
  Gene Name: ATP-binding cassette, sub-family G (WHITE), member 2 (Junior blood group)
  ENST ID: ENST00000505480
  CDS Start-End: 1-451
aaaaggttccgggcgcgcaggagggaagaggcagtgcccgccactcccactgagattgagagacgcggcaaggaggcagcctgtggaggaactggaaagataaaaactctccagatgtcttccagtaatgtcgaagtttttatcccagtgtcacaaggaaacaccaatggcttccccgcgacagcttccaatgacctgaaggcatttactgaaggagctgtgttaagttttcataacatctgctatcgagtaaaactgaagagtggctttctaccttgtcgaaaaccagttgagaaagaaatattatcgaatatcaatgggatcatgaaacctggtctcaacgccatcctgggacccacaggtggaggcaaatcttcgttattagatgtcttagctgcaaggaaagatccaagtggattatctggagatgttctgataaatggagcaccgc

SEQ ID NO: 110291 - DNA, 4276 bp, Homo sapiens
  Payload ID: 1639
  Gene Symbol: ABCG2
  Gene Name: ATP-binding cassette, sub-family G (WHITE), member 2 (Junior blood group)
  Uniprot ID: Q9UNQ0
  ENST ID: ENST00000515655
  CDS Start-End: 349-2184
gaaaaaaggaacccaaggagataggagagctgttaatttcactcgggacatttcctcgaggctagtttactcggaaagcctcaatgttccctggtagctgcaggatctactttgggggctgccaagtttcctctctcattctttctcctgccccaagagcaggcaggaaggaaagttcctggactgatactcgtctgtttagtaggcgtgggtcctggttgaagtctgtctaggaaaactcctaagtgtagaaatcttcttcgtattaccactgtctctgcactgagatttgggctgctttgcttccagcgtcacacatcataactgagaaagataaaaactctccagatgtcttccagtaatgtcgaagtttttatcccagtgtcacaaggaaacaccaatggcttccccgcgacagcttccaatgacctgaaggcatttactgaaggagctgtgttaagttttcataacatctgctatcgagtaaaactgaagagtggctttctaccttgtcgaaaaccagttgagaaagaaatattatcgaatatcaatgggatcatgaaacctggtctcaacgccatcctgggacccacaggtggaggcaaatcttcgttattagatgtcttagctgcaaggaaagatccaagtggattatctggagatgttctgataaatggagcaccgcgacctgccaatttcaaatgtaattcaggttacgtggtacaagatgatgttgtgatgggcactctgacggtgagagaaaacttacagttctcagcagctcttcggcttgcaacaactatgacgaatcatgaaaaaaacgaacggattaacagggtcattcaagagttaggtctggataaagtggcagactccaaggttggaactcagtttatccgtggtgtgtctggaggagaaagaaaaaggactagtataggaatggagcttatcactgatccttccatcttgttcttggatgagcctacaactggcttagactcaagcacagcaaatgctgtccttttgctcctgaaaaggatgtctaagcagggacgaacaatcatcttctccattcatcagcctcgatattccatcttcaagttgtttgatagcctcaccttattggcctcaggaagacttatgttccacgggcctgctcaggaggccttgggatactttgaatcagctggttatcactgtgaggcctataataaccctgcagacttcttcttggacatcattaatggagattccactgctgtggcattaaacagagaagaagactttaaagccacagagatcatagagccttccaagcaggataagccactcatagaaaaattagcggagatttatgtcaactcctccttctacaaagagacaaaagctgaattacatcaactttccgggggtgagaagaagaagaagatcacagtcttcaaggagatcagctacaccacctccttctgtcatcaactcagatgggtttccaagcgttcattcaaaaacttgctgggtaatccccaggcctctatagctcagatcattgtcacagtcgtactgggactggttataggtgccatttactttgggctaaaaaatgattctactggaatccagaacagagctggggttctcttcttcctgacgaccaaccagtgtttcagcagtgtttcagccgtggaactctttgtggtagagaagaagctcttcatacatgaatacatcagcggatactacagagtgtcatcttatttccttggaaaactgttatctgatttattacccatgaggatgttaccaagtattatatttacctgtatagtgtacttcatgttaggattgaagccaaaggcagatgccttcttcgttatgatgtttacccttatgatggtggcttattcagccagttccatggcactggccatagcagcaggtcagagtgtggtttctgtagcaacacttctcatgaccatctgttttgtgtttatgatggtctgttggtcaatctcacaaccattgcatcttggctgtcatggcttcagtacttcagcattccacgatatggatttacggctttgcagcataatgaatttttgggacaaaacttctgcccaggactcaatgcaacaggaaacaatccttgtaactatgcaacatgtactggcgaagaatatttggtaaagcagggcatcgatctctcaccctggggcttgtggaagaatcacgtggccttggcttgtatgattgttattttcctcacaattgcctacctgaaattgttatttcttaaaaaatattcttaaatttccccttaattcagtatgatttatcctcacataaaaaagaagcactttgattgaagtattcaatcaagtttttttgttgttttctgttcccttgccatcacactgttgcacagcagcaattgttttaaagagatacatttttagaaatcacaacaaactgaattaaacatgaaagaacccaagacatcatgtatcgcatattagttaatctcctcagacagtaaccatggggaagaaatctggtctaatttattaatctaaaaaaggagaattgaattctggaaactcctgacaagttattactgtctctggcatttgtttcctcatctttaaaatgaataggtaggttagtagcccttcagtcttaatactttatgatgctatggtttgccattatttaataaatgacaaatgtattaatgctatactggaaatgtaaaattgaaaatatgttggaaaaaagattctgtcttatagggtaaaaaaagccaccgtgatagaaaaaaaatctttttgataagcacattaaagttaatagaacttactgatattcctgtctagtggtataatatctcaggaatcttggctgagggtttggaactgtgggtagagtagagggccaggagtccagtaatagaattcttgcaccatttctggaacattctagctctgggaggtcacgtaaccttcttggggtagttcagtggtttagtggtttataatccaggtgtgcgtcagaatcatctgaggaactttgctaaaatacaaaaatctggcctaagtagctccagatctaccttcataaaggaatctgaccactcctggatttggtaatttccaagttctgaaaattttacttaggatttaataactattaacatctgtccctacataggttttctttcctacttatataccttatgttctcttcattctaaccttcatcagtaatagggaaatgttttaattttatttttttagttgaagggtaatgtaccaaaaaatatagttcagtgaattaaaatgaacacacatgtgcaaccatcaattcaggtcaagaaatagaagattgtagcacacaaaagcctactcagccattctcccagtcactacttccttccttacccctgggttatttttgaaatgacacttgatgtatttccctctgttgctgttatgagaacattgctacagccaagtgttgtgtttctgtgtgcataggttgatacttaattatctccccactttttaataaacttttaatttggaaataattttagattgacagaaaagttgcaaagatagtgaggaaagttcctgtctactctttgctcagcttcccttaatgttaacattttatatagcaagatgcatttgtcaaagctaacaagttaacattggtacaatcactgttaattaaactgcacacaatattcagatttcaccacttttccactaatattctttcattgttctaggattcaattcaggagaccacatttcatctagccctcttttttaaaagtaaatacttttcagcacttacaggagttaactgagctggggcatcatggtgtatagacgccctgacactggtcatcttggaattcatttagtttgtcagtgggtgccctgacattctgtcacaacatcaatttgggaacatggcattatatttttatctttgaacttttttctttttggatgacatttgattaatgcgtcatcttggaacacattatcttttttcttggttatgtgatcaggaagattaatcagtttttcctgttcttggtataattcctgcttttcacatacctgtcccttacagttctctatatatacccttcccttattacacagagagaaatatctatctatactttttacacaaaatatacttcaaaagaaacaaaacagccacaattattaactttttaaataaatgagaatttaattatatccta

SEQ ID NO: 110292 - DNA, 391 bp, Homo sapiens
  Payload ID: 1639
  Gene Symbol: ABCG2
  Gene Name: ATP-binding cassette, sub-family G (WHITE), member 2 (Junior blood group)
  ENST ID: ENST00000503830
  CDS Start-End: 1-391
agtgacggcgaccaaacccagctaggtcagacgagaaagataaaaactctccagatgtcttccagtaatgtcgaagtttttatcccagtgtcacaaggaaacaccaatggcttccccgcgacagcttccaatgacctgaaggcatttactgaaggagctgtgttaagttttcataacatctgctatcgagtaaaactgaagagtggctttctaccttgtcgaaaaccagttgagaaagaaatattatcgaatatcaatgggatcatgaaacctggtctcaacgccatcctgggacccacaggtggaggcaaatcttcgttattagatgtcttagctgcaaggaaagatccaagtggattatctggagatgttctgataaatggagcaccgc

SEQ ID NO: 110293 - DNA, 496 bp, Homo sapiens
  Payload ID: 1640
  Gene Symbol: ABCG4
  Gene Name: ATP-binding cassette, sub-family G (WHITE), member 4
  ENST ID: ENST00000524604
  CDS Start-End: 41-496
gggacgcgggtgccgcagcccgaggcaggtcggcggcgtgatggcggagaaggcgctggaggccgtgggctgtggactagggccgggggctgtggccatggccgtgacgctggaggacggggcggaaccccctgtgctgaccacgcacctgaagaaggtggagaaccacatcactgaagcccagcgcttctcccacctacccaagcgctcagccgtggacatcgagttcgtggagctgtcctattccgtgcgggaggggccctgctggcgcaaaaggggttataagacccttctcaagtgcctctcaggtaaattctgccgccgggagctgattggcatcatgggcccctcaggggctggcaagtctacattcatgaacatcttggcaggatacagggagtctggaatgaaggggcagatcctggttaatggaaggccacgggagctgaggaccttccgcaagatgtcctgctacatcatgcaagatgacatgctg

SEQ ID NO: 110294 - DNA, 2459 bp, Homo sapiens
  Payload ID: 1640
  Gene Symbol: ABCG4
  Gene Name: ATP-binding cassette, sub-family G (WHITE), member 4
  Uniprot ID: Q9H172
  ENST ID: ENST00000615496
  CDS Start-End: 189-2129
aagggatggggagtgggacgcagccggaggcctgaagcctcctcctctccgccttcccctggtccgccctgcactcaccctgctaccccgacctcctagagcgggcagcctctgccggctgcctcttctcccccgccccctattccttcagtccccaggggctgctggcctgcggggtcggcggcgtgatggcggagaaggcgctggaggccgtgggctgtggactagggccgggggctgtggccatggccgtgacgctggaggacggggcggaaccccctgtgctgaccacgcacctgaagaaggtggagaaccacatcactgaagcccagcgcttctcccacctacccaagcgctcagccgtggacatcgagttcgtggagctgtcctattccgtgcgggaggggccctgctggcgcaaaaggggttataagacccttctcaagtgcctctcaggtaaattctgccgccgggagctgattggcatcatgggcccctcaggggctggcaagtctacattcatgaacatcttggcaggatacagggagtctggaatgaaggggcagatcctggttaatggaaggccacgggagctgaggaccttccgcaagatgtcctgctacatcatgcaagatgacatgctgctgccgcacctcacggtgttggaagccatgatggtctctgctaacctgaagctgagtgagaagcaggaggtgaagaaggagctggtgacagagatcctgacggcactgggcctgatgtcgtgctcccacacgaggacagccctgctctctggcgggcagaggaagcgtctggccatcgccctggagctggtcaacaacccgcctgtcatgttctttgatgagcccaccagtggtctggatagcgcctcttgtttccaagtggtgtccctcatgaagtccctggcacaggggggccgtaccatcatctgcaccatccaccagcccagtgccaagctctttgagatgtttgacaagctctacatcctgagccagggtcagtgcatcttcaaaggcgtggtcaccaacctgatcccctatctaaagggactcggcttgcattgccccacctaccacaacccggctgacttcatcatcgaggtggcctctggcgagtatggagacctgaaccccatgttgttcagggctgtgcagaatgggctgtgcgctatggctgagaagaagagcagccctgagaagaacgaggtccctgccccatgccctccttgtcctccggaagtggatcccattgaaagccacacctttgccaccagcaccctcacacagttctgcatcctcttcaagaggaccttcctgtccatcctcagggacacggtcctgacccacctacggttcatgtcccacgtggttattggcgtgctcatcggcctcctctacctgcatattggcgacgatgccagcaaggtcttcaacaacaccggctgcctcttcttctccatgctgttcctcatgttcgccgccctcatgccaactgtgctcaccttccccttagagatggcggtcttcatgagggagcacctcaactactggtacagcctcaaagcgtattacctggccaagaccatggctgacgtgccctttcaggtggtgtgtccggtggtctactgcagcattgtgtactggatgacgggccagcccgctgagaccagccgcttcctgctcttctcagccctggccaccgccaccgccttggtggcccaatctttggggctgctgatcggagctgcttccaactccctacaggtggccacttttgtgggcccagttaccgccatccctgtcctcttgttctccggcttctttgtcagcttcaagaccatccccacttacctgcaatggagctcctatctctcctatgtcaggtatggctttgagggtgtgatcctgacgatctatggcatggagcgaggagacctgacatgtttagaggaacgctgcccgttccgggagccacagagcatcctccgagcgctggatgtggaggatgccaagctctacatggacttcctggtcttgggcatcttcttcctagccctgcggctgctggcctaccttgtgctgcgttaccgggtcaagtcagagagatagaggcttgccccagcctgtaccccagcccctgcagcaggaagcccccagtcccagccctttgggactgttttaaccttatagacttgggcactggttcctggcggggctatcctctcctcccttggctcctccacaggctggctgtcggactgcgctcccagcctgggctctgggagtgggggctccagccctccccactatgcccaggagtcttcccaagttgatgcggtttgtagcttcctccctactctctccaacacctgcatgcaaagactactgggaggctgctgcctccttcctgcccatggcaccctcctctgctgtctgcct

SEQ ID NO: 110295 - DNA, 3852 bp, Homo sapiens
  Payload ID: 1640
  Gene Symbol: ABCG4
  Gene Name: ATP-binding cassette, sub-family G (WHITE), member 4
  Uniprot ID: Q9H172
  ENST ID: ENST00000619701
  CDS Start-End: 365-2305
aagaacggcgggaccggcgagcagtagctggtaggagagcgcagtcgccccgcgggctcggaggacacagcgtccgggaccaggctctgggaagcgggtgtgcacagcccagcagagtcagggcgcgaccccaaccgcctctcaccatccttgccgtctcctccgagccgagggccggccctcctgcctcgcctgccccgccccggccccgccccggcccgggccgccgggaccgggagccgggacgcgggtgccgcagcccgaggcaggtaaggggagccccggctctccgtccccggtccgtggcagcgctgagcatcccggccccgcaccggcccgggggcgcgtcaaggtcggcggcgtgatggcggagaaggcgctggaggccgtgggctgtggactagggccgggggctgtggccatggccgtgacgctggaggacggggcggaaccccctgtgctgaccacgcacctgaagaaggtggagaaccacatcactgaagcccagcgcttctcccacctacccaagcgctcagccgtggacatcgagttcgtggagctgtcctattccgtgcgggaggggccctgctggcgcaaaaggggttataagacccttctcaagtgcctctcaggtaaattctgccgccgggagctgattggcatcatgggcccctcaggggctggcaagtctacattcatgaacatcttggcaggatacagggagtctggaatgaaggggcagatcctggttaatggaaggccacgggagctgaggaccttccgcaagatgtcctgctacatcatgcaagatgacatgctgctgccgcacctcacggtgttggaagccatgatggtctctgctaacctgaagctgagtgagaagcaggaggtgaagaaggagctggtgacagagatcctgacggcactgggcctgatgtcgtgctcccacacgaggacagccctgctctctggcgggcagaggaagcgtctggccatcgccctggagctggtcaacaacccgcctgtcatgttctttgatgagcccaccagtggtctggatagcgcctcttgtttccaagtggtgtccctcatgaagtccctggcacaggggggccgtaccatcatctgcaccatccaccagcccagtgccaagctctttgagatgtttgacaagctctacatcctgagccagggtcagtgcatcttcaaaggcgtggtcaccaacctgatcccctatctaaagggactcggcttgcattgccccacctaccacaacccggctgacttcatcatcgaggtggcctctggcgagtatggagacctgaaccccatgttgttcagggctgtgcagaatgggctgtgcgctatggctgagaagaagagcagccctgagaagaacgaggtccctgccccatgccctccttgtcctccggaagtggatcccattgaaagccacacctttgccaccagcaccctcacacagttctgcatcctcttcaagaggaccttcctgtccatcctcagggacacggtcctgacccacctacggttcatgtcccacgtggttattggcgtgctcatcggcctcctctacctgcatattggcgacgatgccagcaaggtcttcaacaacaccggctgcctcttcttctccatgctgttcctcatgttcgccgccctcatgccaactgtgctcaccttccccttagagatggcggtcttcatgagggagcacctcaactactggtacagcctcaaagcgtattacctggccaagaccatggctgacgtgccctttcaggtggtgtgtccggtggtctactgcagcattgtgtactggatgacgggccagcccgctgagaccagccgcttcctgctcttctcagccctggccaccgccaccgccttggtggcccaatctttggggctgctgatcggagctgcttccaactccctacaggtggccacttttgtgggcccagttaccgccatccctgtcctcttgttctccggcttctttgtcagcttcaagaccatccccacttacctgcaatggagctcctatctctcctatgtcaggtatggctttgagggtgtgatcctgacgatctatggcatggagcgaggagacctgacatgtttagaggaacgctgcccgttccgggagccacagagcatcctccgagcgctggatgtggaggatgccaagctctacatggacttcctggtcttgggcatcttcttcctagccctgcggctgctggcctaccttgtgctgcgttaccgggtcaagtcagagagatagaggcttgccccagcctgtaccccagcccctgcagcaggaagcccccagtcccagccctttgggactgttttaaccttatagacttgggcactggttcctggcggggctatcctctcctcccttggctcctccacaggctggctgtcggactgcgctcccagcctgggctctgggagtgggggctccagccctccccactatgcccaggagtcttcccaagttgatgcggtttgtagcttcctccctactctctccaacacctgcatgcaaagactactgggaggctgctgcctccttcctgcccatggcaccctcctctgctgtctgcctgggagccctaggctctctagggccccacttacaactgaccaaagtggccccctctgggggtccccaccacacaagtgtttgtaaactgggctgctataaggttggagttccagggctgggccctggtggagtccactggaagtcccattatggatgttgaaatggacagggaaggactctggaagtctcttcctcctcctcctcttctctccacccctagaccctggctgacttggacaatctgccaggacagaagctgggttttctgtctaggtcaccactcccaatcctggggattggagaggcctggggctgtgggatgccccatccccctccccatcacctttggtgggggcagggcctggtggcacctgtgcaataatgtctgtgtttctctcccacctgccactggaactggagaatgcactttattctgggcggggggtgagtgggggaagacccaaccctcctttctcgctgcccctaacgcatgcacggtctcgtgatgctccctccctctccggagtgacaggcacatacatgagaacaggccatctcagccctacacacttgccatcccctacagcacagaggaagagtgatggtggcatgctggtggtggcgggtgctggtgggaggacagtgccaacctcctcctggggatcccatgttggagactctaaggataaggctggtgctgcccagggtgtctacaggaactgcaggtgtctacccccaagtcttccctcctcccaagccaggggtggcacagggcactagatccctggagttcaggaaccaacacaagcacaaccacgggcataagttggccttggccactgccacccacggccctccttttgtgctccatgctggcatcttcactcccctaccccttccccagccactgctgctcattcaaacttctgtccatgtccctccactgttcctatcagcaggtggcccctgggcatcagaacagcctgccctgggcaccaggtggcagacacactcagagcatgtctggctttcctggtgggtccaggctcattctgcttctgatttcccctcccccagggctcattttccccctttttcctgtacacatccctgtctacctcctctcaccctgccacagattcttcctatcacacagggatgccagttgtatttgtgggatttcacccattattaataaaacctatatttatacagta

SEQ ID NO: 110296 - DNA, 2553 bp, Homo sapiens
  Payload ID: 1640
  Gene Symbol: ABCG4
  Gene Name: ATP-binding cassette, sub-family G (WHITE), member 4
  Uniprot ID: Q9H172
  ENST ID: ENST00000622721
  CDS Start-End: 71-2011
ggagctttgagccgggctcggtggtctgccccaaactgagcaggccctccccttgcaggtcggcggcgtgatggcggagaaggcgctggaggccgtgggctgtggactagggccgggggctgtggccatggccgtgacgctggaggacggggcggaaccccctgtgctgaccacgcacctgaagaaggtggagaaccacatcactgaagcccagcgcttctcccacctacccaagcgctcagccgtggacatcgagttcgtggagctgtcctattccgtgcgggaggggccctgctggcgcaaaaggggttataagacccttctcaagtgcctctcaggtaaattctgccgccgggagctgattggcatcatgggcccctcaggggctggcaagtctacattcatgaacatcttggcaggatacagggagtctggaatgaaggggcagatcctggttaatggaaggccacgggagctgaggaccttccgcaagatgtcctgctacatcatgcaagatgacatgctgctgccgcacctcacggtgttggaagccatgatggtctctgctaacctgaagctgagtgagaagcaggaggtgaagaaggagctggtgacagagatcctgacggcactgggcctgatgtcgtgctcccacacgaggacagccctgctctctggcgggcagaggaagcgtctggccatcgccctggagctggtcaacaacccgcctgtcatgttctttgatgagcccaccagtggtctggatagcgcctcttgtttccaagtggtgtccctcatgaagtccctggcacaggggggccgtaccatcatctgcaccatccaccagcccagtgccaagctctttgagatgtttgacaagctctacatcctgagccagggtcagtgcatcttcaaaggcgtggtcaccaacctgatcccctatctaaagggactcggcttgcattgccccacctaccacaacccggctgacttcatcatcgaggtggcctctggcgagtatggagacctgaaccccatgttgttcagggctgtgcagaatgggctgtgcgctatggctgagaagaagagcagccctgagaagaacgaggtccctgccccatgccctccttgtcctccggaagtggatcccattgaaagccacacctttgccaccagcaccctcacacagttctgcatcctcttcaagaggaccttcctgtccatcctcagggacacggtcctgacccacctacggttcatgtcccacgtggttattggcgtgctcatcggcctcctctacctgcatattggcgacgatgccagcaaggtcttcaacaacaccggctgcctcttcttctccatgctgttcctcatgttcgccgccctcatgccaactgtgctcaccttccccttagagatggcggtcttcatgagggagcacctcaactactggtacagcctcaaagcgtattacctggccaagaccatggctgacgtgccctttcaggtggtgtgtccggtggtctactgcagcattgtgtactggatgacgggccagcccgctgagaccagccgcttcctgctcttctcagccctggccaccgccaccgccttggtggcccaatctttggggctgctgatcggagctgcttccaactccctacaggtggccacttttgtgggcccagttaccgccatccctgtcctcttgttctccggcttctttgtcagcttcaagaccatccccacttacctgcaatggagctcctatctctcctatgtcaggtatggctttgagggtgtgatcctgacgatctatggcatggagcgaggagacctgacatgtttagaggaacgctgcccgttccgggagccacagagcatcctccgagcgctggatgtggaggatgccaagctctacatggacttcctggtcttgggcatcttcttcctagccctgcggctgctggcctaccttgtgctgcgttaccgggtcaagtcagagagatagaggcttgccccagcctgtaccccagcccctgcagcaggaagcccccagtcccagccctttgggactgttttaaccttatagacttgggcactggttcctggcggggctatcctctcctcccttggctcctccacaggctggctgtcggactgcgctcccagcctgggctctgggagtgggggctccagccctccccactatgcccaggagtcttcccaagttgatgcggtttgtagcttcctccctactctctccaacacctgcatgcaaagactactgggaggctgctgcctccttcctgcccatggcaccctcctctgctgtctgcctgggagccctaggctctctagggccccacttacaactgaccaaagtggccccctctgggggtccccaccacacaagtgtttgtaaactgggctgctataaggttggagttccagggctgggccctggtggagtccactggaagtcccattatggatgttgaaatggacagggaaggactctggaagtctcttcctcctcctcctcttctctcc

SEQ ID NO: 110297 - DNA, 2740 bp, Homo sapiens
  Payload ID: 1641
  Gene Symbol: ABCG5
  Gene Name: ATP-binding cassette, sub-family G (WHITE), member 5
  Uniprot ID: Q9H222
  ENST ID: ENST00000260645
  CDS Start-End: 141-2096
aagtcccagtcctgctgtcccaagggactccggggtcaggtggagcaggcagggcagtctgccacgggctccccaactgaagccactctggggagggtccggccaccagaaaatttgcccagctttgctgcctgttggccatgggtgacctctcatctttgacccccggagggtccatgggtctccaagtaaacagaggctcccagagctccctggagggggctcctgccaccgccccggagcctcacagcctgggcatcctccatgcctcctacagcgtcagccaccgcgtgaggccctggtgggacatcacatcttgccggcagcagtggaccaggcagatcctcaaagatgtctccttgtacgtggagagcgggcagatcatgtgcatcctaggaagctcaggctccgggaaaaccacgctgctggacgccatgtccgggaggctggggcgcgcggggaccttcctgggggaggtgtatgtgaacggccgggcgctgcgccgggagcagttccaggactgcttctcctacgtcctgcagagcgacaccctgctgagcagcctcaccgtgcgcgagacgctgcactacaccgcgctgctggccatccgccgcggcaatcccggctccttccagaagaaggtggaggccgtcatggcagagctgagtctgagccatgtggcagaccgactgattggcaactacagcttggggggcatttccacgggtgagcggcgccgggtctccatcgcagcccagctgctccaggatcctaaggtcatgctgtttgatgagccaaccacaggcctggactgcatgactgctaatcagattgtcgtcctcctggtggaactggctcgcaggaaccgaattgtggttctcaccattcaccagccccgttctgagctttttcagctctttgacaaaattgccatcctgagcttcggagagctgattttctgtggcacgccagcggaaatgcttgatttcttcaatgactgcggttacccttgtcctgaacattcaaacccttttgacttctatatggacctgacgtcagtggatacccaaagcaaggaacgggaaatagaaacctccaagagagtccagatgatagaatctgcctacaagaaatcagcaatttgtcataaaactttgaagaatattgaaagaatgaaacacctgaaaacgttaccaatggttcctttcaaaaccaaagattctcctggagttttctctaaactgggtgttctcctgaggagagtgacaagaaacttggtgagaaataagctggcagtgattacgcgtctccttcagaatctgatcatgggtttgttcctccttttcttcgttctgcgggtccgaagcaatgtgctaaagggtgctatccaggaccgcgtaggtctcctttaccagtttgtgggcgccaccccgtacacaggcatgctgaacgctgtgaatctgtttcccgtgctgcgagctgtcagcgaccaggagagtcaggacggcctctaccagaagtggcagatgatgctggcctatgcactgcacgtcctccccttcagcgttgttgccaccatgattttcagcagtgtgtgctactggacgctgggcttacatcctgaggttgcccgatttggatatttttctgctgctctcttggccccccacttaattggtgaatttctaactcttgtgctacttggtatcgtccaaaatccaaatatagtcaacagtgtagtggctctgctgtccattgcgggggtgcttgttggatctggattcctcagaaacatacaagaaatgcccattccttttaaaatcatcagttattttacattccaaaaatattgcagtgagattcttgtagtcaatgagttctacggactgaatttcacttgtggcagctcaaatgtttctgtgacaactaatccaatgtgtgccttcactcaaggaattcaattcattgagaaaacctgcccaggtgcaacatctagattcacaatgaactttctgattttgtattcatttattccagctcttgtcatcctaggaatagttgttttcaaaataagggatcatctcattagcaggtagtgaaagccatggctgggaaaatggaagtgaagctgccgactgtgcatgactgctctgaacgtctgaaatgagagtgccatgtatttctttcttgacaggacatctcaagtcttttaaccattaagactccatttgtgcctcttggatccaagcaggccttgaatgcaatggaagtggtttatagtcccttgctcttacaacttgcagggacatgtggttatttggaaattgtgactgagcggacccaagaatgtaaataatattcataaacctatgggagactcgtgtgactattttttttccttgttctaggcacagaaaaaaataggtcagcttaaaaatatgtttacattggataaaggattaggcaaaaataaaatgtttcaaggattcctgaccataagtgacagagaaagagagttgtgggtttagatgaagcaaggttatcatgcagaattgggtaagaatgcttctgttcctggaagacccagagttaaatgcagatgtccacacgaggggtcggagttacctgatcacatcgagagagtgctgggcagatggatggtgagcaccactgctacagagcacccagtgattttactgaggattaaaataaaaaaccgtaggaatgggctcaacagtga

SEQ ID NO: 110298 - DNA, 2896 bp, Homo sapiens
  Payload ID: 1641
  Gene Symbol: ABCG5
  Gene Name: ATP-binding cassette, sub-family G (WHITE), member 5
  ENST ID: ENST00000405322
  CDS Start-End: 898-2340
gctccccaactgaagccactctggggagggtccggccaccagaaaatttgcccagctttgctgcctgttggccatgggtgacctctcatctttgacccccggagggtccatgggtctccaagtaaacagaggctcccagagctccctggagggggctcctgccaccgccccggagcctcacagcctgggcatcctccatgcctcctacagcgtcaggtaaggcagagcccttgctgctgctgctcccccaggagtgcggggcccggcgctcacccctctgctgcctttcttcactctttaagtgccagtctgggcacttcgggctccctctttagtggatcgggtggagagaggagagggagaagggctgtgctgggaaacatggagcgacagtgaatggcccctccccctgcccagggaagggcctgggcataaacaaagtggcagcagtgccctgccaacccagtgtctacggcctgccctctgtggatgggaatgggggtactgcgaatgcaaggagtcttgaaacctggtgaaagaatgcagggacagccacctcgcagccaaacggacaggacattcagagcaactccagcacaggccccctccctacgtggcagacagcctcagtcgctatctgccaggttctacagaggagggcgcagagactgaaacacgttaggagcctgtccggagactactggggtggggcacaggtaggatcaatgctggggacctgggtgtggccccttccagggccccaagctgcctttgccttcctggggtttcctttaaagccaccgcgtgaggccctggtgggacatcacatcttgccggcagcagtggaccaggcagatcctcaaagatgtctccttgtacgtggagagcgggcagatcatgtgcatcctaggaagctcaggctccgggaaaaccacgctgctggacgccatgtccgggaggctggggcgcgcggggaccttcctgggggaggtgtatgtgaacggccgggcgctgcgccgggagcagttccaggactgcttctcctacgtcctgcagagcgacaccctgctgagcagcctcaccgtgcgcgagacgctgcactacaccgcgctgctggccatccgccgcggcaatcccggctccttccagaagaaggtggaggccgtcatggcagagctgagtctgagccatgtggcagaccgactgattggcaactacagcttggggggcatttccacgggtgagcggcgccgggtctccatcgcagcccagctgctccaggatcctatggacctgacgtcagtggatacccaaagcaaggaacgggaaatagaaacctccaagagagtccagatgatagaatctgcctacaagaaatcagcaatttgtcataaaactttgaagaatattgaaagaatgaaacacctgaaaacgttaccaatggttcctttcaaaaccaaagattctcctggagttttctctaaactgggtgttctcctgaggagagtgacaagaaacttggtgagaaataagctggcagtgattacgcgtctccttcagaatctgatcatgggtttgttcctccttttcttcgttctgcgggtccgaagcaatgtgctaaagggtgctatccaggaccgcgtaggtctcctttaccagtttgtgggcgccaccccgtacacaggcatgctgaacgctgtgaatctgtttcccgtgctgcgagctgtcagcgaccaggagagtcaggacggcctctaccagaagtggcagatgatgctggcctatgcactgcacgtcctccccttcagcgttgttgccaccatgattttcagcagtgtgtgctactggacgctgggcttacatcctgaggttgcccgatttggatatttttctgctgctctcttggccccccacttaattggtgaatttctaactcttgtgctacttggtatcgtccaaaatccaaatatagtcaacagtgtagtggctctgctgtccattgcgggggtgcttgttggatctggattcctcagaaacatacaagaaatgcccattccttttaaaatcatcagttattttacattccaaaaatattgcagtgagattcttgtagtcaatgagttctacggactgaatttcacttgtggcagctcaaatgtttctgtgacaactaatccaatgtgtgccttcactcaaggaattcaattcattgagaaaacctgcccaggtgcaacatctagattcacaatgaactttctgattttgtattcatttattccagctcttgtcatcctaggaatagttgttttcaaaataagggatcatctcattagcaggtagtgaaagccatggctgggaaaatggaagtgaagctgccgactgtgcatgactgctctgaacgtctgaaatgagagtgccatgtatttctttcttgacaggacatctcaagtcttttaaccattaagactccatttgtgcctcttggatccaagcaggccttgaatgcaatggaagtggtttatagtcccttgctcttacaacttgcagggacatgtggttatttggaaattgtgactgagcggacccaagaatgtaaataatattcataaacctatgggagactcgtgtgactattttttttccttgttctaggcacagaaaaaaataggtcagcttaaaaatatgtttacattggataaaggattaggcaaaaataaaatgtttcaaggattcctgaccataagtgacagagaaagagagttgtgggtttagatgaagcaaggttatcatgcagaattgggtaagaatgcttctgttcctggaagacccagagttaaatgcagatgtccacacgaggggtcggagttacctgatcacatcgagagagtgctgggca

SEQ ID NO: 110299 - DNA, 2512 bp, Homo sapiens
  Payload ID: 1641
  Gene Symbol: ABCG5
  Gene Name: ATP-binding cassette, sub-family G (WHITE), member 5
  ENST ID: ENST00000409962
  CDS Start-End: 1011-1409
aaggacgcgctggctaaaggtacatcagataatggtctccgtggccaagtcccagtcctgctgtcccaagggactccggggtcaggtggagcaggcagggcagtctgccacgggctccccaactgaagccactctggggagggtccggccaccagaaaatttgcccagctttgctgcctgttggccatgggtgacctctcatctttgacccccggagggtccatgggtctccaagtaaacagaggctcccagagctccctggagggggctcctgccaccgccccggagcctcacagcctgggcatcctccatgcctcctacagcgtcaggtaaggcagagcccttgctgctgctgctcccccaggagtgcggggcccggcgctcacccctctgctgcctttcttcactctttaagtgccagtctgggcacttcgggctccctctttagtggatcgggtggagagaggagagggagaagggctgtgctgggaaacatggagcgacagtgaatggcccctccccctgcccagggaagggcctgggcataaacaaagtggcagcagtgccctgccaacccagtgtctacggcctgccctctgtggatgggaatgggggtactgcgaatgcaaggagtcttgaaacctggtgaaagaatgcagggacagccacctcgcagccaaacggacaggacattcagagcaactccagcacaggccccctccctacgtggcagacagcctcagtcgctatctgccaggttctacagaggagggcgcagagactgaaacacgttaggagcctgtccggagactactggggtggggcacaggtaggatcaatgctggggacctgggtgtggccccttccagggccccaagctgcctttgccttcctggggtttcctttaaagccaccgcgtgaggccctggtgggacatcacatcttgccggcagcagtggaccaggcagatcctcaaagatgtctccttgtacgtggagagcgggcagatcatgtgcatcctaggaagctcaggctccgggaaaaccacgctgctggacgccatgtccgggaggctggggcgcgcggggaccttcctgggggaggtgtatgtgaacggccgggcgctgcgccgggagcagttccaggactgcttctcctacgtcctgcagagcgacaccctgctgagcagcctcaccgtgcgcgagacgctgcactacaccgcgctgctggccatccgccgcggcaatcccggctccttccagaagaaggtggaggccgtcatggcagagctgagtctgagccatgtggcagaccgactgattggcaactacagcttggggggcatttccacgggtgagcggcgccgggtctccatcgcagcccagctgctccaggatcctagagagtgacaagaaacttggtgagaaataagctggcagtgattacgcgtctccttcagaatctgatcatgggtttgttcctccttttcttcgttctgcgggtccgaagcaatgtgctaaagggtgctatccaggaccgcgtaggtctcctttaccagtttgtgggcgccaccccgtacacaggcatgctgaacgctgtgaatctgtttcccgtgctgcgagctgtcagcgaccaggagagtcaggacggcctctaccagaagtggcagatgatgctggcctatgcactgcacgtcctccccttcagcgttgttgccaccatgattttcagcagtgtgtgctactggacgctgggcttacatcctgaggttgcccgatttggatatttttctgctgctctcttggccccccacttaattggtgaatttctaactcttgtgctacttggtatcgtccaaaatccaaatatagtcaacagtgtagtggctctgctgtccattgcgggggtgcttgttggatctggattcctcagaaacatacaagaaatgcccattccttttaaaatcatcagttattttacattccaaaaatattgcagtgagattcttgtagtcaatgagttctacggactgaatttcacttgtggcagctcaaatgtttctgtgacaactaatccaatgtgtgccttcactcaaggaattcaattcattgagaaaacctgcccaggtgcaacatctagattcacaatgaactttctgattttgtattcatttattccagctcttgtcatcctaggaatagttgttttcaaaataagggatcatctcattagcaggtagtgaaagccatggctgggaaaatggaagtgaagctgccgactgtgcatgactgctctgaacgtctgaaatgagagtgccatgtatttctttcttgacaggacatctcaagtcttttaaccattaagactccatttgtgcctcttggatccaagcaggccttgaatgcaatggaagtggtttatagtcccttgctcttacaacttgcagggacatgtggttatttggaaattgtgactgagcggacccaagaatgtaaataatattcataaacct

SEQ ID NO: 110300 - DNA, 3033 bp, Homo sapiens
  Payload ID: 1641
  Gene Symbol: ABCG5
  Gene Name: ATP-binding cassette, sub-family G (WHITE), member 5
  ENST ID: ENST00000486512
  CDS Start-End: 896-1252
tccccaactgaagccactctggggagggtccggccaccagaaaatttgcccagctttgctgcctgttggccatgggtgacctctcatctttgacccccggagggtccatgggtctccaagtaaacagaggctcccagagctccctggagggggctcctgccaccgccccggagcctcacagcctgggcatcctccatgcctcctacagcgtcaggtaaggcagagcccttgctgctgctgctcccccaggagtgcggggcccggcgctcacccctctgctgcctttcttcactctttaagtgccagtctgggcacttcgggctccctctttagtggatcgggtggagagaggagagggagaagggctgtgctgggaaacatggagcgacagtgaatggcccctccccctgcccagggaagggcctgggcataaacaaagtggcagcagtgccctgccaacccagtgtctacggcctgccctctgtggatgggaatgggggtactgcgaatgcaaggagtcttgaaacctggtgaaagaatgcagggacagccacctcgcagccaaacggacaggacattcagagcaactccagcacaggccccctccctacgtggcagacagcctcagtcgctatctgccaggttctacagaggagggcgcagagactgaaacacgttaggagcctgtccggagactactggggtggggcacaggtaggatcaatgctggggacctgggtgtggccccttccagggccccaagctgcctttgccttcctggggtttcctttaaagccaccgcgtgaggccctggtgggacatcacatcttgccggcagcagtggaccaggcagatcctcaaagatgtctccttgtacgtggagagcgggcagatcatgtgcatcctaggaagctcaggctccgggaaaaccacgctgctggacgccatgtccgggaggctggggcgcgcggggaccttcctgggggaggtgtatgtgaacggccgggcgctgcgccgggagcagttccaggactgcttctcctacgtcctgcagagcgacaccctgctgagcagcctcaccgtgcgcgagacgctgcactacaccgcgctgctggccatccgccgcggcaatcccggctccttccagaagaagagacagggtctctctttgttgcccaagctggtctcaaactcctggcctcaagcaattctccctcctcagccttccaaagtattgggattacaggcatgagccactgcacccagcctctggggacgttttaaaaaattcatattatttatttaaatctgacacatgtattacgatttaagccgaattggatcatattattatcaaagacatgctttccccagggtgtggtgagtctggaagtggcccttggattcttgggcggtgtgctgcctctttcatgtcctccccagcccatgaattgaaatagcagccacagagactcccagccttcctgtaatttgtgtctcctgcaggtggaggccgtcatggcagagctgagtctgagccatgtggcagaccgactgattggcaactacagcttggggggcatttccacgggtgagcggcgccgggtctccatcgcagcccagctgctccaggatcctagagagtgacaagaaacttggtgagaaataagctggcagtgattacgcgtctccttcagaatctgatcatgggtttgttcctccttttcttcgttctgcgggtccgaagcaatgtgctaaagggtgctatccaggaccgcgtaggtctcctttaccagtttgtgggcgccaccccgtacacaggcatgctgaacgctgtgaatctgtttcccgtgctgcgagctgtcagcgaccaggagagtcaggacggcctctaccagaagtggcagatgatgctggcctatgcactgcacgtcctccccttcagcgttgttgccaccatgattttcagcagtgtgtgctactggacgctgggcttacatcctgaggttgcccgatttggatatttttctgctgctctcttggccccccacttaattggtgaatttctaactcttgtgctacttggtatcgtccaaaatccaaatatagtcaacagtgtagtggctctgctgtccattgcgggggtgcttgttggatctggattcctcagaaacatacaagaaatgcccattccttttaaaatcatcagttattttacattccaaaaatattgcagtgagattcttgtagtcaatgagttctacggactgaatttcacttgtggcagctcaaatgtttctgtgacaactaatccaatgtgtgccttcactcaaggaattcaattcattgagaaaacctgcccaggtgcaacatctagattcacaatgaactttctgattttgtattcatttattccagctcttgtcatcctaggaatagttgttttcaaaataagggatcatctcattagcaggtagtgaaagccatggctgggaaaatggaagtgaagctgccgactgtgcatgactgctctgaacgtctgaaatgagagtgccatgtatttctttcttgacaggacatctcaagtcttttaaccattaagactccatttgtgcctcttggatccaagcaggccttgaatgcaatggaagtggtttatagtcccttgctcttacaacttgcagggacatgtggttatttggaaattgtgactgagcggacccaagaatgtaaataatattcataaacctatgggagactcgtgtgactattttttttccttgttctaggcacagaaaaaaataggtcagcttaaaaatatgtttacattggataaaggattaggcaaaaataaaatgtttcaaggattcctgaccataagtgacagagaaagagagttgtgggtttagatgaagcaaggttatcatgcagaattgggtaagaatgcttctgttcctggaagacccagagttaaatgcagatgtccacacgaggggtcggagttacctgatcacatcgagagagtgctgggca

SEQ ID NO: 110301 - DNA, 2665 bp, Homo sapiens
  Payload ID: 1642
  Gene Symbol: ABCG8
  Gene Name: ATP-binding cassette, sub-family G (WHITE), member 8
  Uniprot ID: Q9H221
  ENST ID: ENST00000272286
  CDS Start-End: 91-2112
ctccaggaaacagagtgaagacactggccctggcaggcagcagctgggtctaagagagctgcagcccagggtcacagacctgtgggccccatggccgggaaggcggcagaggagagagggctgccgaaaggggccactccccaggatacctcgggcctccaggatagattgttctcctctgaaagtgacaacagcctgtacttcacctacagtggccagcccaacaccctggaggtcagagacctcaactaccaggtggacctggcctctcaggtcccttggtttgagcagctggctcagttcaagatgccctggacatctcccagctgccagaattcttgtgagctgggcatccagaacctaagcttcaaagtgagaagtgggcagatgctggccatcatagggagctcaggttgtgggagagcctccttgctagatgtgatcactggccgaggtcacggcggcaagatcaagtcaggccagatctggatcaatgggcagcccagctcgcctcagctggtgaggaagtgtgtggcccacgtgcgccagcacaaccagctgctccccaacttgactgtgcgagagaccttggccttcattgcccagatgcggctgcccagaaccttctcccaggcccagcgtgacaaaagggtggaggacgtgatcgcggagctgcggcttaggcagtgcgctgacacccgcgtgggcaacatgtacgtgcgggggttgtcggggggtgagcgcaggagagtcagcattggggtgcagctcctgtggaacccaggaatccttattctcgacgaacccacctctgggctcgacagcttcacagcccacaacctggtgaagaccttgtccaggctggccaaaggcaaccggctggtgctcatctccctccaccagcctcgctctgacatcttcaggctgtttgatctggtcctcctgatgacgtctggcacccccatctacttaggggcggcccagcacatggtccagtatttcacagccatcggctacccctgtcctcgctacagcaatcctgctgacttctatgtggacctgaccagcattgacaggcgcagcagagagcaggaattggccaccagggagaaggctcagtcactcgcagccctgtttctagaaaaagtgcgtgacttagatgactttctatggaaagcagagacgaaggatcttgacgaggacacctgtgtggaaagcagcgtgaccccactagacaccaactgcctcccgagtcctacgaagatgcctggggcggtgcagcagtttacgacgctgatccgtcgtcagatttccaacgacttccgagacctgcccaccctcctcatccatggggcggaggcctgtctgatgtcaatgaccatcggcttcctctattttggccatgggagcatccagctctccttcatggatacagccgccctcttgttcatgatcggtgctctcatccctttcaacgtcattctggatgtcatctccaaatgttactcagagagggcaatgctttactatgaactggaagacgggctgtacaccactggtccatatttctttgccaagatcctcggggagcttccggagcactgtgcctacatcatcatctacgggatgcccacctactggctggccaacctgaggccaggcctccagcccttcctgctgcacttcctgctggtgtggctggtggtcttctgttgcaggattatggccctggccgccgcggccctgctccccaccttccacatggcctccttcttcagcaatgccctctacaactccttctacctcgccgggggcttcatgataaacttgagcagcctgtggacagtgcccgcgtggatttccaaagtgtccttcctgcggtggtgttttgaagggctgatgaagattcagttcagcagaagaacttataaaatgcctctcgggaacctcaccatcgcggtctcaggagataaaatcctcagtgtcatggagctggactcgtaccctctctacgccatctacctcatcgtcattggcctcagcggtggcttcatggtcctgtactacgtgtccttaaggttcatcaaacagaaaccaagtcaagactggtgattcacgccagacgtctgcccgctggtgggggacctgagcagacccttcaactgcactccctcctcaggagccccttcctggggacagtgaggacaatgaccctacagatgctcagctacatccggcccagggtgctgcagtggcacagaccagccacaggatggcagtagaataaagacagtcgaaagggatttctgctcactggcaggagactgcgatgactgggagaaaacctgcactcggtggcacctacaacgttgctaatttatttccttttgatatgcatttatataggcaactcgatataggatgggagcaaactaggaatgaattgggtagctagactgtgcaggaattgttggaacctggagggaacaataacagtagctagcagatttggcttcatcttccaggggccccacactccgtggtgagccaccatcaatacagaaagtgacctaagatgtaccagcaagatgccatcccttctttttgtgtggggtcatgggctccaaaagccaacgtgaacaattaaaaatgtattgagcatcta

SEQ ID NO: 110302 - DNA, 2509 bp, Homo sapiens
  Payload ID: 1643
  Gene Symbol: ATRIP
  Gene Name: ATR interacting protein
  Uniprot ID: Q8WXE1
  ENST ID: ENST00000346691
  CDS Start-End: 114-2408
gggcactcgcggcggaggcaagcggcggcgcgcggacggttggtccagttctccggcctggcggcaggcaagtctagctcggcgctgtcggatacttggggtgagcggaaagcatggcggggacctccgcgccaggcagcaagaggcggagcgagcccccggcgcctcgccccggcccgccgccgggcaccgggcaccccccgagcaagcgggcccggggcttctccgcagccgctgccccggaccctgacgacccgttcggcgcgcatggggacttcactgccgacgacctggaggagcttgacaccctcgcgtcacaggccctgagccaatgtccggccgcggctcgggacgtgtccagtgatcataaggtccacagattattagatggcatgtcaaaaaatccttcagggaaaaacagagaaactgttccaattaaagataatttcgaattagaggtacttcaggcacaatacaaagaacttaaagaaaagatgaaagtaatggaagaagaagttctcattaagaatggagaaattaaaattttgcgagactcactacatcagacggaatccgttctagaggaacagagaagatcacattttcttcttgagcaagagaaaacccaagcactcagtgacaaggaaaaggaattctccaaaaagctccaatcattgcagtctgaactccagtttaaagatgcagagatgaatgaattaaggacaaagctccagaccagtgaacgagcaaataaactggctgctccctctgtttcccatgtcagtcctaggaaaaacccttctgtggttataaagccagaagcatgttctccacaatttggaaaaacatcttttcctacaaaggagtcttttagtgctaacatgtcccttccccacccctgccagacggagtcaggatacaagcctctggtgggcagagaggatagtaagccccacagtctgagaggtgactccataaaacaagaagaggcccagaaaagctttgttgacagctggagacagagatcaaacactcaaggttccattttgataaacctgctcctgaagcagcctttgatcccagggtcatccctaagcctttgccacctcctgagtagtagttctgagtctcctgctggcacccccctgcagccaccagggtttggcagtaccttggctggaatgtcaggcctcaggaccacaggttcttatgatgggtcattttccctctcagccctgagagaagcacagaacctggcattcactggactgaatctggttgcccggaatgagtgctcacgtgatggagacccagcagagggaggcagaagggccttcccactctgccagcttcctggagccgtgcatttcctcccccttgtacagttcttcatcggcttacactgccaggccctgcaggacttggcagctgctaagagaagcggagcacctggggactcaccgacacattcctcctgcgtgagctctggggtagagaccaaccctgaggactcagtgtgcatcctggaaggcttctctgtgactgcacttagcattcttcagcacctggtgtgccacagcggagcagtcgtctccctattactgtcaggagtgggggcagattctgctgctggggaaggaaacaggagcctggttcacaggcttagtgatggagatatgacctcagccctaaggggggttgctgatgaccaaggacagcacccactgttgaagatgcttcttcacctgttggctttctcttctgcagcaacaggtcaccttcaagccagtgtcctgacccagtgccttaaggttttggtgaaattagccgaaaacacttcctgtgatttcttgcccaggttccagtgtgtgttccaagtgctgccaaagtgcctcagcccagagacacccctgcctagcgtgctgctggctgttgagctcctctccctgctggcggaccacgaccagctggcacctcagctctgttcccactcagaaggctgcctcctgctgctgctgtacatgtacatcacatcacggcctgacagagtggccttggagacacaatggctccagctggaacaagaggtggtcagagcgctcacggtgatgttgcacagacagtggctgacagtgcggagggcagggggacccccaaggaccgaccagcagaggcggacagtgcgctgtctgcgggacacggtgctgctgctgcacggcctatcgcagaaggacaagctcttcatgatgcactgcgtggaggtcctgcatcagtttgaccaggtgatgccgggggtcagcatgctcatccgagggcttcctgatgtgacggactgtgaagaggcagccctggatgacctctgtgccgcggaaaccgatgtggaagaccccgaggtggagtgtggctgaggccctgagtgtccagccacatggtggcaccagcaccactcctttccttaccacatcaactgattaaagcagtgaccagcaggaactgcccagagaactgg

SEQ ID NO: 110303 - DNA, 2590 bp, Homo sapiens
  Payload ID: 1643
  Gene Symbol: ATRIP
  Gene Name: ATR interacting protein
  Uniprot ID: Q8WXE1
  ENST ID: ENST00000320211
  CDS Start-End: 114-2489
gggcactcgcggcggaggcaagcggcggcgcgcggacggttggtccagttctccggcctggcggcaggcaagtctagctcggcgctgtcggatacttggggtgagcggaaagcatggcggggacctccgcgccaggcagcaagaggcggagcgagcccccggcgcctcgccccggcccgccgccgggcaccgggcaccccccgagcaagcgggcccggggcttctccgcagccgctgccccggaccctgacgacccgttcggcgcgcatggggacttcactgccgacgacctggaggagcttgacaccctcgcgtcacaggccctgagccaatgtccggccgcggctcgggacgtgtccagtgatcataaggtccacagattattagatggcatgtcaaaaaatccttcagggaaaaacagagaaactgttccaattaaagataatttcgaattagaggtacttcaggcacaatacaaagaacttaaagaaaagatgaaagtaatggaagaagaagttctcattaagaatggagaaattaaaattttgcgagactcactacatcagacggaatccgttctagaggaacagagaagatcacattttcttcttgagcaagagaaaacccaagcactcagtgacaaggaaaaggaattctccaaaaagctccaatcattgcagtctgaactccagtttaaagatgcagagatgaatgaattaaggacaaagctccagaccagtgaacgagcaaataaactggctgctccctctgtttcccatgtcagtcctaggaaaaacccttctgtggttataaagccagaagcatgttctccacaatttggaaaaacatcttttcctacaaaggagtcttttagtgctaacatgtcccttccccacccctgccagacggagtcaggatacaagcctctggtgggcagagaggatagtaagccccacagtctgagaggtgactccataaaacaagaagaggcccagaaaagctttgttgacagctggagacagagatcaaacactcaaggttccattttgataaacctgctcctgaagcagcctttgatcccagggtcatccctaagcctttgccacctcctgagtagtagttctgagtctcctgctggcacccccctgcagccaccagggtttggcagtaccttggctggaatgtcaggcctcaggaccacaggttcttatgatgggtcattttccctctcagccctgagagaagcacagaacctggcattcactggactgaatctggttgcccggaatgagtgctcacgtgatggagacccagcagagggaggcagaagggccttcccactctgccagcttcctggagccgtgcatttcctcccccttgtacagttcttcatcggcttacactgccaggccctgcaggacttggcagctgctaagagaagcggagcacctggggactcaccgacacattcctcctgcgtgagctctggggtagagaccaaccctgaggactcagtgtgcatcctggaaggcttctctgtgactgcacttagcattcttcagcacctggtgtgccacagcggagcagtcgtctccctattactgtcaggagtgggggcagattctgctgctggggaaggaaacaggagcctggttcacaggcttagtgatggagatatgacctcagccctaaggggggttgctgatgaccaaggacagcacccactgttgaagatgcttcttcacctgttggctttctcttctgcagcaacaggtcaccttcaagccagtgtcctgacccagtgccttaaggttttggtgaaattagccgaaaacacttcctgtgatttcttgcccaggttccagtgtgtgttccaagtgctgccaaagtgcctcagcccagagacacccctgcctagcgtgctgctggctgttgagctcctctccctgctggcggaccacgaccagctggcacctcagctctgttcccactcagaaggctgcctcctgctgctgctgtacatgtacatcacatcacggcctgacagagtggccttggagacacaatggctccagctggaacaagaggtggtgtggctcctggctaagcttggtgtgcagagccccttgcccccagtcactggctccaactgccagtgtaatgtggaggtggtcagagcgctcacggtgatgttgcacagacagtggctgacagtgcggagggcagggggacccccaaggaccgaccagcagaggcggacagtgcgctgtctgcgggacacggtgctgctgctgcacggcctatcgcagaaggacaagctcttcatgatgcactgcgtggaggtcctgcatcagtttgaccaggtgatgccgggggtcagcatgctcatccgagggcttcctgatgtgacggactgtgaagaggcagccctggatgacctctgtgccgcggaaaccgatgtggaagaccccgaggtggagtgtggctgaggccctgagtgtccagccacatggtggcaccagcaccactcctttccttaccacatcaactgattaaagcagtgaccagcaggaactgcccagagaactgg

SEQ ID NO: 110304 - DNA, 2721 bp, Homo sapiens
  Payload ID: 1643
  Gene Symbol: ATRIP
  Gene Name: ATR interacting protein
  Uniprot ID: Q8WXE1
  ENST ID: ENST00000412052
  CDS Start-End: 463-2559
gtgagtgctcctcgcggccttttgctcggagggagttgtcaaccgcgccagatccccttgatggctgtggcttcggaacctcgcggccagcactgccttttcgcctttttaaaatatgggaacaccctgatttaagcagcggttgtcttccagaaggtcctttgattttagggggaaatgcattagccaggtcaaacagccgatttgaaacacagaaggctaagttgacattttacgttattttctaaagtttaggccacttggttcttggttctaagcagagatccttggaacacacctaccaccaccatcagaaccatcactacccatgcatggggacccattcttgtgacaagtttgagcggctttagatcttatgaagcccactgtctcccttgggcagtgtgagcatgggaggagccagacacaggtgatcataaggtccacagattattagatggcatgtcaaaaaatccttcagggaaaaacagagaaactgttccaattaaagataatttcgaattagaggtacttcaggcacaatacaaagaacttaaagaaaagatgaaagtaatggaagaagaagttctcattaagaatggagaaattaaaattttgcgagactcactacatcagacggaatccgttctagaggaacagagaagatcacattttcttcttgagcaagagaaaacccaagcactcagtgacaaggaaaaggaattctccaaaaagctccaatcattgcagtctgaactccagtttaaagatgcagagatgaatgaattaaggacaaagctccagaccagtgaacgagcaaataaactggctgctccctctgtttcccatgtcagtcctaggaaaaacccttctgtggttataaagccagaagcatgttctccacaatttggaaaaacatcttttcctacaaaggagtcttttagtgctaacatgtcccttccccacccctgccagacggagtcaggatacaagcctctggtgggcagagaggatagtaagccccacagtctgagaggtgactccataaaacaagaagaggcccagaaaagctttgttgacagctggagacagagatcaaacactcaaggttccattttgataaacctgctcctgaagcagcctttgatcccagggtcatccctaagcctttgccacctcctgagtagtagttctgagtctcctgctggcacccccctgcagccaccagggtttggcagtaccttggctggaatgtcaggcctcaggaccacaggttcttatgatgggtcattttccctctcagccctgagagaagcacagaacctggcattcactggactgaatctggttgcccggaatgagtgctcacgtgatggagacccagcagagggaggcagaagggccttcccactctgccagcttcctggagccgtgcatttcctcccccttgtacagttcttcatcggcttacactgccaggccctgcaggacttggcagctgctaagagaagcggagcacctggggactcaccgacacattcctcctgcgtgagctctggggtagagaccaaccctgaggactcagtgtgcatcctggaaggcttctctgtgactgcacttagcattcttcagcacctggtgtgccacagcggagcagtcgtctccctattactgtcaggagtgggggcagattctgctgctggggaaggaaacaggagcctggttcacaggcttagtgatggagatatgacctcagccctaaggggggttgctgatgaccaaggacagcacccactgttgaagatgcttcttcacctgttggctttctcttctgcagcaacaggtcaccttcaagccagtgtcctgacccagtgccttaaggttttggtgaaattagccgaaaacacttcctgtgatttcttgcccaggttccagtgtgtgttccaagtgctgccaaagtgcctcagcccagagacacccctgcctagcgtgctgctggctgttgagctcctctccctgctggcggaccacgaccagctggcacctcagctctgttcccactcagaaggctgcctcctgctgctgctgtacatgtacatcacatcacggcctgacagagtggccttggagacacaatggctccagctggaacaagaggtggtgtggctcctggctaagcttggtgtgcagagccccttgcccccagtcactggctccaactgccagtgtaatgtggaggtggtcagagcgctcacggtgatgttgcacagacagtggctgacagtgcggagggcagggggacccccaaggaccgaccagcagaggcggacagtgcgctgtctgcgggacacggtgctgctgctgcacggcctatcgcagaaggacaagctcttcatgatgcactgcgtggaggtcctgcatcagtttgaccaggtgatgccgggggtcagcatgctcatccgagggcttcctgatgtgacggactgtgaagaggcagccctggatgacctctgtgccgcggaaaccgatgtggaagaccccgaggtggagtgtggctgaggccctgagtgtccagccacatggtggcaccagcaccactcctttccttaccacatcaactgattaaagcagtgaccagcaggaactgcccagagaactggctggccttgtttcctgagtctgatctgtttggcggagtgggaggggtggagcaggacccgg

SEQ ID NO: 110305 - DNA, 793 bp, Homo sapiens
  Payload ID: 1643
  Gene Symbol: ATRIP
  Gene Name: ATR interacting protein
  ENST ID: ENST00000635082
  CDS Start-End: 123-518
gattggcccctgggccaggggcggggcactcgcggcggaggcaagcggcggcgcgcggacggttggtccagttctccggcctggcggcaggtgatcataaggtccacagattattagatggcatgtcaaaaaatccttcagggaaaaacagagaaactgttccaattaaagataatttcgaattagaggtacttcaggcacaatacaaagaacttaaagaaaagatgaaagtaatggaagaagaagttctcattaagaatggagaaattaaaattttgcgagactcactacatcagacggaatccgttctagaggaacagagaagatcacattttcttcttgagcaagagaaaacccaagcactcagtgacaaggaaaaggaattctccaaaaagctccaatcattgcagtctgaactccagtttaaagatgcagagatgaatgaattaaggacaaagctccagaccagtgaacgagcaaataaactggctgctccctctgtttcccatgtcagatagtaagccccacagtctgagaggtgactccataaaacaagaagaggcccagaaaagctttgttgacagctggagacagagatcaaacactcaaggttccattttgataaacctgctcctgaagcagcctttgatcccagggtcatccctaagcctttgccacctcctgagtagtagttctgagtctcctgctggcacccccctgcagccaccagggtttggcagtaccttggctggaatgtcaggcctcaggaccacaggttcttatgatgggtcat

SEQ ID NO: 110306 - DNA, 711 bp, Homo sapiens
  Payload ID: 1643
  Gene Symbol: ATRIP
  Gene Name: ATR interacting protein
  ENST ID: ENST00000635099
  CDS Start-End: 123-711
gattggcccctgggccaggggcggggcactcgcggcggaggcaagcggcggcgcgcggacggttggtccagttctccggcctggcggcaggtgatcataaggtccacagattattagatggcatgtcaaaaaatccttcagggaaaaacagagaaactgttccaattaaagataatttcgaattagaggtacttcaggcacaatacaaagaacttaaagaaaagatgaaagtaatggaagaagaagttctcattaagaatggagaaattaaaattttgcgagactcactacatcagacggaatccgttctagaggaacagagaagatcacattttcttcttgagcaagagaaaacccaagcactcagtgacaaggaaaaggaattctccaaaaagctccaatcattgcagtctgaactccagtttaaagatgcagagatgaatgaattaaggacaaagctccagaccagtgaacgagcaaataaactggctgctccctctgtttcccatgtcagtcctaggaaaaacccttctgtggttataaagccagaagcatgttctccacaatttggaaaaacatcttttcctacaaaggagtcttttagtgctaacatgtcccttccccacccctgccagacggagtcaggatacaagcctctggtgggcagagaggatagtaagccccacagtctgagaggtgactccataaaac

SEQ ID NO: 110307 - DNA, 1874 bp, Homo sapiens
  Payload ID: 1644
  Gene Symbol:
  Gene Name: ATR interacting protein [Source:EntrezGene
  Acc:84126]
  Uniprot ID: Q9NSU2
  ENST ID: ENST00000296443
  CDS Start-End: 888-1832
gctcatccgagggcttcctgatgtgacggactgtgaagaggcagccctggatgacctctgtgccgcggaaaccgatgtggaagaccccgaggtggagtgtggctgaggccctgagtgtccagccacatggtggcaccagcaccactcctttccttaccacatcaactgattaaagcagtgaccagcaggaactgcccagagaactggctggccttgtttcctgagtctgatctgtttggcggagtgggaggggtggagcaggacccggaccctgagtggctgggatccttcttcctgtccctggctgttgctgagcccgtccccatggtaactgatctgccttgaggaaggagccctgccctgcctgtggaattgtcctgagtcattgctttgggctggggccatgggaagaaaccattgtgtggcagggaaggaggtggctcttggcccaggcctaaaccaggaaagcctgggaaactgggacccacaggtgggcatgaaagggccgcagcaggggctcccagcagtgtgtaagaccgggagctggtctggcaccactgccctggtccttccagctgcctgtcactggtatgatggccccggtgcattgtgccaccagcaggccacagctgtggatcttggaaggcctctggggtcccccgggagcaggggagtgggtgtgggggggaacggatggtggtgagagggacagaccaggcaggctgacgagcagggcgggcctggctcacgtgggcctgtaggcgggcccacgccaagtttcacttcccgccactgctgccagcgagagccgcgggagagtgtgcagccgagtcactactgcctgcctgcctgcctgctacggctcagcagcaggtacgtacccaaccatgggctcgcaggccctgcccccggggcccatgcagaccctcatctttttcgacatggaggccactggcttgcccttctcccagcccaaggtcacggagctgtgcctgctggctgtccacagatgtgccctggagagcccccccacctctcaggggccacctcccacagttcctccaccaccgcgtgtggtagacaagctctccctgtgtgtggctccggggaaggcctgcagccctgcagccagcgagatcacaggtctgagcacagctgtgctggcagcgcatgggcgtcaatgttttgatgacaacctggccaacctgctcctagccttcctgcggcgccagccacagccctggtgcctggtggcacacaatggtgaccgctacgacttccccctgctccaagcagagctggctatgctgggcctcaccagtgctctggatggtgccttctgtgtggatagcatcactgcgctgaaggccctggagcgagcaagcagcccctcagaacacggcccaaggaagagctatagcctaggcagcatctacactcgcctgtatgggcagtcccctccagactcgcacacggctgagggtgatgtcctggccctgctcagcatctgtcagtggagaccacaggccctgctgcggtgggtggatgctcacgccaggcctttcggcaccatcaggcccatgtatggggtcacagcctctgctaggaccaagccaagaccatctgctgtcacaaccactgcacacctggccacaaccaggaacactagtcccagccttggagagagcaggggtaccaaggatcttcctccagtgaaggaccctggagccctatccagggaggggctgctggccccactgggtctgctggccatcctgaccttggcagtagccacactgtatggactatccctggccacacctggggagtaggccaagaaggaaaatctgacgaataaagacccccgctgcccc

SEQ ID NO: 110308 - DNA, 2403 bp, Homo sapiens
  Payload ID: 1644
  Gene Symbol:
  Gene Name: ATR interacting protein [Source:EntrezGene
  Acc:84126]
  Uniprot ID: Q8WXE1
  ENST ID: ENST00000357105
  CDS Start-End: 308-2302
gattggcccctgggccaggggcggggcactcgcggcggaggcaagcggcggcgcgcggacggttggtccagttctccggcctggcggcaggtgatcataaggtccacagattattagatggcatgtcaaaaaatccttcagggaaaaacagagaaactgttccaattaaagataatttcgaattagaggtacttcaggcacaatacaaagaacttaaagaaaagctttgcaagaaagcagacacttcatatcaccatctgtaggtccctaagaaaaccaggaatatgtggaattttagttgtgcaagatgaaagtaatggaagaagaagttctcattaagaatggagaaattaaaattttgcgagactcactacatcagacggaatccgttctagaggaacagagaagatcacattttcttcttgagcaagagaaaacccaagcactcagtgacaaggaaaaggaattctccaaaaagctccaatcattgcagtctgaactccagtttaaagatgcagagatgaatgaattaaggacaaagctccagaccagtgaacgagcaaataaactggctgctccctctgtttcccatgtcagtcctaggaaaaacccttctgtggttataaagccagaagcatgttctccacaatttggaaaaacatcttttcctacaaaggagtcttttagtgctaacatgtcccttccccacccctgccagacggagtcaggatacaagcctctggtgggcagagaggatagtaagccccacagtctgagaggtgactccataaaacaagaagaggcccagaaaagctttgttgacagctggagacagagatcaaacactcaaggttccattttgataaacctgctcctgaagcagcctttgatcccagggtcatccctaagcctttgccacctcctgagtagtagttctgagtctcctgctggcacccccctgcagccaccagggtttggcagtaccttggctggaatgtcaggcctcaggaccacaggttcttatgatgggtcattttccctctcagccctgagagaagcacagaacctggcattcactggactgaatctggttgcccggaatgagtgctcacgtgatggagacccagcagagggaggcagaagggccttcccactctgccagcttcctggagccgtgcatttcctcccccttgtacagttcttcatcggcttacactgccaggccctgcaggacttggcagctgctaagagaagcggagcacctggggactcaccgacacattcctcctgcgtgagctctggggtagagaccaaccctgaggactcagtgtgcatcctggaaggcttctctgtgactgcacttagcattcttcagcacctggtgtgccacagcggagcagtcgtctccctattactgtcaggagtgggggcagattctgctgctggggaaggaaacaggagcctggttcacaggcttagtgatggagatatgacctcagccctaaggggggttgctgatgaccaaggacagcacccactgttgaagatgcttcttcacctgttggctttctcttctgcagcaacaggtcaccttcaagccagtgtcctgacccagtgccttaaggttttggtgaaattagccgaaaacacttcctgtgatttcttgcccaggttccagtgtgtgttccaagtgctgccaaagtgcctcagcccagagacacccctgcctagcgtgctgctggctgttgagctcctctccctgctggcggaccacgaccagctggcacctcagctctgttcccactcagaaggctgcctcctgctgctgctgtacatgtacatcacatcacggcctgacagagtggccttggagacacaatggctccagctggaacaagaggtggtgtggctcctggctaagcttggtgtgcagagccccttgcccccagtcactggctccaactgccagtgtaatgtggaggtggtcagagcgctcacggtgatgttgcacagacagtggctgacagtgcggagggcagggggacccccaaggaccgaccagcagaggcggacagtgcgctgtctgcgggacacggtgctgctgctgcacggcctatcgcagaaggacaagctcttcatgatgcactgcgtggaggtcctgcatcagtttgaccaggtgatgccgggggtcagcatgctcatccgagggcttcctgatgtgacggactgtgaagaggcagccctggatgacctctgtgccgcggaaaccgatgtggaagaccccgaggtggagtgtggctgaggccctgagtgtccagccacatggtggcaccagcaccactcctttccttaccacatcaactgattaaagcagtgaccagcaggaactgcccagagaactgg

SEQ ID NO: 110309 - DNA, 4046 bp, Homo sapiens
  Payload ID: 1644
  Gene Symbol:
  Gene Name: ATR interacting protein [Source:EntrezGene
  Acc:84126]
  ENST ID: ENST00000634384
  CDS Start-End: 96-236
actcgcggcggaggcaagcggcggcgcgcggacggttggtccagttctccggcctggcggcaggtgatcataaggtccacagattattagatggcatgtcaaaaaatccttcagggaaaaacagagaaactgttccaattaaagataatttcgaattagaggtacttcaggcacaatacaaagaacttaaagaaaagctttgcaagaaagcagacacttcatatcaccatctgtaggtccctaagaaaaccaggaatatgtggaattttagttgtgcaagatgaaagtaatggaagaagaagttctcattaagaatggagaaattaaaattttgcgagactcactacatcagacggaatccgttctagaggaacagagaagatcacattttcttcttgagcaagagaaaacccaagcactcagtgacaaggaaaaggaattctccaaaaagctccaatcattgcagtctgaactccagtttaaagatgcagagatgaatgaattaaggacaaagctccagaccagtgaacgagcaaataaactggctgctccctctgtttcccatgtcagtcctaggaaaaacccttctgtggttataaagccagaagcatgttctccacaatttggaaaaacatcttttcctacaaaggagtcttttagtgctaacatgtcccttccccacccctgccagacggagtcaggatacaagcctctggtgggcagagaggatagtaagccccacagtctgagaggtgactccataaaacaagaagaggcccagaaaagctttgttgacagctggagacagagatcaaacactcaaggttccattttgataaacctgctcctgaagcagcctttgatcccagggtcatccctaagcctttgccacctcctgagtagtagttctgagtctcctgctggcacccccctgcagccaccagggtttggcagtaccttggctggaatgtcaggcctcaggaccacaggttcttatgatgggtcattttccctctcagccctgagagaagcacagaacctggcattcactggactgaatctggttgcccggaatgagtgctcacgtgatggagacccagcagagggaggcagaagggccttcccactctgccagcttcctggagccgtgcatttcctcccccttgtacagttcttcatcggcttacactgccaggccctgcaggacttggcagctgctaagagaagcggagcacctggggactcaccgacacattcctcctgcgtgagctctggggtagagaccaaccctgaggactcagtgtgcatcctggaaggcttctctgtgactgcacttagcattcttcagcacctggtgtgccacagcggagcagtcgtctccctattactgtcaggagtgggggcagattctgctgctggggaaggaaacaggagcctggttcacaggcttagtgatggagatatgacctcagccctaaggggggttgctgatgaccaaggacagcacccactgttgaagatgcttcttcacctgttggctttctcttctgcagcaacaggtcaccttcaagccagtgtcctgacccagtgccttaaggttttggtgaaattagccgaaaacacttcctgtgatttcttgcccaggttccagtgtgtgttccaagtgctgccaaagtgcctcagcccagagacacccctgcctagcgtgctgctggctgttgagctcctctccctgctggcggaccacgaccagctggcacctcagctctgttcccactcagaaggctgcctcctgctgctgctgtacatgtacatcacatcacggcctgacagagtggccttggagacacaatggctccagctggaacaagaggtggtgtggctcctggctaagcttggtgtgcagagccccttgcccccagtcactggctccaactgccagtgtaatgtggaggtggtcagagcgctcacggtgatgttgcacagacagtggctgacagtgcggagggcagggggacccccaaggaccgaccagcagaggcggacagtgcgctgtctgcgggacacggtgctgctgctgcacggcctatcgcagaaggacaagctcttcatgatgcactgcgtggaggtcctgcatcagtttgaccaggtgatgccgggggtcagcatgctcatccgagggcttcctgatgtgacggactgtgaagaggcagccctggatgacctctgtgccgcggaaaccgatgtggaagaccccgaggtggagtgtggctgaggccctgagtgtccagccacatggtggcaccagcaccactcctttccttaccacatcaactgattaaagcagtgaccagcaggaactgcccagagaactggctggccttgtttcctgagtctgatctgtttggcggagtgggaggggtggagcaggacccggaccctgagtggctgggatccttcttcctgtccctggctgttgctgagcccgtccccatggtaactgatctgccttgaggaaggagccctgccctgcctgtggaattgtcctgagtcattgctttgggctggggccatgggaagaaaccattgtgtggcagggaaggaggtggctcttggcccaggcctaaaccaggaaagcctgggaaactgggacccacaggtgggcatgaaagggccgcagcaggggctcccagcagtgtgtaagaccgggagctggtctggcaccactgccctggtccttccagctgcctgtcactggtatgatggccccggtgcattgtgccaccagcaggccacagctgtggatcttggaaggcctctggggtcccccgggagcaggggagtgggtgtgggggggaacggatggtggtgagagggacagaccaggcaggctgacgagcagggcgggcctggctcacgtgggcctgtaggcgggcccacgccaagtttcacttcccgccactgctgccagcgagagccgcgggagagtgtgcagccgagtcactactgcctgcctgcctgcctgctacggctcagcagcaggtacgtacccaaccatgggctcgcaggccctgcccccggggcccatgcagaccctcatctttttcgacatggaggccactggcttgcccttctcccagcccaaggtcacggagctgtgcctgctggctgtccacagatgtgccctggagagcccccccacctctcaggggccacctcccacagttcctccaccaccgcgtgtggtagacaagctctccctgtgtgtggctccggggaaggcctgcagccctgcagccagcgagatcacaggtctgagcacagctgtgctggcagcgcatgggcgtcaatgttttgatgacaacctggccaacctgctcctagccttcctgcggcgccagccacagccctggtgcctggtggcacacaatggtgaccgctacgacttccccctgctccaagcagagctggctatgctgggcctcaccagtgctctggatggtgccttctgtgtggatagcatcactgcgctgaaggccctggagcgagcaagcagcccctcagaacacggcccaaggaagagctatagcctaggcagcatctacactcgcctgtatgggcagtcccctccagactcgcacacggctgagggtgatgtcctggccctgctcagcatctgtcagtggagaccacaggccctgctgcggtgggtggatgctcacgccaggcctttcggcaccatcaggcccatgtatggggtcacagcctctgctaggaccaagccaagaccatctgctgtcacaaccactgcacacctggccacaaccaggaacactagtcccagccttggagagagcaggggtaccaaggatcttcctccagtgaaggaccctggagccctatccagggaggggctgctggccccactgggtctgctggccatcctgaccttggcagtagccacactgtatggactatccctggccacacctggggagtaggccaagaaggaaaatctgacgaataaagacccccgctgccccata

SEQ ID NO: 110310 - DNA, 3943 bp, Homo sapiens
  Payload ID: 1644
  Gene Symbol:
  Gene Name: ATR interacting protein [Source:EntrezGene
  Acc:84126]
  ENST ID: ENST00000635464
  CDS Start-End: 1-1395
atggcggggacctccgcgccaggcagcaagaggcggagcgagcccccggcgcctcgccccggcccgccgccgggcaccgggcaccccccgagcaagcgggcccggggcttctccgcagccgctgccccggaccctgacgacccgttcggcgcgcatggggacttcactgccgacgacctggaggagcttgacaccctcgcgtcacaggccctgagccaatgtccggccgcggctcgggacgtgtccagtgatcataaggtccacagattattagatggcatgtcaaaaaatccttcagggaaaaacagagaaactgttccaattaaagataatttcgaattagaggtacttcaggcacaatacaaagaacttaaagaaaagatgaaagtaatggaagaagaagttctcattaagaatggagaaattaaaattttgcgagactcactacatcagacggaatccgttctagaggaacagagaagatcacattttcttcttgagcaagagaaaacccaagcactcagtgacaaggaaaaggaattctccaaaaagctccaatcattgcagtctgaactccagtttaaagatgcagagatgaatgaattaaggacaaagctccagaccagtgaacgagcaaataaactggctgctccctctgtttcccatgtcagtcctaggaaaaacccttctgtggttataaagccagaagcatgttctccacaatttggaaaaacatcttttcctacaaaggagtcttttagtgctaacatgtcccttccccacccctgccagacggagtcaggatacaagcctctggtgggcagagaggatagtaagccccacagtctgagaggtgactccataaaacaagaagaggcccagaaaagctttgttgacagctggagacagagatcaaacactcaaggttccattttgataaacctgctcctgaagcagcctttgatcccagggtcatccctaagcctttgccacctcctgagtagtagttctgagtctcctgctggcacccccctgcagccaccagggtttggcagtaccttggctggaatgtcaggcctcaggaccacaggttcttatgatgggtcattttccctctcagccctgagagaagcacagaacctggcattcactggactgaatctggttgcccggaatgagtgctcacgtgatggagacccagcagagggaggcagaagggccttcccactctgccagcttcctggagccgtgcatttcctcccccttgtacagttcttcatcggcttacactgccaggccctgcaggacttggcagctgctaagagaagcggagcacctggggactcaccgacacattcctcctgccaacaggtcaccttcaagccagtgtcctgacccagtgccttaaggttttggtgaaattagccgaaaacacttcctgtgatttcttgcccagagccgcaagattggggagaactgtgaacacaaccagcccaccccctcatccagtaatccagtctccctcagcactctaccaaagggttccagtgtgtgttccaagtgctgccaaagtgcctcagcccagagacacccctgcctagcgtgctgctggctgttgagctcctctccctgctggcggaccacgaccagctggcacctcagctctgttcccactcagaaggctgcctcctgctgctgctgtacatgtacatcacatcacggcctgacagagtggccttggagacacaatggctccagctggaacaagaggtggtgtggctcctggctaagcttggtgtgcagagccccttgcccccagtcactggctccaactgccagtgtaatgtggaggtggtcagagcgctcacggtgatgttgcacagacagtggctgacagtgcggagggcagggggacccccaaggaccgaccagcagaggcggacagtgcgctgtctgcgggacacggtgctgctgctgcacggcctatcgcagaaggacaagctcttcatgatgcactgcgtggaggtcctgcatcagtttgaccaggtgatgccgggggtcagcatgctcatccgagggcttcctgatgtgacggactgtgaagaggcagccctggatgacctctgtgccgcggaaaccgatgtggaagaccccgaggtggagtgtggctgaggccctgagtgtccagccacatggtggcaccagcaccactcctttccttaccacatcaactgattaaagcagtgaccagcaggaactgcccagagaactggctggccttgtttcctgagtctgatctgtttggcggagtgggaggggtggagcaggacccggaccctgagtggctgggatccttcttcctgtccctggctgttgctgagcccgtccccatggtaactgatctgccttgaggaaggagccctgccctgcctgtggaattgtcctgagtcattgctttgggctggggccatgggaagaaaccattgtgtggcagggaaggaggtggctcttggcccaggcctaaaccaggaaagcctgggaaactgggacccacaggtgggcatgaaagggccgcagcaggggctcccagcagtgtgtaagaccgggagctggtctggcaccactgccctggtccttccagctgcctgtcactggtatgatggccccggtgcattgtgccaccagcaggccacagctgtggatcttggaaggcctctggggtcccccgggagcaggggagtgggtgtgggggggaacggatggtggtgagagggacagaccaggcaggctgacgagcagggcgggcctggctcacgtgggcctgtaggcgggcccacgccaagtttcacttcccgccactgctgccagcgagagccgcgggagagtgtgcagccgagtcactactgcctgcctgcctgcctgctacggctcagcagcaggtacgtacccaaccatgggctcgcaggccctgcccccggggcccatgcagaccctcatctttttcgacatggaggccactggcttgcccttctcccagcccaaggtcacggagctgtgcctgctggctgtccacagatgtgccctggagagcccccccacctctcaggggccacctcccacagttcctccaccaccgcgtgtggtagacaagctctccctgtgtgtggctccggggaaggcctgcagccctgcagccagcgagatcacaggtctgagcacagctgtgctggcagcgcatgggcgtcaatgttttgatgacaacctggccaacctgctcctagccttcctgcggcgccagccacagccctggtgcctggtggcacacaatggtgaccgctacgacttccccctgctccaagcagagctggctatgctgggcctcaccagtgctctggatggtgccttctgtgtggatagcatcactgcgctgaaggccctggagcgagcaagcagcccctcagaacacggcccaaggaagagctatagcctaggcagcatctacactcgcctgtatgggcagtcccctccagactcgcacacggctgagggtgatgtcctggccctgctcagcatctgtcagtggagaccacaggccctgctgcggtgggtggatgctcacgccaggcctttcggcaccatcaggcccatgtatggggtcacagcctctgctaggaccaagccaagaccatctgctgtcacaaccactgcacacctggccacaaccaggaacactagtcccagccttggagagagcaggggtaccaaggatcttcctccagtgaaggaccctggagccctatccagggaggggctgctggccccactgggtctgctggccatcctgaccttggcagtagccacactgtatggactatccctggccacacctggggagtaggccaagaaggaaaatctgacgaataaagacccccgctgccccata

SEQ ID NO: 110311 - DNA, 8249 bp, Homo sapiens
  Payload ID: 1645
  Gene Symbol: ATR
  Gene Name: ATR serine/threonine kinase
  Uniprot ID: Q13535
  ENST ID: ENST00000350721
  CDS Start-End: 123-8057
ttccgggaggagttttggcctccacacggctccgtcgggcgccgcgctcttccggcagcggtagctttggagacgccgggaacccgcgttggcgtggttgactagtgcctcgcagcctcagcatgggggaacatggcctggagctggcttccatgatccccgccctgcgggagctgggcagtgccacaccagaggaatataatacagttgtacagaagccaagacaaattctgtgtcaattcattgaccggatacttacagatgtaaatgttgttgctgtagaacttgtaaagaaaactgactctcagccaacctccgtgatgttgcttgatttcatccagcatatcatgaaatcctccccacttatgtttgtaaatgtgagtggaagccatgaggccaaaggcagttgtattgaattcagtaattggatcataacgagacttctgcggattgcagcaactccctcctgtcatttgttacacaagaaaatctgtgaagtcatctgttcattattatttctttttaaaagcaagagtcctgctatttttggggtactcacaaaagaattattacaactttttgaagacttggtttacctccatagaagaaatgtgatgggtcatgctgtggaatggccagtggtcatgagccgatttttaagtcaattagatgaacacatgggatatttacaatcagctcctttgcagttgatgagtatgcaaaatttagaatttattgaagtcactttattaatggttcttactcgtattattgcaattgtgttttttagaaggcaagaactcttactttggcagataggttgtgttctgctagagtatggtagtccaaaaattaaatccctagcaattagctttttaacagaactttttcagcttggaggactaccagcacaaccagctagcacttttttcagctcatttttggaattattaaaacaccttgtagaaatggatactgaccaattgaaactctatgaagagccattatcaaagctgataaagacactatttccctttgaagcagaagcttatagaaatattgaacctgtctatttaaatatgctgctggaaaaactctgtgtcatgtttgaagacggtgtgctcatgcggcttaagtctgatttgctaaaagcagctttgtgccatttactgcagtatttccttaaatttgtgccagctgggtatgaatctgctttacaagtcaggaaggtctatgtgagaaatatttgtaaagctcttttggatgtgcttggaattgaggtagatgcagagtacttgttgggcccactttatgcagctttgaaaatggaaagtatggaaatcattgaggagattcaatgccaaactcaacaggaaaacctcagcagtaatagtgatggaatatcacccaaaaggcgtcgtctcagctcgtctctaaacccttctaaaagagcaccaaaacagactgaggaaattaaacatgtggacatgaaccaaaagagcatattatggagtgcactgaaacagaaagctgaatcccttcagatttcccttgaatacagtggcctaaagaatcctgttattgagatgttagaaggaattgctgttgtcttacaactgactgctctgtgtactgttcattgttctcatcaaaacatgaactgccgtactttcaaggactgtcaacataaatccaagaagaaaccttctgtagtgataacttggatgtcattggatttttacacaaaagtgcttaagagctgtagaagtttgttagaatctgttcagaaactggacctggaggcaaccattgataaggtggtgaaaatttatgatgctttgatttatatgcaagtaaacagttcatttgaagatcatatcctggaagatttatgtggtatgctctcacttccatggatttattcccattctgatgatggctgtttaaagttgaccacatttgccgctaatcttctaacattaagctgtaggatttcagatagctattcaccacaggcacaatcacgatgtgtgtttcttctgactctgtttccaagaagaatattccttgagtggagaacagcagtttacaactgggccctgcagagctcccatgaagtaatccgggctagttgtgttagtggattttttatcttattgcagcagcagaattcttgtaacagagttcccaagattcttatagataaagtcaaagatgattctgacattgtcaagaaagaatttgcttctatacttggtcaacttgtctgtactcttcacggcatgttttatctgacaagttctttaacagaacctttctctgaacacggacatgtggacctcttctgtaggaacttgaaagccacttctcaacatgaatgttcatcttctcaactaaaagcttctgtctgcaagccattccttttcctactgaaaaaaaaaatacctagtccagtaaaacttgctttcatagataatctacatcatctttgtaagcatcttgattttagagaagatgaaacagatgtaaaagcagttcttggaactttattaaatttaatggaagatccagacaaagatgttagagtggcttttagtggaaatatcaagcacatattggaatccttggactctgaagatggatttataaaggagctttttgtcttaagaatgaaggaagcatatacacatgcccaaatatcaagaaataatgagctgaaggataccttgattcttacaacaggggatattggaagggccgcaaaaggagatttggtaccatttgcactcttacacttattgcattgtttgttatccaagtcagcatctgtctctggagcagcatacacagaaattagagctctggttgcagctaaaagtgttaaactgcaaagttttttcagccagtataagaaacccatctgtcagtttttggtagaatcccttcactctagtcagatgacagcacttccgaatactccatgccagaatgctgacgtgcgaaaacaagatgtggctcaccagagagaaatggctttaaatacgttgtctgaaattgccaacgttttcgactttcctgatcttaatcgttttcttactaggacattacaagttctactacctgatcttgctgccaaagcaagccctgcagcttctgctctcattcgaactttaggaaaacaattaaatgtcaatcgtagagagattttaataaacaacttcaaatatattttttctcatttggtctgttcttgttccaaagatgaattagaacgtgcccttcattatctgaagaatgaaacagaaattgaactggggagcctgttgagacaagatttccaaggattgcataatgaattattgctgcgtattggagaacactatcaacaggtttttaatggtttgtcaatacttgcctcatttgcatccagtgatgatccatatcagggcccgagagatatcatatcacctgaactgatggctgattatttacaacccaaattgttgggcattttggctttttttaacatgcagttactgagctctagtgttggcattgaagataagaaaatggccttgaacagtttgatgtctttgatgaagttaatgggacccaaacatgtcagttctgtgagggtgaagatgatgaccacactgagaactggccttcgattcaaggatgattttcctgaattgtgttgcagagcttgggactgctttgttcgctgcctggatcatgcttgtctgggctcccttctcagtcatgtaatagtagctttgttacctcttatacacatccagcctaaagaaactgcagctatcttccactacctcataattgaaaacagggatgctgtgcaagattttcttcatgaaatatattttttacctgatcatccagaattaaaaaagataaaagccgttctccaggaatacagaaaggagacctctgagagcactgatcttcagacaactcttcagctctctatgaaggccattcaacatgaaaatgtcgatgttcgtattcatgctcttacaagcttgaaggaaaccttgtataaaaatcaggaaaaactgataaagtatgcaacagacagtgaaacagtagaacctattatctcacagttggtgacagtgcttttgaaaggttgccaagatgcaaactctcaagctcggttgctctgtggggaatgtttaggggaattgggggcgatagatccaggtcgattagatttctcaacaactgaaactcaaggaaaagattttacatttgtgactggagtagaagattcaagctttgcctatggattattgatggagctaacaagagcttaccttgcgtatgctgataatagccgagctcaagattcagctgcctatgccattcaggagttgctttctatttatgactgtagagagatggagaccaacggcccaggtcaccaattgtggaggagatttcctgagcatgttcgggaaatactagaacctcatctaaataccagatacaagagttctcagaagtcaaccgattggtctggagtaaagaagccaatttacttaagtaaattgggtagtaactttgcagaatggtcagcatcttgggcaggttatcttattacaaaggttcgacatgatcttgccagtaaaattttcacctgctgtagcattatgatgaagcatgatttcaaagtgaccatctatcttcttccacatattctggtgtatgtcttactgggttgtaatcaagaagatcagcaggaggtttatgcagaaattatggcagttctaaagcatgacgatcagcataccataaatacccaagacattgcatctgatctgtgtcaactcagtacacagactgtgttctccatgcttgaccatctcacacagtgggcaaggcacaaatttcaggcactgaaagctgagaaatgtccacacagcaaatcaaacagaaataaggtagactcaatggtatctactgtggattatgaagactatcagagtgtaacccgttttctagacctcataccccaggatactctggcagtagcttcctttcgctccaaagcatacacacgagctgtaatgcactttgaatcatttattacagaaaagaagcaaaatattcaggaacatcttggatttttacagaaattgtatgctgctatgcatgaacctgatggagtggccggagtcagtgcaattagaaaggcagaaccatctctaaaagaacagatccttgaacatgaaagccttggcttgctgagggatgccactgcttgttatgacagggctattcagctagaaccagaccagatcattcattatcatggtgtagtaaagtccatgttaggtcttggtcagctgtctactgttatcactcaggtgaatggagtgcatgctaacaggtccgagtggacagatgaattaaacacgtacagagtggaagcagcttggaaattgtcacagtgggatttggtggaaaactatttggcagcagatggaaaatctacaacatggagtgtcagactgggacagctattattatcagccaaaaaaagagatatcacagctttttatgactcactgaaactagtgagagcagaacaaattgtacctctttcagctgcaagctttgaaagaggctcctaccaacgaggatatgaatatattgtgagattgcacatgttatgtgagttggagcatagcatcaaaccacttttccagcattctccaggtgacagttctcaagaagattctctaaactgggtagctcgactagaaatgacccagaattcctacagagccaaggagcctatcctggctctccggagggctttactaagcctcaacaaaagaccagattacaatgaaatggttggagaatgctggctgcagagtgccagggtagctagaaaggctggtcaccaccagacagcctacaatgctctccttaatgcaggggaatcacgactcgctgaactgtacgtggaaagggcaaagtggctctggtccaagggtgatgttcaccaggcactaattgttcttcaaaaaggtgttgaattatgttttcctgaaaatgaaaccccacctgagggtaagaacatgttaatccatggtcgagctatgctactagtgggccgatttatggaagaaacagctaactttgaaagcaatgcaattatgaaaaaatataaggatgtgaccgcgtgcctgccagaatgggaggatgggcatttttaccttgccaagtactatgacaaattgatgcccatggtcacagacaacaaaatggaaaagcaaggtgatctcatccggtatatagttcttcattttggcagatctctacaatatggaaatcagttcatatatcagtcaatgccacgaatgttaactctatggcttgattatggtacaaaggcatatgaatgggaaaaagctggccgctccgatcgtgtacaaatgaggaatgatttgggtaaaataaacaaggttatcacagagcatacaaactatttagctccatatcaatttttgactgctttttcacaattgatctctcgaatttgtcattctcacgatgaagtttttgttgtcttgatggaaataatagccaaagtatttctagcctatcctcaacaagcaatgtggatgatgacagctgtgtcaaagtcatcttatcccatgcgtgtgaacagatgcaaggaaatcctcaataaagctattcatatgaaaaaatccttagagaagtttgttggagatgcaactcgcctaacagataagcttctagaattgtgcaataaaccggttgatggaagtagttccacattaagcatgagcactcattttaaaatgcttaaaaagctggtagaagaagcaacatttagtgaaatcctcattcctctacaatcagtcatgatacctacacttccatcaattctgggtacccatgctaaccatgctagccatgaaccatttcctggacattgggcctatattgcagggtttgatgatatggtggaaattcttgcttctcttcagaaaccaaagaagatttctttaaaaggctcagatggaaagttctacatcatgatgtgtaagccaaaagatgacctgagaaaggattgtagactaatggaattcaattccttgattaataagtgcttaagaaaagatgcagagtctcgtagaagagaacttcatattcgaacatatgcagttattccactaaatgatgaatgtgggattattgaatgggtgaacaacactgctggtttgagacctattctgaccaaactatataaagaaaagggagtgtatatgacaggaaaagaacttcgccagtgtatgctaccaaagtcagcagctttatctgaaaaactcaaagtattccgagaatttctcctgcccaggcatcctcctatttttcatgagtggtttctgagaacattccctgatcctacatcatggtacagtagtagatcagcttactgccgttccactgcagtaatgtcaatggttggttatattctggggcttggagaccgtcatggtgaaaatattctctttgattctttgactggtgaatgcgtacatgtagatttcaattgtcttttcaataagggagaaacctttgaagttccagaaattgtgccatttcgcctgactcataatatggttaatggaatgggtcctatgggaacagagggtctttttcgaagagcatgtgaagttacaatgaggctgatgcgtgatcagcgagagcctttaatgagtgtcttaaagacttttctacatgatcctcttgtggaatggagtaaaccagtgaaagggcattccaaagcgccactgaatgaaactggagaagttgtcaatgaaaaggccaagacccatgttcttgacattgagcagcgactacaaggtgtaatcaagactcgaaatagagtgacaggactgccgttatctattgaaggacatgtgcattaccttatacaggaagctactgatgaaaacttactatgccagatgtatcttggttggactccatatatgtgaaatgaaattatgtaaaagaatatgttaataatctaaaagtaatgcatttggtatgaatctgtggttgtatctgttcaattctaaagtacaacataaatttacgttctcagcaactgttatttctctctgatcattaattatatgtaaaataatatacattcagttattaagaaataaactgctttcttaata

SEQ ID NO: 110312 - DNA, 553 bp, Homo sapiens
  Payload ID: 1645
  Gene Symbol: ATR
  Gene Name: ATR serine/threonine kinase
  ENST ID: ENST00000515810
  CDS Start-End: 1-120
gcgccactgaatgaaactggagaagttgtcaatgaaaaggttagtagaagatggcaagttcttcaaattcatttaagtaacgtgaagtttgtgcttcaaagggtacttcccttgatctgattttctggatatgagaaatagcctcacaaggatcctgatgaactctctctttagtggacctcattaagccaagacccatgttcttgacattgagcagcgactacaaggtgtaatcaagactcgaaatagagtgacaggactgccgttatctattgaaggacatgtgcattaccttatacaggaagctactgatgaaaacttactatgccagatgtatcttggttggactccatatatgtgaaatgaaattatgtaaaagaatatgttaataatctaaaagtaatgcatttggtatgaatctgtggttgtatctgttcaattctaaagtacaacataaatttacgttctcagcaactgttatttctctctgatcattaattatatgtaaaataatatacattcagttattaagaaataaactgctttcttaata

SEQ ID NO: 110313 - DNA, 718 bp, Homo sapiens
  Payload ID: 1645
  Gene Symbol: ATR
  Gene Name: ATR serine/threonine kinase
  ENST ID: ENST00000504521
  CDS Start-End: 1-243
cataatatggttaatggaatgggtcctatgggaacagagggtctttttcgaagagcatgtgaagttacaatgaggctgatgcgtgatcagcgagagcctttaatgagtgtcttaaagacttttctacatgatcctcttgtggaatggagtaaaccagtgaaagggcattccaaagcgccactgaatgaaactggagaagttgtcaatgaaaagatggcaagttcttcaaattcatttaagtaacgtgaagtttgtgcttcaaagggtacttcccttgatctgattttctggatatgagaaatagcctcacaaggatcctgatgaactctctctttagtggacctcattaagccaagacccatgttcttgacattgagcagcgactacaaggtgtaatcaagactcgaaatagagtgacaggactgccgttatctattgaaggacatgtgcattaccttatacaggaagctactgatgaaaacttactatgccagatgtatcttggttggactccatatatgtgaaatgaaattatgtaaaagaatatgttaataatctaaaagtaatgcatttggtatgaatctgtggttgtatctgttcaattctaaagtacaacataaatttacgttctcagcaactgttatttctctctgatcattaattatatgtaaaataatatacattcagttattaagaaataaactgctttcttaataca

SEQ ID NO: 110314 - DNA, 5190 bp, Homo sapiens
  Payload ID: 1645
  Gene Symbol: ATR
  Gene Name: ATR serine/threonine kinase
  ENST ID: ENST00000513291
  CDS Start-End: 1-1372
tgaagtttttgttgtcttgatggaaataatagccaaagtatttctagcctatcctcaacaagcaatgtggatgatgacagctgtgtcaaagtcatcttatcccatgcgtgtgaacagatgcaaggaaatcctcaataaagctattcatatgaaaaaatccttagagaagtttgttggagatgcaactcgcctaacagataagcttctagaattgtgcaataaaccggttgatggaagtagttccacattaagcatgagcactcattttaaaatgcttaaaaagctggtagaagaagcaacatttagtgaaatcctcattcctctacaatcagtcatgatacctacacttccatcaattctgggtacccatgctaaccatgctagccatgaaccatttcctggacattgggcctatattgcagggtttgatgatatggtggaaattcttgcttctcttcagaaaccaaagaagatttctttaaaaggctcagatggaaagttctacatcatgatgtgtaagccaaaagatgacctgagaaaggattgtagactaatggaattcaattccttgattaataagtgcttaagaaaagatgcagagtctcgtagaagagaacttcatattcgaacatatgcagttattccactaaatgatgaatgtgggattattgaatgggtgaacaacactgctggtttgagacctattctgaccaaactatataaagaaaagggagtgtatatgacaggaaaagaacttcgccagtgtatgctaccaaagtcagcagctttatctgaaaaactcaaagtattccgagaatttctcctgcccaggcatcctcctatttttcatgagtggtttctgagaacattccctgatcctacatcatggtacagtagtagatcagcttactgccgttccactgcagtaatgtcaatggttggttatattctggggcttggagaccgtcatggtgaaaatattctctttgattctttgactggtgaatgcgtacatgtagatttcaattgtcttttcaataagggagaaacctttgaagttccagaaattgtgccatttcgcctgactcataatatggttaatggaatgggtcctatgggaacagagggtctttttcgaagagcatgtgaagttacaatgaggctgatgcgtgatcagcgagagcctttaatgagtgtcttaaagacttttctacatgatcctcttgtggaatggagtaaaccagtgaaagggcattccaaagcgccactgaatgaaactggagaagttgtcaatgaaaaggttagtagaaggtatagcttgatatgggctgtagtcctcatctctacaaatgaacttgatatgcagctatagttctcatctctatgcatgagaactgcttggaaatactgttagtgactattgattactctgaaatctagttctctagtatcacaatgccataagttttctttattgtcagtaatgttaacagtattcgcatttgtataataaaagttcatggcacacttgtttaaccatagacaattcacagttatgagatacagtaggaaaaactatagtacaaattgcctgaacttacagaacaacaggtctgagctttaatatcatgataccagtatgtcacaagctatgttaacaaatgcagcaattcacttcttacttagttgaagctgcaaagtttgcagatagttttgttgttgttgttgtggtggtggtggtggttgttgtttttgagacagagtctcgctctgtcatccaggctggagtacagtggcacgatcttggctcacggcaacctctgcctcctgggttcaagcagttctcctgccttagcctcccaagtagctgggattataagcgtgcaccaccacagctggctaattattatatttttagtagagatgggtttcaccatgttggccaggctggtcttgaacccctggcttcaagtgatccacccacctcagcatcccaaaatgcagggattataggcataagccactgtgcctagctcagatagttgtttttaataagttagaatagattgaggattcgttttttttggtggggggcactcttacatctttaataagtcttgtacaggcttactaaatacaatgaattataccaactatatgctaataaagattaaaaatttacattccagttaactacctaaagagtttaagtccactttcatcctactgatatagctcgaggaaggctagacctgtacgcccccatccttcatgtcatccttaaccctttgtcttgagaaagaaggtttagctgcttctttagttcttctaaaagaactaaaagaaaaatttctttttcttgctctattatcttcatctgtagggtgagattaatatttccagaattgtggaaaaattcactctgtagcagttgaagagcagatggtctctgggacatgttccttttcgttaagtgatagatatacttggcttgtactggataccttttactgagggattccaatatctgaccagttcttgaacctgttaaaacttctgctcgctccatttctgttctaaacagctgaaagagctctagcaggatcacactcaagctatatacatatctaactggacaaagccagccctggtctctacaaatagtttttgtttttttttaattagctgggctcagtggcacactcctgtagtcccagctacttgggaggctgaggtgggaggatcacttgaccccaggagttggaggctgctgtgagctatgatgacaccactgcactccagcctgggcaacagagtgagacccttggcatcatactcagatccttccaactgctgggatgaagcatacagacaagtgcccactctggatataggtgttggtgttctctttctgtttctatgggtccagtctgtgttcttttgtaagatgtctgggcaagccagaccaaagtctcctatttttacttgctgatcagggccatgaagaaaaatatttctaggcttcagatctctgtttacaatacccatgttatgtatgtaaaacacaccttccactaaatcttgaaaattttttgttgcaacactggccataaggacaggcaaacttgcccacacactcttggccctgtttgtttctctcagctagccagtcccacagctggagcttgcacacctgcatctggatgtgcagcatcaggtggtactgcacctcgatccccaacaagttgaagttttctttggaagattcctcagtggatgtgaaattctcctctaggagggaattacacctgagcagcaggggctgtttcacaattgaccaggtagacaaaccagccaggccattttcctggagctccagggatgattcatattcactggtgtctcttaagacggaattgatggtgtagttcacagcttgttgttctgattttgagtgtcagattctgcaaagggtttttcttttctgaggtgagctccgcgaagataatgggtgagctgctattttcaccatttttaacaccgtattggtatctgtctgcttggtcggagaacacttccagaaatggcaactgaacggaagctctgtctgcttgtggttggaccacttgaacatgttctgtccacgcagtgtgataacgaatgatattagggtgctgaagacctgccagcaccttcattccccgtagttctttcatgtaatgtgtttttgttgcacccttaatcaggattttttaaattgcataatactgaccatctaatttattcctgaccttgtatactcttccatatccaccttttcctaagatggcaagttcttcaaattcatttaagtaacgtgaagtttgtgcttcaaagggtacttcccttgatctgattttctggatatgagaaatagcctcacaaggatcctgatgaactctctctttagtggacctcattaagtgagtaatagctctgtggtgatgtagtctcaatgagctaaacttgtcacaagtgaaagaagacagcagccccattttgataaaggtctggcaaagtaacttaaacactgtcttgaatgaactgggtttggttcacgcacatggctcaagtgcttcaccaaagaaataagcggcagctggtttgcaactgcaaaagggaaagttggctgttgtaggggttattttaatacctggagttctgctggaacataagtcatatttggagtccaggctcttggcggaaaagtcgatggcagatggcacagcaacagtctccaccccgtggccctcctctttgtgctcgtgggctgcagcgcagcccaccagcccacccagcaccacctctgagaattattcttctaataacgttattcttccttttgcattcagatatgcttaagaaattgtacagttccaagtagctcacttagaacacccatttgcatgtactaacataatgtaaatattaggcagtacagcattgttatttgaatattcattgaaatgtttaagtcctaaacacttccaaagcagatttaaaaaattatttttctagaattgtaatgtgtaaataattccctggtatttcacgtagtccagaaacatgtccaagcagttgatgttgaatcaatcttgcgagcctccaaatcagtatcacaagctaactgtatttgtttaatttcttcttttcctgtatttgctcttacaaaaggggtattggtcagtaaaatggtattaacatttattaaatgtcaaaatataaagaaaggtagtaattccaaattattaacatctgtttttggttttatgtttcttctttttaggccaagacccatgttcttgacattgagcagcgactacaaggtgtaatcaagactcgaaatagagtgacaggactgccgttatctattgaaggacatgtgcattaccttatacaggaagctactgatgaaaacttactatgccagatgtatcttggttggactccatatatgtgaaatgaaattatgtaaaagaatatgttaataatctaaaagtaatgcatttggtatgaatctgtggttgtatctgttcaattctaaagtacaacataaatttacgttctcagcaactgttatttctctctgatcattaattatatgtaaaataatatacattcagttattaagaaataaactgctttcttaat

SEQ ID NO: 110315 - DNA, 929 bp, Homo sapiens
  Payload ID: 1645
  Gene Symbol: ATR
  Gene Name: ATR serine/threonine kinase
  ENST ID: ENST00000515149
  CDS Start-End: 1-929
atgctgctggaaaaactctgtgtcatgtttgaagacggtgtgctcatgcggcttaagtctgatttgctaaaagcagctttgtgccatttactgcagtatttccttaaatttgtgccagctgggtatgaatctgctttacaagtcaggaaggtctatgtgagaaatatttgtaaagctcttttggatgtgcttggaattgaggtagatgcagagtacttgttgggcccactttatgcagctttgaaaatggaaagtatggaaatcattgaggagattcaatgccaaactcaacaggaaaacctcagcagtaatagtgatggaatatcacccaaaaggcgtcgtctcagctcgtctctaaacccttctaaaagagcaccaaaacagactgaggaccgtactttcaaggactgtcaacataaatccaagaagaaaccttctgtagtgataacttggatgtcattggatttttacacaaaagtgcttaagagctgtagaagtttgttagaatctgttcagaaactggacctggaggcaaccattgataaggtggtgaaaatttatgatgctttgatttatatgcaagtaaacagttcatttgaagatcatatcctggaagatttatgtggtatgctctcacttccatggatttattcccattctgatgatggctgtttaaagttgaccacatttgccgctaatcttctaacattaagctgtaggatttcagatagctattcaccacaggcacaatcacgatgtgtgtttcttctgactctgtttccaagaagaatattccttgagtggagaacagcagtttacaactgggccctgcagagctcccatgaagtaatccgggctagttgtgttagtggattttttatcttattgcagcagcagaattcttgtaacagagttcccaagattcttat

SEQ ID NO: 110316 - DNA, 724 bp, Homo sapiens
  Payload ID: 1645
  Gene Symbol: ATR
  Gene Name: ATR serine/threonine kinase
  ENST ID: ENST00000507148
  CDS Start-End: 21-323
tagtgcctcgcagcctcagcatgggggaacatggcctggagctggcttccatgatccccgccctgcgggagctgggcagtgccacaccagaggaatataatacagttgtacagaagccaagacaaattctgtgtcaattcattgaccggatacttacagatgtaaatgttgttgctgtagaacttgtaaagaaaactgactctcagccaacctccgtgatgttgcttgatttcatccagcatatcatgaaatcctccccacttatgtttgtaaatgtgagtggaagccatgaggccaaaggcagttgtattgtatttccttaaatttgtgccagctgggtatgaatctgctttacaagtcaggaaggtctatgtgagaaatatttgtaaagctcttttggatgtgcttggaattgaggtagatgcagagtacttgttgggcccactttatgcagctttgaaaatggaaagtatggaaatcattgaggagattcaatgccaaactcaacaggaaaacctcagcagtaatagtgatggaatatcacccaaaaggcgtcgtctcagctcgtctctaaacccttctaaaagagcaccaaaacagactgaggaaattaaacatgtggacatgaaccaaaagagcatattatggagtgcactgaaacagaaagctgaatcccttcagatttcccttgaatacagtggcctaaagaatcctgttattgaga

SEQ ID NO: 110317 - DNA, 4351 bp, Homo sapiens
  Payload ID: 1646
  Gene Symbol: ATN1
  Gene Name: atrophin 1
  Uniprot ID: P54259
  ENST ID: ENST00000356654
  CDS Start-End: 238-3810
gacgccatactggacgccaagtgggaggaacttcaaggctgtcccctgcgggcctcccgctctgcttctgcgaaggtttcattgaaaacagatcctgcaaaagttccaggtgcccacactggaaacttggagatcctgcttcccagaccacagctgtggggaacttggggtggagcagagaagtttctgtattcagctgcccaggcagaggagaatggggtctccacagcctgaagaatgaagacacgacagaataaagactcgatgtcaatgaggagtggacggaagaaagaggcccctgggccccgggaagaactgagatcgaggggccgggcctcccctggaggggtcagcacgtccagcagtgatggcaaagctgagaagtccaggcagacagccaagaaggcccgagtagaggaagcctccaccccaaaggtcaacaagcagggtcggagtgaggagatctcagagagtgaaagtgaggagaccaatgcaccaaaaaagaccaaaactgagcaggaactccctcggccacagtctccctccgatctggatagcttggacgggcggagccttaatgatgatggcagcagcgaccctagggatatcgaccaggacaaccgaagcacgtcccccagtatctacagccctggaagtgtggagaatgactctgactcatcttctggcctgtcccagggcccagcccgcccctaccacccacctccactctttcctccttcccctcaaccgccagacagcacccctcgacagccagaggctagctttgaaccccatccttctgtgacacccactggatatcatgctcccatggagccccccacatctcgaatgttccaggctcctcctggggcccctccccctcacccacagctctatcctgggggcactggtggagttttgtctggacccccaatgggtcccaaggggggaggggctgcctcatcagtggggggccctaatgggggtaagcagcaccccccacccactactcccatttcagtatcaagctctggggctagtggtgctcccccaacaaagccgcctaccactccagtgggtggtgggaacctaccttctgctccaccaccagccaacttcccccatgtgacaccgaacctgcctcccccacctgccctgagacccctcaacaatgcatcagcctctccccctggcctgggggcccaaccactacctggtcatctgccctctccccacgccatgggacagggtatgggtggacttcctcctggcccagagaagggcccaactctggctccttcaccccactctctgcctcctgcttcctcttctgctccagcgccccccatgaggtttccttattcatcctctagtagtagctctgcagcagcctcctcttccagttcttcctcctcttcctctgcctcccccttcccagcttcccaggcattgcccagctacccccactctttccctcccccaacaagcctctctgtctccaatcagccccccaagtatactcagccttctctcccatcccaggctgtgtggagccagggtcccccaccacctcctccctatggccgcctcttagccaacagcaatgcccatccaggccccttccctccctctactggggcccagtccaccgcccacccaccagtctcaacacatcaccatcaccaccagcaacagcaacagcagcagcagcagcagcagcagcagcagcagcagcagcagcagcatcacggaaactctgggccccctcctcctggagcatttccccacccactggagggcggtagctcccaccacgcacacccttacgccatgtctccctccctggggtctctgaggccctacccaccagggccagcacacctgcccccacctcacagccaggtgtcctacagccaagcaggccccaatggccctccagtctcttcctcttccaactcttcctcttccacttctcaagggtcctacccatgttcacacccctccccttcccagggccctcaaggggcgccctaccctttcccaccggtgcctacggtcaccacctcttcggctaccctttccacggtcattgccaccgtggcttcctcgccagcaggctacaaaacggcctccccacctgggcccccaccgtacggaaagagagccccgtccccgggggcctacaagacagccaccccacccggatacaaacccgggtcgcctccctccttccgaacggggaccccaccgggctatcgaggaacctcgccacctgcaggcccagggaccttcaagccgggctcgcccaccgtgggacctgggcccctgccacctgcggggccctcaggcctgccatcgctgccaccaccacctgcggcccctgcctcagggccgcccctgagcgccacgcagatcaaacaggagccggctgaggagtatgagacccccgagagcccggtgcccccagcccgcagcccctcgccccctcccaaggtggtagatgtacccagccatgccagtcagtctgccaggttcaacaaacacctggatcgcggcttcaactcgtgcgcgcgcagcgacctgtacttcgtgccactggagggctccaagctggccaagaagcgggccgacctggtggagaaggtgcggcgcgaggccgagcagcgcgcgcgcgaagaaaaggagcgcgagcgcgagcgggaacgcgagaaagagcgcgagcgcgagaaggagcgcgagcttgaacgcagcgtgaagttggctcaggagggccgtgctccggtggaatgcccatctctgggcccagtgccccatcgccctccatttgaaccgggcagtgcggtggctacagtgcccccctacctgggtcctgacactccagccttgcgcactctcagtgaatatgcccggcctcatgtcatgtctcctggcaatcgcaaccatccattctacgtgcccctgggggcagtggacccggggctcctgggttacaatgtcccggccctgtacagcagtgatccagctgcccgggagagggaacgggaagcccgtgaacgagacctccgtgaccgcctcaagcctggctttgaggtgaagcctagtgagctggaacccctacatggggtccctgggccgggcttggatccctttccccgacatgggggcctggctctgcagcctggcccacctggcctgcaccctttcccctttcatccgagcctggggcccctggagcgagaacgtctagcgctggcagctgggccagccctgcggcctgacatgtcctatgctgagcggctggcagctgagaggcagcacgcagaaagggtggcggccctgggcaatgacccactggcccggctgcagatgctcaatgtgactccccatcaccaccagcactcccacatccactcgcacctgcacctgcaccagcaagatgctatccatgcagcctctgcctcggtgcaccctctcattgaccccctggcctcagggtctcaccttacccggatcccctacccagctggaactctccctaaccccctgcttcctcaccctctgcacgagaacgaagttcttcgtcaccagctctttgctgccccttaccgggacctgccggcctccctttctgccccgatgtcagcagctcatcagctgcaggccatgcacgcacagtcagctgagctgcagcgcttggcgctggaacagcagcagtggctgcatgcccatcacccgctgcacagtgtgccgctgcctgcccaggaggactactacagtcacctgaagaaggaaagcgacaagccactgtagaacctgcgatcaagagagcaccatggctcctacattggaccttggagcacccccaccctccccccaccgtgcccttggcctgccacccagagccaagagggtgctgctcagttgcagggcctccgcagctggacagagagtgggggagggagggacagacagaaggccaaggcccgatgtggtgtgcagaggtggggaggtggcgaggatggggacagaaagcgcacagaatcttggaccaggtctctcttccttgtcccccctgcttttctcctcccccatgcccaacccctgtggccgccgcccctcccctgccccgttggtgtgattatttcatctgttagatgtggctgttttgcgtagcatcgtgtgccacccctgcccctccccgatccctgtgtgcgcgccccctctgcaatgtatgccccttgccccttccccacactaataatttatatatataaatatctatatgacgctcttaaaaaaacatcccaaccaaaaccaaccaaacaaaaacatcctcacaactccccaggaa

SEQ ID NO: 110318 - DNA, 4290 bp, Homo sapiens
  Payload ID: 1646
  Gene Symbol: ATN1
  Gene Name: atrophin 1
  Uniprot ID: P54259
  ENST ID: ENST00000396684
  CDS Start-End: 235-3807
ccgccgccccccagaggcgccggagcccggaatcccgctcggagccagccagccgtcccgagctaccagcaggtttcattgaaaacagatcctgcaaaagttccaggtgcccacactggaaacttggagatcctgcttcccagaccacagctgtggggaacttggggtggagcagagaagtttctgtattcagctgcccaggcagaggagaatggggtctccacagcctgaagaatgaagacacgacagaataaagactcgatgtcaatgaggagtggacggaagaaagaggcccctgggccccgggaagaactgagatcgaggggccgggcctcccctggaggggtcagcacgtccagcagtgatggcaaagctgagaagtccaggcagacagccaagaaggcccgagtagaggaagcctccaccccaaaggtcaacaagcagggtcggagtgaggagatctcagagagtgaaagtgaggagaccaatgcaccaaaaaagaccaaaactgagcaggaactccctcggccacagtctccctccgatctggatagcttggacgggcggagccttaatgatgatggcagcagcgaccctagggatatcgaccaggacaaccgaagcacgtcccccagtatctacagccctggaagtgtggagaatgactctgactcatcttctggcctgtcccagggcccagcccgcccctaccacccacctccactctttcctccttcccctcaaccgccagacagcacccctcgacagccagaggctagctttgaaccccatccttctgtgacacccactggatatcatgctcccatggagccccccacatctcgaatgttccaggctcctcctggggcccctccccctcacccacagctctatcctgggggcactggtggagttttgtctggacccccaatgggtcccaaggggggaggggctgcctcatcagtggggggccctaatgggggtaagcagcaccccccacccactactcccatttcagtatcaagctctggggctagtggtgctcccccaacaaagccgcctaccactccagtgggtggtgggaacctaccttctgctccaccaccagccaacttcccccatgtgacaccgaacctgcctcccccacctgccctgagacccctcaacaatgcatcagcctctccccctggcctgggggcccaaccactacctggtcatctgccctctccccacgccatgggacagggtatgggtggacttcctcctggcccagagaagggcccaactctggctccttcaccccactctctgcctcctgcttcctcttctgctccagcgccccccatgaggtttccttattcatcctctagtagtagctctgcagcagcctcctcttccagttcttcctcctcttcctctgcctcccccttcccagcttcccaggcattgcccagctacccccactctttccctcccccaacaagcctctctgtctccaatcagccccccaagtatactcagccttctctcccatcccaggctgtgtggagccagggtcccccaccacctcctccctatggccgcctcttagccaacagcaatgcccatccaggccccttccctccctctactggggcccagtccaccgcccacccaccagtctcaacacatcaccatcaccaccagcaacagcaacagcagcagcagcagcagcagcagcagcagcagcagcagcagcagcatcacggaaactctgggccccctcctcctggagcatttccccacccactggagggcggtagctcccaccacgcacacccttacgccatgtctccctccctggggtctctgaggccctacccaccagggccagcacacctgcccccacctcacagccaggtgtcctacagccaagcaggccccaatggccctccagtctcttcctcttccaactcttcctcttccacttctcaagggtcctacccatgttcacacccctccccttcccagggccctcaaggggcgccctaccctttcccaccggtgcctacggtcaccacctcttcggctaccctttccacggtcattgccaccgtggcttcctcgccagcaggctacaaaacggcctccccacctgggcccccaccgtacggaaagagagccccgtccccgggggcctacaagacagccaccccacccggatacaaacccgggtcgcctccctccttccgaacggggaccccaccgggctatcgaggaacctcgccacctgcaggcccagggaccttcaagccgggctcgcccaccgtgggacctgggcccctgccacctgcggggccctcaggcctgccatcgctgccaccaccacctgcggcccctgcctcagggccgcccctgagcgccacgcagatcaaacaggagccggctgaggagtatgagacccccgagagcccggtgcccccagcccgcagcccctcgccccctcccaaggtggtagatgtacccagccatgccagtcagtctgccaggttcaacaaacacctggatcgcggcttcaactcgtgcgcgcgcagcgacctgtacttcgtgccactggagggctccaagctggccaagaagcgggccgacctggtggagaaggtgcggcgcgaggccgagcagcgcgcgcgcgaagaaaaggagcgcgagcgcgagcgggaacgcgagaaagagcgcgagcgcgagaaggagcgcgagcttgaacgcagcgtgaagttggctcaggagggccgtgctccggtggaatgcccatctctgggcccagtgccccatcgccctccatttgaaccgggcagtgcggtggctacagtgcccccctacctgggtcctgacactccagccttgcgcactctcagtgaatatgcccggcctcatgtcatgtctcctggcaatcgcaaccatccattctacgtgcccctgggggcagtggacccggggctcctgggttacaatgtcccggccctgtacagcagtgatccagctgcccgggagagggaacgggaagcccgtgaacgagacctccgtgaccgcctcaagcctggctttgaggtgaagcctagtgagctggaacccctacatggggtccctgggccgggcttggatccctttccccgacatgggggcctggctctgcagcctggcccacctggcctgcaccctttcccctttcatccgagcctggggcccctggagcgagaacgtctagcgctggcagctgggccagccctgcggcctgacatgtcctatgctgagcggctggcagctgagaggcagcacgcagaaagggtggcggccctgggcaatgacccactggcccggctgcagatgctcaatgtgactccccatcaccaccagcactcccacatccactcgcacctgcacctgcaccagcaagatgctatccatgcagcctctgcctcggtgcaccctctcattgaccccctggcctcagggtctcaccttacccggatcccctacccagctggaactctccctaaccccctgcttcctcaccctctgcacgagaacgaagttcttcgtcaccagctctttgctgccccttaccgggacctgccggcctccctttctgccccgatgtcagcagctcatcagctgcaggccatgcacgcacagtcagctgagctgcagcgcttggcgctggaacagcagcagtggctgcatgcccatcacccgctgcacagtgtgccgctgcctgcccaggaggactactacagtcacctgaagaaggaaagcgacaagccactgtagaacctgcgatcaagagagcaccatggctcctacattggaccttggagcacccccaccctccccccaccgtgcccttggcctgccacccagagccaagagggtgctgctcagttgcagggcctccgcagctggacagagagtgggggagggagggacagacagaaggccaaggcccgatgtggtgtgcagaggtggggaggtggcgaggatggggacagaaagcgcacagaatcttggaccaggtctctcttccttgtcccccctgcttttctcctcccccatgcccaacccctgtggccgccgcccctcccctgccccgttggtgtgattatttcatctgttagatgtggctgttttgcgtagcatcgtgtgccacccctgcccctccccgatccctgtgtgcgcgccccctctgcaatgtatgccccttgccccttccccacactaataatttatatatataaatatctatatgacgctctt

SEQ ID NO: 110319 - DNA, 8633 bp, Homo sapiens
  Payload ID: 1647
  Gene Symbol: ATRN
  Gene Name: attractin
  Uniprot ID: O75882
  ENST ID: ENST00000262919
  CDS Start-End: 69-4358
ggcgaagcggagccggccgtgcggtgtgtgtgtatgtgttcgcggggcgccgtctcagccccgggaagatggtggctgcagcggcggcaactgaggcaaggctgaggaggaggacggcggcgacggcagcgctcgcgggcaggagcggcgggccgcactgggactgggacgtgaccagggctgggaggccggggctgggggccgggctgcgcctcccgcggctgctgtctccaccgctgcggccacggctgctgctgctgctgttgttgctctcgccgccgctgctgctgctgctgctgccctgtgaggccgaggccgcggcggcggcggcggcggtgtcgggctcagccgcagccgaggccaaggaatgtgaccggccctgtgtcaacggcggtcgctgcaaccctggcaccggccagtgcgtctgccccgccggctgggtgggcgagcaatgccagcactgcgggggccgcttcagactaactggatcttctgggtttgtgacagatggacctggaaattataaatacaaaacgaagtgcacgtggctcattgaaggacagccaaatagaataatgagacttcgtttcaatcattttgctacagagtgtagttgggaccatttatatgtttatgatggggactcaatttatgcaccgctagttgctgcatttagtggcctcattgttcctgagagagatggcaatgagactgtccctgaggttgttgccacatcaggttatgccttgctgcatttttttagtgatgctgcttataatttgactggatttaatattacttacagttttgatatgtgtccaaataactgctcaggccgaggagagtgtaagatcagtaatagcagcgatactgttgaatgtgaatgttctgaaaactggaaaggtgaagcatgtgacattcctcactgtacagacaactgtggttttcctcatcgaggcatctgcaattcaagtgatgtcagaggatgctcctgcttctcagactggcagggtcctggatgttcagttcctgtaccagctaaccagtcattttggactcgagaggaatattctaacttaaagctccccagagcatctcataaagctgtggtcaatggaaacattatgtgggttgttggaggatatatgttcaaccactcagattataacatggttctagcgtatgaccttgcttctagggagtggcttccactaaaccgttctgtgaacaatgtggttgttagatatggtcattctttggcattatacaaggataaaatttacatgtatggaggaaaaattgattcaactgggaatgtgaccaatgagttgagagtttttcacattcataatgagtcatgggtgttgttgacccctaaggcaaaggagcagtatgcagtggttgggcactctgcacacattgttacactgaagaatggccgagtggtcatgctggtcatctttggtcactgccctctctatggatatataagcaatgtgcaggaatatgatttggataagaacacatggagtatattacacacccagggtgcccttgtgcaagggggttacggccatagcagtgtttacgaccataggaccagggccctatacgttcatggtggctacaaggctttcagtgccaataagtaccggcttgcagatgatctctaccgatatgatgtggatacccagatgtggaccattcttaaggacagccgatttttccgttacttgcacacagctgtgatagtgagtggaaccatgctggtgtttggaggaaacacacacaatgacacatctatgagccatggcgccaaatgcttctcttcagatttcatggcctatgacattgcctgtgaccgctggtcagtgcttcccagacctgatctccaccatgatgtcaacagatttggccattcagcagtcttacacaacagcaccatgtatgtgttcggtggtttcaatagtctcctcctcagcgacatcctggtattcacctcggaacagtgtgatgcgcatcggagtgaagccgcttgtttagcagcaggacctggtattcggtgtgtgtggaacacagggtcgtctcagtgtatctcgtgggcgctggcaactgatgaacaagaagaaaagttaaaatcagaatgtttttccaaaagaactcttgaccatgacagatgtgaccagcacacagattgttacagctgcacagccaacaccaatgactgccactggtgcaatgaccattgtgtccccaggaaccacagctgctcagaaggccagatctccatttttaggtatgagaattgccccaaggataaccccatgtactactgtaacaagaagaccagctgcaggagctgtgccctggaccagaactgccagtgggagccccggaatcaggagtgcattgccctgcccgaaaatatctgtggcattggctggcatttggttggaaactcatgtttgaaaattactactgccaaggagaattatgacaatgctaaattgttctgtaggaaccacaatgcccttttggcttctcttacaacccagaagaaggtagaatttgtccttaagcagctgcgaataatgcagtcatctcagagcatgtccaagctcaccttaaccccatgggtcggccttcggaagatcaatgtgtcctactggtgctgggaagatatgtccccatttacaaatagtttactacagtggatgccgtctgagcccagtgatgctggattctgtggaattttatcagaacccagtactcggggactgaaggctgcaacctgcatcaacccactcaatggtagtgtctgtgaaaggcctgcaaaccacagtgctaagcagtgccggacaccatgtgccttgaggacagcatgtggagattgcaccagcggcagctctgagtgcatgtggtgcagcaacatgaagcagtgtgtggactccaatgcctacgtggcctccttcccttttggccagtgtatggaatggtatacgatgagcacctgcccccctgaaaattgttcaggctactgtacctgtagtcattgcttggagcaaccaggctgtggctggtgtactgatcccagcaatactggcaaagggaaatgcatagagggttcctataaaggaccagtgaagatgccttcgcaagcccctacaggaaatttctatccacagcccctgctcaattccagcatgtgtctagaggacagcagatacaactggtctttcattcactgtccagcttgccaatgcaacggccacagtaaatgcatcaatcagagcatctgtgagaagtgtgagaacctgaccacaggcaagcactgcgagacctgcatatctggcttctacggtgatcccaccaatggagggaaatgtcagccatgcaagtgcaatgggcacgcgtctctgtgcaacaccaacacgggcaagtgcttctgcaccaccaagggcgtcaagggggacgagtgccagctatgtgaggtagaaaatcgataccaaggaaaccctctcagaggaacatgttattatactcttcttattgactatcagttcacctttagtctatcccaggaagatgatcgctattacacagctatcaattttgtggctactcctgacgaacaaaacagggatttggacatgttcatcaatgcctccaagaatttcaacctcaacatcacctgggctgccagtttctcagctggaacccaggctggagaagagatgcctgttgtttcaaaaaccaacattaaggagtacaaagatagtttctctaatgagaagtttgattttcgcaaccacccaaatatcactttctttgtttatgtcagtaatttcacctggcccatcaaaattcagattgccttctctcagcacagcaattttatggacctggtacagttcttcgtgactttcttcagttgtttcctctctttgctcctggtggctgctgtggtttggaagatcaaacaaagttgttgggcctccagacgtagagagcaacttcttcgagagatgcaacagatggccagccgtccctttgcctctgtaaatgtcgccttggaaacagatgaggagcctcctgatcttattggggggagtataaagactgttcccaaacccattgcactggagccgtgttttggcaacaaagccgctgtcctctctgtgtttgtgaggctccctcgaggcctgggtggcatccctcctcctgggcagtcaggtcttgctgtggccagcgccctggtggacatttctcagcagatgccgatagtgtacaaggagaagtcaggagccgtgagaaaccggaagcagcagccccctgcacagcctgggacctgcatctgatgctggggccagggactctcccacgcacgagctagtgagtggcacaccagagccatctgcagggaagggcgtggcggggaaatggctgtgcggtgcgggacggaagactggaaaccctcaaagcatctgactcacctgcatgatcacaagctttctttgacggtttctcccatccgtgttccagcatctaaccttttacttttgcataggaaatacttgatttaattacaggtccagggatgagctgatggttgctggaggaggccagtgtagagccagtgagagaactaggaatgacactcaggttcactgtggaaaactgttcttgggactgtctcaactgtgcaaaaaacaaaagatggagtgtttacaagtagacattcgtcatcagttgttcttgaacatggtcttttaaaaactagtcagatgaattgttttcatctgaagcctgctatcttttttaaaagatgtgctatttattcttgcacgatttaggcaattatctctcttccagggagtacctttttttctagttgagaattaataatggtccatctcttttgatcatatcaagctaggatagaaggggggctattttaaatgtcaaggtcagcagtgttactttgaatgtaaactggtataataggtagttttctatagtaacttgattaatttagtcttaatccatttgaaactctctcttcctttctctctgcctgtccctctccttctccatctcaccctccctctctcacacatacacacacaaacacatacacacaacactaagtgcctagactttaaatagatctagcaattggaaagttagtaagcctaagtttttacataattgcattcctacattcttgtaaaatttaaatagctaccattggcaatctgctttttttctaaaatctgatttgcagccaggaaagaattttctcacccaaggaacatttgatctagcagcagggatgagaggaaagcagaaatgaatgaactgtgaaagctcctgtttttattatcaaaaaggacactgtcaagaaggcgccccctgcccccacccccgtgtcaccctaggcctgataagcgatcagaggaaaggactcattcatgtcacgcttccttgagcagaaaagagcactgagagcacttgggacccctggatcagagagcatctgtgtgtcctgcagcctcctctgaacttgtggttcattctcaggctggggtggactcagatgccaggaaagggacagcctcccattgtcaggcagaagctgcccaaagcctggagaaggacttgtttgccctctttcccccaggaggggctcgacccacccaccctccctctcagaccaaggtggtggctgtgaggagggcagcaaatgctgacaaggatgaaaagcacatggaaaaaaatggatgaggagggaaaactctgccaaatggaaaatgaccaaatttaagagggtgggacagtcccctgctcctctcccagagggcactgcttggaaattgtgttttccccatttatggtgctctgtattctggcattatgcagcagcctcccagaagctctcttctgcttcaaaacctgggatctctggcattaccctattgggatggaccgctggacagcaatgctcgagtttgtgaatttggagagatactcaaaagagctaaaactgcagcattttacctttaaatgcagtgcctagagagagagtattgtctcttccccaacactaaccccactcccatgaagaattgcctggaaagatgttttcaaggaatttgaaccataaaacactatctgatgcacagaacacctctactttgagactcacctctcataaagcttctttttcacattactgttaaagaccagacgttctagaaaagacccctcctctcatgagctcccccatccctgctacagaacacagcacccatggcgcctgcagtggactggccccttaattcccacaggcccccccagcaaggccaaagggaggcccctgggtattgtcctcctacaaggaagatcctctttgtttgttcaaaggaccagttttcctaggccaaagaagtctcttccccatgttagtcctatgccttgaaatatcatgcaccatgacccacagccatctggttatgtcttatttttttcctaaaagataatgtttatttttaaaaaggaaggaaggagcaagtgaagtttcattctgctccagcggtggggaagccgctgaatccacctgcttctcctttgcaaccgacagcaaacagctttctccggcctcagggcagaaaaagggaatggcagggagtaagaggcgctgggctcggagcctgtttccaagaaggaattggttgtcatctggcagtgttgcgcgtcacaagagagcctgtatataaattaaaatagtcaagacaacactgaccttgcacttgtacataactatacagtagtgtccagaatgttcagacattcggagtgtacataaaacagaaaaaatcttcatgtatttttattaaatataacaatgtctgagtttcacctaagatgtttttgtgccatatgctggatatccaggttctcgccaggccccgatacatgaataacaaacccaagaaacgcatccccattgtgtgatgtgttcagatgcatctggcaccaattaggtatttcttaaaacaggactcatctgtcagagtgcacatgaaaaatcaggcagggaatcgaaacgacagtgctggaggagactcaggaagcagaggcgtccctgccgctgcccttggccctgcaagcacatcatgaccctttctggcagcctcttggtgctctgggtagtgagggatgaccagtcttgtcctgagaaatgtttctcttagtctttaagttcaaagactaacctgtagcaatcagactttccaaaagggggttctccattttttgtagttttgtctaaatttttaatgaccatttcctggaatcagtttattatactgaaaactgggggtgggagtagggagctagtttgttgataaatagttcccatttccccatggagaatttgacataccctggactcctgtgtgcctcctgccatccctgcacacagcctggggagaagcctgtgcctccccgtgtggagagaaggcaaccccagatcccctgagctaacccggaggaaaggcagtcctggacagaagactgtcagcagaaggaaagtactggactacccgtgggtaagtcctgccattcaagactggagacacctgggaaataaaaagagcagggcactgctggtgggaagaggcattttaccttccagtgcaaatcctgctcctttgatttaatggggtgtactggggccaggggctgattcacttccttgggagatggtggtgttttcatgaacatctttgatccttccatttcatttattcatccatccattcaacaagtatttgctaaacactaacttaagctaatgctagggtagtgactgagatgtaaaaatagattttagaattaaaacaaaatccaagtcctcacacccctgtcatcccaggagatctttccttgtggtggtttctgtgagaattggccatcctgaggacacagccaggacggcagaggcctcctggcctcagggcatgccctgcctaccttctgaaatgtttaccccattgaccaaacttggctccagccattgcggtggtttctagatagccaggcccaccaagagatattgccccttgatgagagtcaaacaccctgcctacaaggagatgttttgaaatggagaggaaaattggcacctcatcttttaaaggcagtaatggaattgattttcagtaactgaatttgtgcacaaaacattctaaacactagtgaagcctgtttcgttgaactaattctggctctggaaatgtttttgttttatagttatttacgatttcgtttgtttggattcaagcttagtttgttaatatgtataatttagcatctattacactcatgtaaatatggagtaagtattgtaaactatttcatcgcggggattgtgggtgttatacatacatttaggactgcaattttttggtattttttgtattgtaaaataacagctaatttaagcaggaacaagagaactaagggaggtctgtgcattttaaacacaaatgtgaagaacttgtatataaacaaaagtaaatactataatacaaacttccttctgaaataaaagtagatctggtaaaaatgtg

SEQ ID NO: 110320 - DNA, 3921 bp, Homo sapiens
  Payload ID: 1647
  Gene Symbol: ATRN
  Gene Name: attractin
  Uniprot ID: O75882
  ENST ID: ENST00000446916
  CDS Start-End: 1-3819
atggtggctgcagcggcggcaactgaggcaaggctgaggaggaggacggcggcgacggcagcgctcgcgggcaggagcggcgggccgcactgggactgggacgtgaccagggctgggaggccggggctgggggccgggctgcgcctcccgcggctgctgtctccaccgctgcggccacggctgctgctgctgctgttgttgctctcgccgccgctgctgctgctgctgctgccctgtgaggccgaggccgcggcggcggcggcggcggtgtcgggctcagccgcagccgaggccaaggaatgtgaccggccctgtgtcaacggcggtcgctgcaaccctggcaccggccagtgcgtctgccccgccggctgggtgggcgagcaatgccagcactgcgggggccgcttcagactaactggatcttctgggtttgtgacagatggacctggaaattataaatacaaaacgaagtgcacgtggctcattgaaggacagccaaatagaataatgagacttcgtttcaatcattttgctacagagtgtagttgggaccatttatatgtttatgatggggactcaatttatgcaccgctagttgctgcatttagtggcctcattgttcctgagagagatggcaatgagactgtccctgaggttgttgccacatcaggttatgccttgctgcatttttttagtgatgctgcttataatttgactggatttaatattacttacagttttgatatgtgtccaaataactgctcaggccgaggagagtgtaagatcagtaatagcagcgatactgttgaatgtgaatgttctgaaaactggaaaggtgaagcatgtgacattcctcactgtacagacaactgtggttttcctcatcgaggcatctgcaattcaagtgatgtcagaggatgctcctgcttctcagactggcagggtcctggatgttcagttcctgtaccagctaaccagtcattttggactcgagaggaatattctaacttaaagctccccagagcatctcataaagctgtggtcaatggaaacattatgtgggttgttggaggatatatgttcaaccactcagattataacatggttctagcgtatgaccttgcttctagggagtggcttccactaaaccgttctgtgaacaatgtggttgttagatatggtcattctttggcattatacaaggataaaatttacatgtatggaggaaaaattgattcaactgggaatgtgaccaatgagttgagagtttttcacattcataatgagtcatgggtgttgttgacccctaaggcaaaggagcagtatgcagtggttgggcactctgcacacattgttacactgaagaatggccgagtggtcatgctggtcatctttggtcactgccctctctatggatatataagcaatgtgcaggaatatgatttggataagaacacatggagtatattacacacccagggtgcccttgtgcaagggggttacggccatagcagtgtttacgaccataggaccagggccctatacgttcatggtggctacaaggctttcagtgccaataagtaccggcttgcagatgatctctaccgatatgatgtggatacccagatgtggaccattcttaaggacagccgatttttccgttacttgcacacagctgtgatagtgagtggaaccatgctggtgtttggaggaaacacacacaatgacacatctatgagccatggcgccaaatgcttctcttcagatttcatggcctatgacattgcctgtgaccgctggtcagtgcttcccagacctgatctccaccatgatgtcaacagatttggccattcagcagtcttacacaacagcaccatgtatgtgttcggtggtttcaatagtctcctcctcagcgacatcctggtattcacctcggaacagtgtgatgcgcatcggagtgaagccgcttgtttagcagcaggacctggtattcggtgtgtgtggaacacagggtcgtctcagtgtatctcgtgggcgctggcaactgatgaacaagaagaaaagttaaaatcagaatgtttttccaaaagaactcttgaccatgacagatgtgaccagcacacagattgttacagctgcacagccaacaccaatgactgccactggtgcaatgaccattgtgtccccaggaaccacagctgctcagaaggccagatctccatttttaggtatgagaattgccccaaggataaccccatgtactactgtaacaagaagaccagctgcaggagctgtgccctggaccagaactgccagtgggagccccggaatcaggagtgcattgccctgcccgaaaatatctgtggcattggctggcatttggttggaaactcatgtttgaaaattactactgccaaggagaattatgacaatgctaaattgttctgtaggaaccacaatgcccttttggcttctcttacaacccagaagaaggtagaatttgtccttaagcagctgcgaataatgcagtcatctcagagcatgtccaagctcaccttaaccccatgggtcggccttcggaagatcaatgtgtcctactggtgctgggaagatatgtccccatttacaaatagtttactacagtggatgccgtctgagcccagtgatgctggattctgtggaattttatcagaacccagtactcggggactgaaggctgcaacctgcatcaacccactcaatggtagtgtctgtgaaaggcctgcaaaccacagtgctaagcagtgccggacaccatgtgccttgaggacagcatgtggagattgcaccagcggcagctctgagtgcatgtggtgcagcaacatgaagcagtgtgtggactccaatgcctacgtggcctccttcccttttggccagtgtatggaatggtatacgatgagcacctgcccccctgaaaattgttcaggctactgtacctgtagtcattgcttggagcaaccaggctgtggctggtgtactgatcccagcaatactggcaaagggaaatgcatagagggttcctataaaggaccagtgaagatgccttcgcaagcccctacaggaaatttctatccacagcccctgctcaattccagcatgtgtctagaggacagcagatacaactggtctttcattcactgtccagcttgccaatgcaacggccacagtaaatgcatcaatcagagcatctgtgagaagtgtgagaacctgaccacaggcaagcactgcgagacctgcatatctggcttctacggtgatcccaccaatggagggaaatgtcagccatgcaagtgcaatgggcacgcgtctctgtgcaacaccaacacgggcaagtgcttctgcaccaccaagggcgtcaagggggacgagtgccagctatgtgaggtagaaaatcgataccaaggaaaccctctcagaggaacatgttattatactcttcttattgactatcagttcacctttagtctatcccaggaagatgatcgctattacacagctatcaattttgtggctactcctgacgaacaaaacagggatttggacatgttcatcaatgcctccaagaatttcaacctcaacatcacctgggctgccagtttctcagctggaacccaggctggagaagagatgcctgttgtttcaaaaaccaacattaaggagtacaaagatagtttctctaatgagaagtttgattttcgcaaccacccaaatatcactttctttgtttatgtcagtaatttcacctggcccatcaaaattcaggtgcaaactgaacaatgaggacgcatggacacaggaaggggaacatcacacaccagggcctgttgtggggtggggggaaggggaagggatagcattaggggatatacctaatgttaaatg

SEQ ID NO: 110321 - DNA, 8479 bp, Homo sapiens
  Payload ID: 1648
  Gene Symbol: ATRNL1
  Gene Name: attractin-like 1
  Uniprot ID: Q5VV63
  ENST ID: ENST00000355044
  CDS Start-End: 127-4266
ggacgggcgccggtgaggaggaggagaagcggcggcggagaggttttctgcggccggaattcccttcaacagcatccctgtcggcgcccgcgagcgcagtctcgccgggcaggggcgccggggaagatggagactgggggccgggcccgcactggtaccccgcagccagcggccccgggggtgtggagggctcggccggcgggcggcggcggcgggggcgcctcctcctggctgctggacgggaacagctggctgctgtgctatggcttcctctacctggcgctctacgcgcaggtgtcccagtccaagccgtgcgagaggaccggctcctgcttctcgggccgctgtgtcaactccacctgcctctgcgacccgggctgggtgggggaccagtgccagcactgccagggcaggttcaagttaacagaaccttctggatatttaacagatggcccaattaactataaatataaaactaaatgtacttggctcattgaaggctatccaaatgcagtgttaagattaagattcaatcattttgctacagaatgtagctgggatcatatgtatgtttatgatggagattcaatatatgcacctttaatagctgtacttagtggtttgatagtccctgaaataaggggcaatgaaactgtgcctgaagttgttactacatctggctatgcactgttacatttttttagtgatgctgcgtataatctaactggtttcaacattttctattcaatcaattcttgtcctaacaattgctctggtcatgggaagtgtacaactagtgtctctgttccaagtcaagtatattgtgaatgtgataaatactggaagggtgaagcttgtgatattccttactgtaaagccaattgcggcagtccagatcacggttactgtgacctgactggagaaaaattatgtgtctgcaatgatagttggcaaggtcctgattgttctttgaatgttccctctactgagtcttactggattctgccaaacgttaaacccttcagtccttctgtaggtcgggcttcacataaagcagttttacacgggaaatttatgtgggtgattggtggatatacttttaactacagttcttttcaaatggtcctaaattacaatttagaaagcagtatatggaatgtaggaactccatcaaggggacctctccagagatatggacactctcttgctttatatcaggaaaacatctttatgtatggaggcagaattgaaacaaatgatggcaatgtcacagatgaattatgggtttttaacatacatagtcagtcatggagtacaaaaactcctactgttcttggacatggtcagcagtatgctgtggagggacattcagcacatattatggagttggatagtagagatgttgtcatgatcataatatttggatattctgcaatatatggttatacaagcagcatacaggaataccatatctcatcaaacacttggcttgttccagaaactaaaggagctattgtacaaggtggatatggccatactagtgtgtatgatgaaataacaaagtccatttatgttcatggagggtataaagcattgccagggaacaaatatggattggttgatgatctttataaatatgaagttaacactaagacttggactattttgaaagaaagtgggtttgccagataccttcattcagctgttcttatcaatggagctatgcttatttttggaggaaatacccataatgacacttccttgagtaacggtgcaaaatgtttttctgccgatttcctggcatatgacatagcttgtgatgaatggaaaatactaccaaaaccaaatcttcatagagatgtcaacagatttggacactctgcagtagtcattaacgggtccatgtatatatttgggggattttctagtgtactccttaatgatatccttgtatacaagcctccaaattgcaaggctttcagagatgaagaactttgtaaaaatgctggtccagggataaaatgtgtttggaataaaaatcactgtgaatcttgggaatctgggaatactaataatattcttagagcaaagtgccctcctaaaacagctgcttctgatgacagatgttacagatatgcagattgtgccagctgtactgccaatacaaatgggtgccaatggtgtgatgacaagaaatgcatttcggcaaatagtaactgcagtatgtctgtcaagaactacaccaaatgtcatgtgagaaatgagcagatttgtaacaaacttaccagctgtaaaagctgttcactaaacttgaattgccagtgggatcagagacagcaagaatgccaggctttaccagctcatctttgtggagaaggatggagtcatattggggatgcttgtcttagagtcaattccagtagagaaaactatgacaatgcaaaactttattgctataatcttagtggaaatcttgcttcattaacaacctcaaaagaagtagaatttgttctggatgaaatacagaagtatacacaacagaaagtatcaccttgggtaggcttgcgcaagatcaatatatcctattggggatgggaagacatgtctccttttacaaacacaacactacagtggcttcctggcgaacccaatgattctgggttttgtgcatatctggaaagggctgcagtggcaggcttaaaagctaatccttgtacatctatggcaaatggccttgtctgtgaaaaacctgttgttagtccaaatcaaaatgcgaggccgtgcaaaaagccatgctctctgaggacatcatgttccaactgtacaagcaatggcatggagtgtatgtggtgcagcagtacgaaacgatgtgttgactctaatgcctatatcatctcttttccatatggacaatgtctagagtggcaaactgccacctgctcccctcaaaattgttctggattgagaacctgtggacagtgtttggaacagcctggatgtggctggtgcaatgatcctagtaatacaggaagaggacattgcattgaaggttcttcacggggaccaatgaagcttattggaatgcaccacagtgagatggttcttgacaccaatctttgccccaaagaaaagaactatgagtggtcctttatccagtgtccagcttgccagtgtaatggacatagcacttgcatcaataataatgtgtgcgaacagtgtaaaaatctcaccacaggaaagcagtgtcaagattgtatgccaggttattatggagatccaaccaatggtggacagtgcacagcttgtacatgcagtggccatgcaaatatctgtcatctgcacacaggaaaatgtttctgcacaactaaaggaataaaaggtgaccaatgccaattatgtgactctgaaaatcgctatgttggtaatccacttagaggaacatgttattacagccttttgattgattatcaatttaccttcagcttattacaggaagatgatcgccaccatactgccataaactttatagcaaacccagaacagtcgaacaaaaatctggatatatcaattaatgcatcaaacaactttaatctcaacattacgtggtctgtcggttcaacagctggaacaatatctggggaagagacttctatagtttccaagaataatataaaggaatacagagatagtttttcctatgaaaaatttaactttagaagcaatcctaacattacattctatgtgtacgtcagcaacttttcctggcctattaaaatacagattgcattctcacaacacaatacaatcatggaccttgtgcagttttttgtcaccttcttcagttgtttcctatccttattgctggtggctgctgtggtatggaagatcaaacaaacttgttgggcttctcgacggagagagcaactgcttcgagaacgacagcagatggccagccgtccctttgcttctgttgatgtagctctggaagtgggagctgaacaaacagagtttctgcgagggccattagagggggcacccaagccaattgccattgaaccatgtgctgggaacagagctgctgttctgactgtgtttctttgtctaccacgaggatcatcaggtgcccctccccctgggcagtcaggccttgcaattgccagtgccctaatagatatttcacaacagaaagcttcagatagtaaagataagacttctggagtccggaatcgaaaacacctttcaacacgtcaaggaacttgtgtctgagaaatggaaaccgctcctgtatattctgtactgttttacttcgggcttctgttaaagctgttctatggccttggattttatggaggcagatctctgtatcatccagagcctgagtacagtttccttccaaatggacaatgacccaggtggccaaagaatgttcatgagttttataaaagtattgatggtcacaggtgataaagtcagtttttaccactatcttaggcttattatagctaacattaaattactctggaaaaagatgtatattgtttcttaatgaagatgaaaaatatgtaattcatataaatcaactgtttatatcccaagacttgaaagaaagacattttttaatgcctgaatgatgagaattgtacagtttttgcctcataagcaaacttgaatcacctgtgtatgaacagggaatgaacacattgcaatggctttaaatgctcttttatctcgttgtaaaggtaaggcaagattttgatgtagtaggatgtaggtaatgtatttaaatatttcatatgaccatatcgtgtccaaactcagtctgagaatgtgacagctttccgcctaactagaatgcagaccagaatgagttcaactcattctgtgcaacttcacagggggtttattagaatgctcagtgtagaggacattcctgtcatccatgccaactacctaactcgttatcagagctgatagagcatggaaaagtctgtccagcgatcagttgttcccctccttccaaaaacagcctccaataccacaacctgaaaagagccgaaatggttattttacagcatacaagcttctgctccagtatgataatttttaattgcctaagaatcattggatcagacctaaatgatccatctgcatttttataagaatggatctttctttgcccttcctctcctagctgctagattttaactaccttttacaaatgttacaaaatgtattttagaggcgacatctctcaagatgacctgagttccttcctgccaactgttccacctagaatacaagtagagaagagcactggctggcaagcatcaacaggagtcttcttcccaacacgagcgcatccatgtcctgagaaaaagtctgtggtttagaaaatatgtccatggttgcccacagtcagcacactcttagtgactcaaaattctgaattatggcagaaaggaaaaataaaacatacttcacattagaacacagaatcatttacatcctaatactgaccacagttcactaaagctcagtagcattaacagatatagtttggaattgcagtttcctcacttcagggtgacaagatatgtataacagtgacagaaatctccaaagctgctgtatatgatatagctttgttaaatatgaaggtcctttaaatacaattgatgtttagtactatatatgtacttttcacattctttggatttctggaaggttatgacactttactgtttacagctaatgcatagttacttgcatgccatggttgtacagtagcagactatgaccctattgtgatattaagtgtttatttcataatgccatttatacatagctgaatttgatgaggattgaatgtcatatataagaggaatgatcatacaatatgtagttgcatcttatataagatttctaggttgcatctaaccatgactatgtcattattttgataattaggcatttatgaattatagtatatattcctcatgttggcatgataattttgctattttccatgcattaaaaataagacaaattcttagagtaattttagtaattttatctataatctgtggggtttttttggagggggaggccactggttgtttctacttccctgtgatattttctctctcattaaaggaatgagctaagtttgtaaatatctcctaaaaacaatcaagtaattttattagcttcttttggaccctctaaatattgacttctctcatgaaaaaataaattgatgaaactaatgattacaaagatataatcattttttaaaaagtgattgcccaatgtatttctctaacaattgtcacaagagaaagcataacaataaaaatacaaaaacatacagatttagatgtaaaatctatataagctatatttttagggaggctaagcagatagtattactgtggaagaattatcaagttttattcacctcaaatcccactgggttcttaaaacttgaaaattcaaattgtagagaattatgagacacaatgtgatgtttagttaaagtcatgctatacctttctgggccacatattgctaactctgtggctaattatgcaattaattctcaacgtatcaaagcttttcactggcagtaaattctttgccctcaggtgaagtggattgaaaagacatcaaggatcaaggataatcactttgaatctgttggtttttccccctacattccagacactttaaatttggatgctttcattttttttaaatcaaaccacacaaatatgcagatactttcccagaatttcgcagttaaatggctgatcctcttgaaaactaaccttaatggaattctaaacatttcagtttagaatgactttgaaaaattccttagatttttaggatgttttattctgccaagtatgaaaaaaaaatggttaaatacaatggagttttaaaaattaacctggggattctatttgaactagaaaattcctattggaaaagaatttgcacatacttacagattcagctaataaattttaagaggattaggattctcataattctttaaatgaaaatttgttttagtgatacacagagatgccgtatactatagtgttatgttcagtaggaaaacttcaaatagttcgtatttaaaaaggtaattgatccttgctgtacttcccaacatctcatcttcttttagctgcagtaagatagaggtgactgtatggctacagttcatggtataaggtcatttagggtgcacactggcacacaggctggaaaacgggcactggacccagctttcaggtgtgtggtgctgggtaagtttcacctttgaagcctcagccttccatctgtaaagggcggtaatggtgcccacctttcgaggcattgcgaggctagatggtaacacacagaaagctcccacagtgggaccttgatgcagcgtagctggtattaacaaccgtggggacaccaggccactctttttctaccagttgttttatgaatccacctattaattttcatccatcttttggtcgtaggtaaaggtcaatcaggtttttcaaaaagactccctgaataacttaagttcctgtatttctaagatatagggatttctacaaaacgactttgacatttagtcaataaagacttaaactcttcttaaatctatagttttaggagagtttttcttaaaattactgactgatgacattgagacaagagcatcaatgatcacctttcacgtacaaactaggcaagacagggtcagtgcttacattttgtggttatacatgatacatcttttctcagtgaacataaaactatgatttgaaaggtgtcttatatttaaaaaagattgtaaaatgaaaactgaccaaatgaactaattctacccacctatggtctttttaaatgtcgagtttcaaaacccatttgccgtatactagagtgagcttggaaacttacctgattacaggaattgcttgggttcaggcagattcccactttcacctctagagatttagattcagaaacactggggtaggccctggagagcagtactcttaacaagctcctcagtgcttcttaccattaggcaaattagggaaacactgcattgggtcaaagtgctgcctttaatcgaccattagagggagttctctaaataacaaagttattactctaattcaaaatgctttaaagaattttccaaggaatacaagccatctggttggtgttagttatagcagtgatttcattagagtgtacatttaacattttagttttatcaaaattttttgaaattaagaattagaaccagagctcctatcagtatatatgtacacaggtgtgcatgccagtgttcaaaagattgtgtaaaagttcaagcccgttttagaaagccaacattttatgttataatatgctgttaatcaggactttattaaataaaaacattggctcttccaacccccac

SEQ ID NO: 110322 - DNA, 932 bp, Homo sapiens
  Payload ID: 1648
  Gene Symbol: ATRNL1
  Gene Name: attractin-like 1
  ENST ID: ENST00000526946
  CDS Start-End: 175-932
cgcgggccgcgggcgaggcggggccgcgcgcggggtcccctcctcctgccggtcaggtcccctcaggagcgccgggcgcagtctgcgcctcccgctccccgcctccggccgggtccgggacgccgcggctgtggggtcggcccgctaaggacaaggtcgggagactgggtggcgatgcccgagtgcgactggaggcagccgagcggaggcgacggcggttgggatctgtccctcctgaccggggagcgggactcggacgggcgccggttaacagaaccttctggatatttaacagatggcccaattaactataaatataaaactaaatgtacttggctcattgaaggctatccaaatgcagtgttaagattaagattcaatcattttgctacagaatgtagctgggatcatatgtatgtttatgatggagattcaatatatgcacctttaatagctgtacttagtggtttgatagtccctgaaataaggggcaatgaaactgtgcctgaagttgttactacatctggctatgcactgttacatttttttagtgatgctgcgtataatctaactggtttcaacattttctattcaatcaattcttgtcctaacaattgctctggtcatgggaagtgtacaactagtgtctctgttccaagtcaagtatattgtgaatgtgataaatactggaagggtgaagcttgtgatattccttactgtaaagccaattgcggcagtccagatcacggttactgtgacctgactggagaaaaattatgtgtctgcaatgatagttggcaaggtcctgattgttctttgaatgttccctctactgagtcttactggattctgccaaacgttaaacccttcagtccttctgtaggtcgggcttcacataaagcagttttacacgggaaatttatgtgggtgat

SEQ ID NO: 110323 - DNA, 648 bp, Homo sapiens
  Payload ID: 1648
  Gene Symbol: ATRNL1
  Gene Name: attractin-like 1
  ENST ID: ENST00000526373
  CDS Start-End: 1-648
ctgtgaaaaacctgttgttagtccaaatcaaaatgcgaggccgtgcaaaaagccatgctctctgaggacatcatgttccaactgtacaagcaatggcatggagtgtatgtggtgcagcagtacgaaacgatgtgttgactctaatgcctatatcatctcttttccatatggacaatgtctagagtggcaaactgccacctgctcccctcaaaattgttctggattgagaacctgtggacagtgtttggaacagcctggatgtggctggtgcaatgatcctagtaatacaggaagaggacattgcattgaaggttcttcacggggaccaatgaagcttattggaatgcaccacagtgagatggttcttgacaccaatctttgccccaaagaaaagaactatgagtggtcctttatccagtgtccagcttgtacatgcagtggccatgcaaatatctgtcatctgcacacaggaaaatgtttctgcacaactaaaggaataaaaggtgaccaatgccaattatgtgactctgaaaatcgctatgttggtaatccacttagaggaacatgttattacagccttttgattgattatcaatttaccttcagcttattacaggaagatgatcgccaccatactgccataaactt

SEQ ID NO: 110324 - DNA, 1583 bp, Homo sapiens
  Payload ID: 1648
  Gene Symbol: ATRNL1
  Gene Name: attractin-like 1
  ENST ID: ENST00000527407
  CDS Start-End: 289-1485
cgctccccgcctccggccgggtccgggacgccgcggctgtggggtcggcccgctaaggacaaggtcgggagactgggtggcgatgcccgagtgcgactggaggcagccgagcggaggcgacggcggttgggatctgtccctcctgaccggggagcgggactcggacgggcgccggtgaggaggaggagaagcggcggcggagaggttttctgcggccggaattcccttcaacagcatccctgtcggcgcccgcgagcgcagtctcgccgggcaggggcgccggggaagatggagactgggggccgggcccgcactggtaccccgcagccagcggccccgggggtgtggagggctcggccggcgggcggcggcggcgggggcgcctcctcctggctgctggacgggaacagctggctgctgtgctatggcttcctctacctggcgctctacgcgcaggtgtcccagtccaagccgtgcgagaggaccggctcctgcttctcgggccgctgtgtcaactccacctgcctctgcgacccgggctgggtgggggaccagtgccagcactgccagggcaggttcaagttaacagaaccttctggatatttaacagatggcccaattaactataaatataaaactaaatgtacttggctcattgaaggctatccaaatgcagtgttaagattaagattcaatcattttgctacagaatgtagctgggatcatatgtatgtttatgatggagattcaatatatgcacctttaatagctgtacttagtggtttgatagtccctgaaataaggggcaatgaaactgtgcctgaagttgttactacatctggctatgcactgttacatttttttagtgatgctgcgtataatctaactggtttcaacattttctattcaatcaattcttgtcctaacaattgctctggtcatgggaagtgtacaactagtgtctctgttccaagtcaagtatattgtgaatgtgataaatactggaagggtgaagcttgtgatattccttactgtaaagccaattgcggcagtccagatcacggttactgtgacctgactggagaaaaattatgtgtctgcaatgatagttggcaaggtcctgattgttctttgaatgttccctctactgagtcttactggattctgccaaacgttaaacccttcagtccttctgtaggtcgggcttcacataaagcagttttacacgggaaatttatgtgggtgattggtggatatacttttaactacagttcttttcaaatggtcctaaagaaaacatctttatgtatggaggcagaattgaaacaaatgatggcaatgtcacagatgaattatgggtttttaacatacatagtcagtcatggagtacaaaaactcctactgttcttggacatggtcagcagtatgctgtggagggacattcagcacatattatggagttggatagtagagatgttgtcatgatcataatatttggatattctgcaatatatggttatacaagcagcatacaggaataccatatctgtgagttacttaaaaattgtaatttctttattgat

SEQ ID NO: 110325 - DNA, 1818 bp, Homo sapiens
  Payload ID: 1648
  Gene Symbol: ATRNL1
  Gene Name: attractin-like 1
  Uniprot ID: Q5VV63
  ENST ID: ENST00000609571
  CDS Start-End: 387-1790
agttggcgcgggccgcgggcgaggcggggccgcgcgcggggtcccctcctcctgccggtcaggtcccctcaggagcgccgggcgcagtctgcgcctcccgctccccgcctccggccgggtccgggacgccgcggctgtggggtcggcccgctaaggacaaggtcgggagactgggtggcgatgcccgagtgcgactggaggcagccgagcggaggcgacggcggttgggatctgtccctcctgaccggggagcgggactcggacgggcgccggtgaggaggaggagaagcggcggcggagaggttttctgcggccggaattcccttcaacagcatccctgtcggcgcccgcgagcgcagtctcgccgggcaggggcgccggggaagatggagactgggggccgggcccgcactggtaccccgcagccagcggccccgggggtgtggagggctcggccggcgggcggcggcggcgggggcgcctcctcctggctgctggacgggaacagctggctgctgtgctatggcttcctctacctggcgctctacgcgcaggtgtcccagtccaagccgtgcgagaggaccggctcctgcttctcgggccgctgtgtcaactccacctgcctctgcgacccgggctgggtgggggaccagtgccagcactgccagggcaggttcaagttaacagaaccttctggatatttaacagatggcccaattaactataaatataaaactaaatgtacttggctcattgaaggctatccaaatgcagtgttaagattaagattcaatcattttgctacagaatgtagctgggatcatatgtatgtttatgatggagattcaatatatgcacctttaatagctgtacttagtggtttgatagtccctgaaataaggggcaatgaaactgtgcctgaagttgttactacatctggctatgcactgttacatttttttagtgatgctgcgtataatctaactggtttcaacattttctattcaatcaattcttgtcctaacaattgctctggtcatgggaagtgtacaactagtgtctctgttccaagtcaagtatattgtgaatgtgataaatactggaagggtgaagcttgtgatattccttactgtaaagccaattgcggcagtccagatcacggttactgtgacctgactggagaaaaattatgtgtctgcaatgatagttggcaaggtcctgattgttctttgaatgttccctctactgagtcttactggattctgccaaacgttaaacccttcagtccttctgtaggtcgggcttcacataaagcagttttacacgggaaatttatgtgggtgattggtggatatacttttaactacagttcttttcaaatggtcctaaattacaatttagaaagcagtatatggaatgtaggaactccatcaaggggacctctccagagatatggacactctcttgctttatatcaggaaaacatctttatgtatggaggcagaattgaaacaaatgatggcaatgtcacagatgaattatgggtttttaacatacatagtcagtcatggagtacaaaaactcctactgttcttggacatggtcagcagtatgctgtggagggacattcagcacatattatggagttggatagtagagatgttgtcatgatcataatatttggatattctgcaatatatggttatacaagcagcatacaggaataccatatctgtgagttacttaaaaattgtaatttctttattgattgggaatgtttttctctttaataaaatcttcatatgaatttagtcaaaa

SEQ ID NO: 110326 - DNA, 1701 bp, Homo sapiens
  Payload ID: 1648
  Gene Symbol: ATRNL1
  Gene Name: attractin-like 1
  ENST ID: ENST00000616894
  CDS Start-End: 181-291
agttggcgcgggccgcgggcgaggcggggccgcgcgcggggtcccctcctcctgccggtcaggtcccctcaggagcgccgggcgcagtctgcgcctcccgctccccgcctccggccgggtccgggacgccgcggctgtggggtcggcccgctaaggacaaggtcgggagactgggtggcgatgcccgagtgcgactggaggcagccgagcggaggcgacggcggttgggatctgtccctcctgaccggggagcgggactcggacgggcgccgggatttcgccagggaataaaaatgttcttcaaatgtttcttgaggatagaagattgatagttgggggaagaaatgcagaagcaaatatagtatcaaaagtggtacttcagttctcttagcattgattccagtcttctgtttccatttgaaaagaataaagcactcagaataacaagccattccttccttacacaggttaacagaaccttctggatatttaacagatggcccaattaactataaatataaaactaaatgtacttggctcattgaaggctatccaaatgcagtgttaagattaagattcaatcattttgctacagaatgtagctgggatcatatgtatgtttatgatggagattcaatatatgcacctttaatagctgtacttagtggtttgatagtccctgaaataaggggcaatgaaactgtgcctgaagttgttactacatctggctatgcactgttacatttttttagtgatgctgcgtataatctaactggtttcaacattttctattcaatgtagaaattggtaaccagagaatttttcaccagaaatattataaatatccttgaatcagcaatttattatggaatttatttatcctacaacgtatccaaaatcaattcttgtcctaacaattgctctggtcatgggaagtgtacaactagtgtctctgttccaagtcaagtatattgtgaatgtgataaatactggaagggtgaagcttgtgatattccttactgtaaagccaattgcggcagtccagatcacggttactgtgacctgactggagaaaaattatgtgtctgcaatgatagttggcaaggtcctgattgttctttgaatgttccctctactgagtcttactggattctgccaaacgttaaacccttcagtccttctgtaggtcgggcttcacataaagcagttttacacgggaaatttatgtgggtgattggtggatatacttttaactacagttcttttcaaatggtcctaaattacaatttagaaagcagtatatggaatgtaggaactccatcaaggggacctctccagagatatggacactctcttgctttatatcaggaaaacatctttatgtatggaggcagaattgaaacaaatgatggcaatgtcacagatgaattatgggtttttaacatacatagtcagtcatggagtacaaaaactcctactgttcttggacatggtcagcagtatgctgtggagggacattcagcacatattatggagttggatagtagagatgttgtcatgatcataatatttggatattctgcaatatatggttatacaagcagcatacaggaataccatatctgtgagttacttaaaaattgtaatttctttattgattgggaatgtttttctctttaataaaatcttcatatgaattta

SEQ ID NO: 110327 - DNA, 1240 bp, Homo sapiens
  Payload ID: 1649
  Gene Symbol: ACKR1
  Gene Name: atypical chemokine receptor 1 (Duffy blood group)
  Uniprot ID: Q16570
  ENST ID: ENST00000368121
  CDS Start-End: 176-1192
ggcttccccaggactgttcctgctccggctcttcaggctccctgctttgtccttttccactgtccgcactgcatctgactcctgcagagaccttgttctcccacccgaccttcctctctgtcctcccctcccacctgcccctcaattcccaggagactcttccggtgtaactctgatggcctcctctgggtatgtcctccaggcggagctctccccctcaactgagaactcaagtcagctggacttcgaagatgtatggaattcttcctatggtgtgaatgattccttcccagatggagactatggtgccaacctggaagcagctgccccctgccactcctgtaacctgctggatgactctgcactgcccttcttcatcctcaccagtgtcctgggtatcctagctagcagcactgtcctcttcatgcttttcagacctctcttccgctggcagctctgccctggctggcctgtcctggcacagctggctgtgggcagtgccctcttcagcattgtggtgcccgtcttggccccagggctaggtagcactcgcagctctgccctgtgtagcctgggctactgtgtctggtatggctcagcctttgcccaggctttgctgctagggtgccatgcctccctgggccacagactgggtgcaggccaggtcccaggcctcaccctggggctcactgtgggaatttggggagtggctgccctactgacactgcctgtcaccctggccagtggtgcttctggtggactctgcaccctgatatacagcacggagctgaaggctttgcaggccacacacactgtagcctgtcttgccatctttgtcttgttgccattgggtttgtttggagccaaggggctgaagaaggcattgggtatggggccaggcccctggatgaatatcctgtgggcctggtttattttctggtggcctcatggggtggttctaggactggatttcctggtgaggtccaagctgttgctgttgtcaacatgtctggcccagcaggctctggacctgctgctgaacctggcagaagccctggcaattttgcactgtgtggctacgcccctgctcctcgccctattctgccaccaggccacccgcaccctcttgccctctctgcccctccctgaaggatggtcttctcatctggacacccttggaagcaaatcctagttctcttcccacctgtcaacctgaattaaagtctacactgcctttgtg

SEQ ID NO: 110328 - DNA, 1740 bp, Homo sapiens
  Payload ID: 1649
  Gene Symbol: ACKR1
  Gene Name: atypical chemokine receptor 1 (Duffy blood group)
  Uniprot ID: Q16570
  ENST ID: ENST00000368122
  CDS Start-End: 680-1690
acacccgccaagcccctcacatacagatatgtgcacaatgatacacagcaaacgtacacagagttcagtacacacaaagagctcacgcccacgtgcacacacccctcagttgggacagagttgaccaccaccacctttctcccaaacacatggcttttgaactgcctttccttggatccagttcaaggggatggaggagcagtgagagtcagccgcccttccactccaatttcccagcacctcccttatctctgcctcacaagtcacccagcccccctctcttccttccttgtgcttgaagaatctctccttgctggaaagccccctgttttctcaatctccctttccacttcggtaaaatctctacttgctggaaagccccctgttttctcaatctccctttccacttcggtaaaatgcccactttctggtccccacctttttcctgagtgtagtcccaaccagccaaatccaacctcaaaacaggaagacccaaggccagtgacccccataggcctgaggcttgtgcaggcagtgggcgtggggtaaggcttcctgatgccccctgtccctgcccagaacctgatggccctcattagtccttggctcttatcttggaagcacaggcgctgacagccgtcccagcccttctgtctgcgggcctgaaccaaacggtgccatggggaactgtctgcacagggcggagctctccccctcaactgagaactcaagtcagctggacttcgaagatgtatggaattcttcctatggtgtgaatgattccttcccagatggagactatggtgccaacctggaagcagctgccccctgccactcctgtaacctgctggatgactctgcactgcccttcttcatcctcaccagtgtcctgggtatcctagctagcagcactgtcctcttcatgcttttcagacctctcttccgctggcagctctgccctggctggcctgtcctggcacagctggctgtgggcagtgccctcttcagcattgtggtgcccgtcttggccccagggctaggtagcactcgcagctctgccctgtgtagcctgggctactgtgtctggtatggctcagcctttgcccaggctttgctgctagggtgccatgcctccctgggccacagactgggtgcaggccaggtcccaggcctcaccctggggctcactgtgggaatttggggagtggctgccctactgacactgcctgtcaccctggccagtggtgcttctggtggactctgcaccctgatatacagcacggagctgaaggctttgcaggccacacacactgtagcctgtcttgccatctttgtcttgttgccattgggtttgtttggagccaaggggctgaagaaggcattgggtatggggccaggcccctggatgaatatcctgtgggcctggtttattttctggtggcctcatggggtggttctaggactggatttcctggtgaggtccaagctgttgctgttgtcaacatgtctggcccagcaggctctggacctgctgctgaacctggcagaagccctggcaattttgcactgtgtggctacgcccctgctcctcgccctattctgccaccaggccacccgcaccctcttgccctctctgcccctccctgaaggatggtcttctcatctggacacccttggaagcaaatcctagttctcttcccacctgtcaacctgaattaaagtctacactgcctttgtgaa

SEQ ID NO: 110329 - DNA, 550 bp, Homo sapiens
  Payload ID: 1649
  Gene Symbol: ACKR1
  Gene Name: atypical chemokine receptor 1 (Duffy blood group)
  ENST ID: ENST00000435307
  CDS Start-End: 86-550
gtcccagcccttctgtctgcgggcctgaaccaaacggtgccatggggaactgtctgcacagggagactcttccggtgtaactctgatggcctcctctgggtatgtcctccaggcggagctctccccctcaactgagaactcaagtcagctggacttcgaagatgtatggaattcttcctatggtgtgaatgattccttcccagatggagactatggtgccaacctggaagcagctgccccctgccactcctgtaacctgctggatgactctgcactgcccttcttcatcctcaccagtgtcctgggtatcctagctagcagcactgtcctcttcatgcttttcagacctctcttccgctggcagctctgccctggctggcctgtcctggcacagctggctgtgggcagtgccctcttcagcattgtggtgcccgtcttggccccagggctaggtagcactcgcagctctgccctgtgtagcctgggctactgtgtctggtatggctcagcctttgcccaggctttgctgctagggtgccatgcctccctg

SEQ ID NO: 110330 - DNA, 1902 bp, Homo sapiens
  Payload ID: 1649
  Gene Symbol: ACKR1
  Gene Name: atypical chemokine receptor 1 (Duffy blood group)
  Uniprot ID: Q16570
  ENST ID: ENST00000537147
  CDS Start-End: 844-1854
caagggagagaagtgtgttcacttccttttgctaagcccttcctttccagagagtgtcttggggggcatctgactgcttccccccaccctctgccaggcattgctggagaatgttaagacggcgatggagatgccatcaaccccaccctgcagagcatcaccagacacccgccaagcccctcacatacagatatgtgcacaatgatacacagcaaacgtacacagagttcagtacacacaaagagctcacgcccacgtgcacacacccctcagttgggacagagttgaccaccaccacctttctcccaaacacatggcttttgaactgcctttccttggatccagttcaaggggatggaggagcagtgagagtcagccgcccttccactccaatttcccagcacctcccttatctctgcctcacaagtcacccagcccccctctcttccttccttgtgcttgaagaatctctccttgctggaaagccccctgttttctcaatctccctttccacttcggtaaaatctctacttgctggaaagccccctgttttctcaatctccctttccacttcggtaaaatgcccactttctggtccccacctttttcctgagtgtagtcccaaccagccaaatccaacctcaaaacaggaagacccaaggccagtgacccccataggcctgaggcttgtgcaggcagtgggcgtggggtaaggcttcctgatgccccctgtccctgcccagaacctgatggccctcattagtccttggctcttatcttggaagcacaggcgctgacagccgtcccagcccttctgtctgcgggcctgaaccaaacggtgccatggggaactgtctgcacagggcggagctctccccctcaactgagaactcaagtcagctggacttcgaagatgtatggaattcttcctatggtgtgaatgattccttcccagatggagactatggtgccaacctggaagcagctgccccctgccactcctgtaacctgctggatgactctgcactgcccttcttcatcctcaccagtgtcctgggtatcctagctagcagcactgtcctcttcatgcttttcagacctctcttccgctggcagctctgccctggctggcctgtcctggcacagctggctgtgggcagtgccctcttcagcattgtggtgcccgtcttggccccagggctaggtagcactcgcagctctgccctgtgtagcctgggctactgtgtctggtatggctcagcctttgcccaggctttgctgctagggtgccatgcctccctgggccacagactgggtgcaggccaggtcccaggcctcaccctggggctcactgtgggaatttggggagtggctgccctactgacactgcctgtcaccctggccagtggtgcttctggtggactctgcaccctgatatacagcacggagctgaaggctttgcaggccacacacactgtagcctgtcttgccatctttgtcttgttgccattgggtttgtttggagccaaggggctgaagaaggcattgggtatggggccaggcccctggatgaatatcctgtgggcctggtttattttctggtggcctcatggggtggttctaggactggatttcctggtgaggtccaagctgttgctgttgtcaacatgtctggcccagcaggctctggacctgctgctgaacctggcagaagccctggcaattttgcactgtgtggctacgcccctgctcctcgccctattctgccaccaggccacccgcaccctcttgccctctctgcccctccctgaaggatggtcttctcatctggacacccttggaagcaaatcctagttctcttcccacctgtcaacctgaattaaagtctacactgcctttgtg

SEQ ID NO: 110331 - DNA, 2879 bp, Homo sapiens
  Payload ID: 1650
  Gene Symbol: ACKR2
  Gene Name: atypical chemokine receptor 2
  Uniprot ID: O00590
  ENST ID: ENST00000442925
  CDS Start-End: 99-1253
ggatacagtacgggatcctttctggaatggaggtcttatgagctgctattgaacacggcagcactacaggacgtcgggactgggcatttccttccaacatggccgccactgcctctccgcagccactcgccactgaggatgccgattctgagaatagcagcttctattactatgactacctggatgaagtggccttcatgctctgcaggaaggatgcagtggtgtcctttggcaaagtcttcctcccagtcttctatagcctgatttttgtgttgggcctcagcgggaacctccttcttctcatggtcttgctccgttacgtgcctcgcaggcggatggttgagatctatctgctgaatctggccatctccaaccttctgtttctggtgacactgcccttctggggcatctccgtggcctggcattgggtcttcgggagtttcttgtgcaagatggtgagcactctttatactattaacttttacagtggcatctttttcattagctgcatgagcctggacaagtacctggagatcgttcatgctcagccctaccacaggctgaggacccgggccaagagcctgctccttgctaccatagtatgggctgtgtccctggccgtctccatccctgatatggtctttgtacagacacatgaaaatcccaagggtgtgtggaactgccacgcagatttcggcgggcatgggaccatttggaagctcttcctccgcttccagcagaacctcctagggtttctccttccactccttgccatgatcttcttctactcccgtattggttgtgtcttggtgaggctgaggcccgcaggccagggccgggctttaaaaatagctgcagccttggtggtggccttcttcgtgctatggttcccatacaatctcaccttgtttctgcatacgctgttggacctgcaagtattcgggaactgtgaggtcagccagcatctagactacgcactccaggtaacagagagcatcgccttccttcactgctgcttttcccccatcctgtatgccttctccagtcaccgcttccgccagtacctgaaggctttcctggctgccgtgcttggatggcacctggcacctggcactgcccaggcctcattatccagctgttctgagagcagcatacttactgcccaagaggaaatgactggcatgaatgaccttggagagaggcagtctgagaactaccctaacaaggaggatgtggggaataaatcagcctgagtgaccaaattttggtctggtgggaacagatgggaaccagctcaattgggtgtccactcaaagtgctctctccaggggcctcagtgactgtgttgctaaacccagtggtcagttctcagttctcagccatcagcagcatttgctcgccccgccttcttcctccactttcttcacttgcttccaggataccacgctttcttttctgaattgctacaatctttcttccttccttccttgcttccttccttccttccttccctctctccctccctccctccctcgcttcttcccttcctcctttcctcccttcctactttccttccttccttctgacagggtcttgctctattgctctgtcacccaggctggaatgcagtggcgagatctccgctcactgtagcctcctccccctgggttgaagcaattctcatgcctcagcctcccaagtagccaggactataggcacctgccaccatgcctggctaatttttgtattttttttctttctttctttcttttcttttttttttttttttgagacggagtctcactcttgttgcccaggctggacaacaatggcgcgatctcggctcactgcaacctccacctcccggattcaagcgattctcctgcctcagcctcctgagtagctggaactacatgcgcgtgccaccacgcacagctaatttttataattttagtagagatggggtttcactgcgttggccaggatgatctcgatctcttgaccttgggatccacccgccttggcctcccaaagtgctgggattacaggtgtgagccaccatgcctggccctaatttttgtgtttttattagaaacagagtttcaccatgttggccaggctggagaattgctgtaatagttttccaactggcccctgtccttcctctctcttgctctcctcccatctcatctgcacctagcagccagagtgatcctgatactctcggcctttacttccgcctccctcagagcagcagcctgtcaaaacaccagattacaacaaatttagtttaaaggtctcaattagcgttattggcaattctagaatcaggcaacagactcattgaatcaggaacagattcactccataaaatacagagagtgctgcaatgagctgggtagaagaggttagttttatagacaggaaggggctgtcaaaggcagaaagaaatgaagaacaaaaaaaaagattgatttttttttttttgagacaggatctcactctgtcatccaggctgaagtccaatcccacaatcatggctcactgcagccaccacctcctgagctcaagtgatcctcccatctaagcccccaagtagctaggactacaggagcacaccaccacacctggctaatttttgtattttttgtggagacagggtctcagtatgttacccaggttggactggaaacccttggctcaagcaatttgcctgcctcagcctcccaaagtgctgggattacaggcgtgagccactgcacagggccagattcatcatttcaaagttactttctatatgcggccggaacagggtggttgacatcagttttcttcaggttactttttaataatgattaaaacggggaacttcattatca

SEQ ID NO: 110332 - DNA, 2956 bp, Homo sapiens
  Payload ID: 1650
  Gene Symbol: ACKR2
  Gene Name: atypical chemokine receptor 2
  Uniprot ID: O00590
  ENST ID: ENST00000422265
  CDS Start-End: 176-1330
acagtacgggatcctttctggaatggaggtcttatgagctgctattgaacacggcagagcctgttggtgacctgcacacaggagccctccagtcagtactgattgaattactcaaggctgcctctctgcaaagttgagcactacaggacgtcgggactgggcatttccttccaacatggccgccactgcctctccgcagccactcgccactgaggatgccgattctgagaatagcagcttctattactatgactacctggatgaagtggccttcatgctctgcaggaaggatgcagtggtgtcctttggcaaagtcttcctcccagtcttctatagcctgatttttgtgttgggcctcagcgggaacctccttcttctcatggtcttgctccgttacgtgcctcgcaggcggatggttgagatctatctgctgaatctggccatctccaaccttctgtttctggtgacactgcccttctggggcatctccgtggcctggcattgggtcttcgggagtttcttgtgcaagatggtgagcactctttatactattaacttttacagtggcatctttttcattagctgcatgagcctggacaagtacctggagatcgttcatgctcagccctaccacaggctgaggacccgggccaagagcctgctccttgctaccatagtatgggctgtgtccctggccgtctccatccctgatatggtctttgtacagacacatgaaaatcccaagggtgtgtggaactgccacgcagatttcggcgggcatgggaccatttggaagctcttcctccgcttccagcagaacctcctagggtttctccttccactccttgccatgatcttcttctactcccgtattggttgtgtcttggtgaggctgaggcccgcaggccagggccgggctttaaaaatagctgcagccttggtggtggccttcttcgtgctatggttcccatacaatctcaccttgtttctgcatacgctgttggacctgcaagtattcgggaactgtgaggtcagccagcatctagactacgcactccaggtaacagagagcatcgccttccttcactgctgcttttcccccatcctgtatgccttctccagtcaccgcttccgccagtacctgaaggctttcctggctgccgtgcttggatggcacctggcacctggcactgcccaggcctcattatccagctgttctgagagcagcatacttactgcccaagaggaaatgactggcatgaatgaccttggagagaggcagtctgagaactaccctaacaaggaggatgtggggaataaatcagcctgagtgaccaaattttggtctggtgggaacagatgggaaccagctcaattgggtgtccactcaaagtgctctctccaggggcctcagtgactgtgttgctaaacccagtggtcagttctcagttctcagccatcagcagcatttgctcgccccgccttcttcctccactttcttcacttgcttccaggataccacgctttcttttctgaattgctacaatctttcttccttccttccttgcttccttccttccttccttccctctctccctccctccctccctcgcttcttcccttcctcctttcctcccttcctactttccttccttccttctgacagggtcttgctctattgctctgtcacccaggctggaatgcagtggcgagatctccgctcactgtagcctcctccccctgggttgaagcaattctcatgcctcagcctcccaagtagccaggactataggcacctgccaccatgcctggctaatttttgtattttttttctttctttctttcttttcttttttttttttttttgagacggagtctcactcttgttgcccaggctggacaacaatggcgcgatctcggctcactgcaacctccacctcccggattcaagcgattctcctgcctcagcctcctgagtagctggaactacatgcgcgtgccaccacgcacagctaatttttataattttagtagagatggggtttcactgcgttggccaggatgatctcgatctcttgaccttgggatccacccgccttggcctcccaaagtgctgggattacaggtgtgagccaccatgcctggccctaatttttgtgtttttattagaaacagagtttcaccatgttggccaggctggagaattgctgtaatagttttccaactggcccctgtccttcctctctcttgctctcctcccatctcatctgcacctagcagccagagtgatcctgatactctcggcctttacttccgcctccctcagagcagcagcctgtcaaaacaccagattacaacaaatttagtttaaaggtctcaattagcgttattggcaattctagaatcaggcaacagactcattgaatcaggaacagattcactccataaaatacagagagtgctgcaatgagctgggtagaagaggttagttttatagacaggaaggggctgtcaaaggcagaaagaaatgaagaacaaaaaaaaagattgatttttttttttttgagacaggatctcactctgtcatccaggctgaagtccaatcccacaatcatggctcactgcagccaccacctcctgagctcaagtgatcctcccatctaagcccccaagtagctaggactacaggagcacaccaccacacctggctaatttttgtattttttgtggagacagggtctcagtatgttacccaggttggactggaaacccttggctcaagcaatttgcctgcctcagcctcccaaagtgctgggattacaggcgtgagccactgcacagggccagattcatcatttcaaagttactttctatatgcggccggaacagggtggttgacatcagttttcttcaggttactttttaataatgattaaaacggggaacttcattatca

SEQ ID NO: 110333 - DNA, 878 bp, Homo sapiens
  Payload ID: 1650
  Gene Symbol: ACKR2
  Gene Name: atypical chemokine receptor 2
  ENST ID: ENST00000493193
  CDS Start-End: 180-878
cttctgcagcagctcacaggctcccagcaccagccatgtgctaggagtgtccttactgctgcccagaaaagggaggagttgaaggccaggaggcccctggtgcagaggagaggacaggaagaccagcagaaaaaggcactggcactacaggacgtcgggactgggcatttccttccaacatggccgccactgcctctccgcagccactcgccactgaggatgccgattctgagaatagcagcttctattactatgactacctggatgaagtggccttcatgctctgcaggaaggatgcagtggtgtcctttggcaaagtcttcctcccagtcttctatagcctgatttttgtgttgggcctcagcgggaacctccttcttctcatggtcttgctccgttacgtgcctcgcaggcggatggttgagatctatctgctgaatctggccatctccaaccttctgtttctggtgacactgcccttctggggcatctccgtggcctggcattgggtcttcgggagtttcttgtgcaagatggtgagcactctttatactattaacttttacagtggcatctttttcattagctgcatgagcctggacaagtacctggagatcgttcatgctcagccctaccacaggctgaggacccgggccaagagcctgctccttgctaccatagtatgggctgtgtccctggccgtctccatccctgatatggtctttgtacagacacatgaaaatcccaagggtgtgtggaactgccacgcagatttcggcgggcatgggaccatttggaagctcttcctccgcttccagcagaacctcctagggtttctccttccactccttgccatgatcttcttctactcccgtatt

SEQ ID NO: 110334 - DNA, 719 bp, Homo sapiens
  Payload ID: 1650
  Gene Symbol: ACKR2
  Gene Name: atypical chemokine receptor 2
  ENST ID: ENST00000497921
  CDS Start-End: 346-719
tctggaatggaggtcttatgagctgctattgaacacggcagagcctgttggtgacctgcacacaggagccctccagtcagtactgattgaattactcaaggctgcctctctgcaaagttgaggtagctcatggtgctcccttccttggtgcagacgggcagttcaaaccacacaaactccagcctgtgggagagggatccttcatcctggacgcacctgccctctgcccagccactataaaaaccagagccacgtgccccttcttttgcttgagtgtgggccctgctgtccccagaaagcctcattaccactacaggacgtcgggactgggcatttccttccaacatggccgccactgcctctccgcagccactcgccactgaggatgccgattctgagaatagcagcttctattactatgactacctggatgaagtggccttcatgctctgcaggaaggatgcagtggtgtcctttggcaaagtcttcctcccagtcttctatagcctgatttttgtgttgggcctcagcgggaacctccttcttctcatggtcttgctccgttacgtgcctcgcaggcggatggttgagatctatctgctgaatctggccatctccaaccttctgtttctggtgacactgcccttctggggcatctccgtggcctggcattgggtcttcgggagtttcttgtgcaagatggtgagcactctttatac

SEQ ID NO: 110335 - DNA, 797 bp, Homo sapiens
  Payload ID: 1650
  Gene Symbol: ACKR2
  Gene Name: atypical chemokine receptor 2
  ENST ID: ENST00000494619
  CDS Start-End: 287-797
gtttagaattggggcagaatgggactgagatcttgctgagaaggtatccaggatgaagaagctgaaggtgatgttgggaaggcccttcagttgaaagcaggatatacataggctgctgtccagagaggggatgagcgcatggaaaggaattacactctgtctgcacttccctgaggaagaggcacctggcgctgccgctctcctcccaggcttgtggtggacattctcaagcaagtcattctggctccgcactacaggacgtcgggactgggcatttccttccaacatggccgccactgcctctccgcagccactcgccactgaggatgccgattctgagaatagcagcttctattactatgactacctggatgaagtggccttcatgctctgcaggaaggatgcagtggtgtcctttggcaaagtcttcctcccagtcttctatagcctgatttttgtgttgggcctcagcgggaacctccttcttctcatggtcttgctccgttacgtgcctcgcaggcggatggttgagatctatctgctgaatctggccatctccaaccttctgtttctggtgacactgcccttctggggcatctccgtggcctggcattgggtcttcgggagtttcttgtgcaagatggtgagcactctttatactattaacttttacagtggcatctttttcattagctgcatgagcctggacaagtacctggagatcgttcatgctcagccctaccacaggctgaggacccgggccaagagcctgctccttgctaccatagtatgggctg

SEQ ID NO: 110336 - DNA, 567 bp, Homo sapiens
  Payload ID: 1650
  Gene Symbol: ACKR2
  Gene Name: atypical chemokine receptor 2
  ENST ID: ENST00000492609
  CDS Start-End: 140-567
attcctggagccgcctccctgttgtcccacctctacctctccgggaacccgctgtgctgtgggacaggaggagacctagcggacagcctttggataaagcagcactacaggacgtcgggactgggcatttccttccaacatggccgccactgcctctccgcagccactcgccactgaggatgccgattctgagaatagcagcttctattactatgactacctggatgaagtggccttcatgctctgcaggaaggatgcagtggtgtcctttggcaaagtcttcctcccagtcttctatagcctgatttttgtgttgggcctcagcgggaacctccttcttctcatggtcttgctccgttacgtgcctcgcaggcggatggttgagatctatctgctgaatctggccatctccaaccttctgtttctggtgacactgcccttctggggcatctccgtggcctggcattgggtcttcgggagtttcttgtgcaagatggtgagcactctttatactattaacttttacagtggcatctttttcattagctgcatgagcctggacaagta

SEQ ID NO: 110337 - DNA, 2203 bp, Homo sapiens
  Payload ID: 1651
  Gene Symbol: ACKR3
  Gene Name: atypical chemokine receptor 3
  Uniprot ID: P25106
  ENST ID: ENST00000272928
  CDS Start-End: 311-1399
acacttgtgcaggaaacaacagactagtgaggtttacaagaggggggtgtgtgtgtgtgtgtgtctgcctgtgggatgggggtggcacgggggagagagagatgtgggttacaaagctgccatctagaggctagaggctcctttctgcagtgtatataatgcaagtctgcagccagcagagctcacagttgttgcaaagtgctcagcactaagggagccagcgcacagcacagccaggaaggcgagcgagcccagccagcccagccagcccagccagcccggaggtcatttgattgcccgcctcagaacgatggatctgcatctcttcgactactcagagccagggaacttctcggacatcagctggccatgcaacagcagcgactgcatcgtggtggacacggtgatgtgtcccaacatgcccaacaaaagcgtcctgctctacacgctctccttcatttacattttcatcttcgtcatcggcatgattgccaactccgtggtggtctgggtgaatatccaggccaagaccacaggctatgacacgcactgctacatcttgaacctggccattgccgacctgtgggttgtcctcaccatcccagtctgggtggtcagtctcgtgcagcacaaccagtggcccatgggcgagctcacgtgcaaagtcacacacctcatcttctccatcaacctcttcggcagcattttcttcctcacgtgcatgagcgtggaccgctacctctccatcacctacttcaccaacacccccagcagcaggaagaagatggtacgccgtgtcgtctgcatcctggtgtggctgctggccttctgcgtgtctctgcctgacacctactacctgaagaccgtcacgtctgcgtccaacaatgagacctactgccggtccttctaccccgagcacagcatcaaggagtggctgatcggcatggagctggtctccgttgtcttgggctttgccgttcccttctccattatcgctgtcttctacttcctgctggccagagccatctcggcgtccagtgaccaggagaagcacagcagccggaagatcatcttctcctacgtggtggtcttccttgtctgctggctgccctaccacgtggcggtgctgctggacatcttctccatcctgcactacatccctttcacctgccggctggagcacgccctcttcacggccctgcatgtcacacagtgcctgtcgctggtgcactgctgcgtcaaccctgtcctctacagcttcatcaatcgcaactacaggtacgagctgatgaaggccttcatcttcaagtactcggccaaaacagggctcaccaagctcatcgatgcctccagagtctcagagacggagtactctgccttggagcagagcaccaaatgatctgccctggagaggctctgggacgggtttacttgtttttgaacagggtgatgggccctatggttttctagagcaaagcaaagtagcttcgggtcttgatgcttgagtagagtgaagaggggagcacgtgccccctgcatccattctctctttctcttgatgacgcagctgtcatttggctgtgcgtgctgacagttttgcaacaggcagagctgtgtcgcacagcagtgctgtgcgtcagagccagctgaggacaggcttgcctggacttctgtaagataggattttctgtgtttcctgaattttttatatggtgatttgtatttaaattttaagactttattttctcactattggtgtaccttataaatgtatttgaaagttaaatatattttaaatattgtttgggaggcatagtgctgacatatattcagagtgttgtagttttaaggttagcgtgacttcagttttgactaaggatgacactaattgttagctgttttgaaattatatatatataaatatatataaatatataaatatatgccagtcttggctgaaatgttttatttaccatagttttatatctgtgtggtgttttgtaccggcacgggatatggaacgaaaactgctttgtaatgcagtttgtgacattaatagtattgtaaagttacattttaaaataaacaaaaaactgttctggactgcaaatctgcacacacaacgaacagttgcatttcagagagttctctcaatttgtaagttatttttttttaataaagatttttgtttcctaaaaatgca

SEQ ID NO: 110338 - DNA, 713 bp, Homo sapiens
  Payload ID: 1651
  Gene Symbol: ACKR3
  Gene Name: atypical chemokine receptor 3
  ENST ID: ENST00000447924
  CDS Start-End: 82-713
ggtgaccccggggccagaattctcgcaggcgcctgggccgggtgcccggccgtgcgtcatttgattgcccgcctcagaacgatggatctgcatctcttcgactactcagagccagggaacttctcggacatcagctggccatgcaacagcagcgactgcatcgtggtggacacggtgatgtgtcccaacatgcccaacaaaagcgtcctgctctacacgctctccttcatttacattttcatcttcgtcatcggcatgattgccaactccgtggtggtctgggtgaatatccaggccaagaccacaggctatgacacgcactgctacatcttgaacctggccattgccgacctgtgggttgtcctcaccatcccagtctgggtggtcagtctcgtgcagcacaaccagtggcccatgggcgagctcacgtgcaaagtcacacacctcatcttctccatcaacctcttcggcagcattttcttcctcacgtgcatgagcgtggaccgctacctctccatcacctacttcaccaacacccccagcagcaggaagaagatggtacgccgtgtcgtctgcatcctggtgtggctgctggccttctgcgtgtctctgcctgacacctactacctgaagaccgtcacgtctgcgtccaacaatgagacctactgccggtccttctaccccgagcacagcatcaaggagtggctgatcgg

SEQ ID NO: 110339 - DNA, 1914 bp, Homo sapiens
  Payload ID: 1652
  Gene Symbol: ACKR4
  Gene Name: atypical chemokine receptor 4
  Uniprot ID: Q9NPB9
  ENST ID: ENST00000249887
  CDS Start-End: 97-1149
gtaaagtgaaaacaaaagtagctggagttaggtcatttgattttatactctgtactcaagactgctcctctctgccgactacaacagattggagccatggctttggaacagaaccagtcaacagattattattatgaggaaaatgaaatgaatggcacttatgactacagtcaatatgaactgatctgtatcaaagaagatgtcagagaatttgcaaaagttttcctccctgtattcctcacaatagttttcgtcattggacttgcaggcaattccatggtagtggcaatttatgcctattacaagaaacagagaaccaaaacagatgtgtacatcctgaatttggctgtagcagatttactccttctattcactctgcctttttgggctgttaatgcagttcatgggtgggttttagggaaaataatgtgcaaaataacttcagccttgtacacactaaactttgtctctggaatgcagtttctggcttgtatcagcatagacagatatgtggcagtaactaaagtccccagccaatcaggagtgggaaaaccatgctggatcatctgtttctgtgtctggatggctgccatcttgctgagcataccccagctggttttttatacagtaaatgacaatgctaggtgcattcccattttcccccgctacctaggaacatcaatgaaagcattgattcaaatgctagagatctgcattggatttgtagtaccctttcttattatgggggtgtgctactttatcacagcaaggacactcatgaagatgccaaacattaaaatatctcgacccctaaaagttctgctcacagtcgttatagttttcattgtcactcaactgccttataacattgtcaagttctgccgagccatagacatcatctactccctgatcaccagctgcaacatgagcaaacgcatggacatcgccatccaagtcacagaaagcatcgcactctttcacagctgcctcaacccaatcctttatgtttttatgggagcatctttcaaaaactacgttatgaaagtggccaagaaatatgggtcctggagaagacagagacaaagtgtggaggagtttccttttgattctgagggtcctacagagccaaccagtacttttagcatttaaaggtaaaactgctctgccttttgcttggatacatatgaatgatgctttcccctcaaataaaacatctgcattattctgaaactcaaatctcagacgccgtggttgcaacttataataaagaatgggttgggggaagggggagaaataaaagccaagaagaggaaacaagataataaatgtacaaaacatgaaaattaaaatgaacaatataggaaaataattgtaacaggcataagtgaataacactctgctgtaacgaagaagagctttgtggtgataattttgtatcttggttgcagtggtgcttatacaaatctacacaagtgataaaatgacacagaactatatacacacattgtaccaatttcaatttcctggttttgacattatagtataattatgtaagatggaaccattggggaaaactgggtgaagggtacccaggaccactctgtaccatctttgtaacttcctgtgaatttataataatttcaaaataaaacaagttaaaaaaaaacccactatgctataagttaggccatctaaaacagattattaaagaggttcatgttaaaaggcatttataattatttttaattatctaagttttaatacaagaacgatttccctgcataattttagtacttgaataagtatgcagcagaactccaactatcttttttcctgttttttttaaatttgtaagtaattttataaaatccacctcctccaaaaaagcaataaaaaaaaaacaaactataataa

SEQ ID NO: 110340 - DNA, 424 bp, Homo sapiens
  Payload ID: 1652
  Gene Symbol: ACKR4
  Gene Name: atypical chemokine receptor 4
  ENST ID: ENST00000509820
  CDS Start-End: 1-63
gtggaggagtttccttttgattctgagggtcctacagagccaaccagtacttttagcatttaaagctcatccataataactccgggacgactgactacacaaggagagaatggtgattggcatttacctgtcatacagaagcaagagcaatcaaggcatagtccacgtggctgagtccgctgacagctggcaaaaacaagttccagagaccctcgactttggccatttcctgtcaaggtgatgaacatgccagagtgaccataatttaccaggactcacagtagtttatttctttttttaaatattggtatttatgatctttgaaatttaaaaacacttatggagttatttattttactgtattctccagtgagcaaaaccaagttcttattaattcattataaatcaacagtttaaccattaa

SEQ ID NO: 110341 - DNA, 1490 bp, Homo sapiens
  Payload ID: 1653
  Gene Symbol: AUH
  Gene Name: AU RNA binding protein/enoyl-CoA hydratase
  Uniprot ID: Q13825
  ENST ID: ENST00000303617
  CDS Start-End: 25-957
aggtccacgccgtaaacagacaacatggcggccgcggtggcggcggcacctggggccttgggatccctgcatgctggcggcgcccgcctggtggccgcttgcagtgcgtggctctgcccggggttgaggctgcccggctcgttggcaggccggcgagcgggcccggcgatctgggcccagggctgggtacctgcggccgggggtcccgccccgaaaaggggctacagctctgagatgaagacggaggacgagctgcgggtgcggcacctggaggaggagaaccgaggaattgtggtgcttggaataaacagagcttatggcaaaaattcactcagtaaaaatcttataaaaatgctatcaaaagctgtggatgctttgaaatctgataagaaagtacggaccataataatcaggagtgaagtcccagggatattctgtgctgctaatcttccagtaccaacaattgcagcaatagatggactcgctttaggtggtggtcttgaactggctttagcctgtgatatacgagtagcagcttcctctgcaaaaatgggcctggttgaaacaaaattggcgattattcctggtggaggggggacacagcgattgccacgcgccattggaatgtccctggccaaggagctcatattctctgcgcgagtcctcgatggcaaagaagccaaagcagtgggcttaatcagccacgttctggaacagaaccaggagggagacgcggcctacaggaaggccttggacctggcgagagagtttttacctcagggacctgttgcaatgagagtggcaaaattagcaattaatcaagggatggaggtcgatttagtaacagggttagccatagaagaagcttgttatgctcagaccattccaacaaaagacagacttgaaggtcttcttgcttttaaagagaaaaggccccctcgctataaaggagaataaaaggaacagaaattcttaagatgccaatgtaataaatgtacttcctggaagtgtctttcggatccactatatgcctcagcacatggaaccttaatgaccaaagtgaagagcagattattcatacggtgtaataagcatctggaatggacccatccgtgtacttcattcaaatgtgtaaatgtcatattcattcagatttataaagctagtagtgtatagtcagaaacagaatcaaagttagatatacatttttaaatatttactgcatatgaggctttctgttaattttttaatgtgaataatttatatattgcacattctagggaataatattgattgtatgtctactgtgctgcattaagaaaataaaatttctatataccaaaaatgtgaagttataccaaataaagtttctaagtgattaatgcatacgaacagctacatatacatatatctaaacctgaaaaatgaattgatattctgagtgaaaactacctaatataaataaaattagtgaaaagaaaacatgggaa

SEQ ID NO: 110342 - DNA, 1577 bp, Homo sapiens
  Payload ID: 1653
  Gene Symbol: AUH
  Gene Name: AU RNA binding protein/enoyl-CoA hydratase
  Uniprot ID: Q13825
  ENST ID: ENST00000375731
  CDS Start-End: 25-1044
aggtccacgccgtaaacagacaacatggcggccgcggtggcggcggcacctggggccttgggatccctgcatgctggcggcgcccgcctggtggccgcttgcagtgcgtggctctgcccggggttgaggctgcccggctcgttggcaggccggcgagcgggcccggcgatctgggcccagggctgggtacctgcggccgggggtcccgccccgaaaaggggctacagctctgagatgaagacggaggacgagctgcgggtgcggcacctggaggaggagaaccgaggaattgtggtgcttggaataaacagagcttatggcaaaaattcactcagtaaaaatcttataaaaatgctatcaaaagctgtggatgctttgaaatctgataagaaagtacggaccataataatcaggagtgaagtcccagggatattctgtgctggtgctgaccttaaggaaagagccaaaatgagttccagtgaagttggtccttttgtctccaaaataagagcagtgattaacgatattgctaatcttccagtaccaacaattgcagcaatagatggactcgctttaggtggtggtcttgaactggctttagcctgtgatatacgagtagcagcttcctctgcaaaaatgggcctggttgaaacaaaattggcgattattcctggtggaggggggacacagcgattgccacgcgccattggaatgtccctggccaaggagctcatattctctgcgcgagtcctcgatggcaaagaagccaaagcagtgggcttaatcagccacgttctggaacagaaccaggagggagacgcggcctacaggaaggccttggacctggcgagagagtttttacctcagggacctgttgcaatgagagtggcaaaattagcaattaatcaagggatggaggtcgatttagtaacagggttagccatagaagaagcttgttatgctcagaccattccaacaaaagacagacttgaaggtcttcttgcttttaaagagaaaaggccccctcgctataaaggagaataaaaggaacagaaattcttaagatgccaatgtaataaatgtacttcctggaagtgtctttcggatccactatatgcctcagcacatggaaccttaatgaccaaagtgaagagcagattattcatacggtgtaataagcatctggaatggacccatccgtgtacttcattcaaatgtgtaaatgtcatattcattcagatttataaagctagtagtgtatagtcagaaacagaatcaaagttagatatacatttttaaatatttactgcatatgaggctttctgttaattttttaatgtgaataatttatatattgcacattctagggaataatattgattgtatgtctactgtgctgcattaagaaaataaaatttctatataccaaaaatgtgaagttataccaaataaagtttctaagtgattaatgcatacgaacagctacatatacatatatctaaacctgaaaaatgaattgatattctgagtgaaaactacctaatataaataaaattagtgaaaagaaaacatgggaa

SEQ ID NO: 110343 - DNA, 2248 bp, Homo sapiens
  Payload ID: 1654
  Gene Symbol: AURKA
  Gene Name: aurora kinase A
  Uniprot ID: O14965
  ENST ID: ENST00000347343
  CDS Start-End: 269-1480
ggctgagctcttggaagacttgggtccttgggtcgcaggtgggagccgacgggtgggtagaccgtgggggatatctcagtggcggacgaggacggcggggacaaggggcggctggtcggagtggcggagcgtcaagtcccctgtcggttcctccgtccctgagtgtccttggcgctgccttgtgcccgcccagcgcctttgcatccgctcctgggcaccgaggcgccctgtaggatactgcttgttacttattacagctagaggcatcatggaccgatctaaagaaaactgcatttcaggacctgttaaggctacagctccagttggaggtccaaaacgtgttctcgtgactcagcaatttccttgtcagaatccattacctgtaaatagtggccaggctcagcgggtcttgtgtccttcaaattcttcccagcgcattcctttgcaagcacaaaagcttgtctccagtcacaagccggttcagaatcagaagcagaagcaattgcaggcaaccagtgtacctcatcctgtctccaggccactgaataacacccaaaagagcaagcagcccctgccatcggcacctgaaaataatcctgaggaggaactggcatcaaaacagaaaaatgaagaatcaaaaaagaggcagtgggctttggaagactttgaaattggtcgccctctgggtaaaggaaagtttggtaatgtttatttggcaagagaaaagcaaagcaagtttattctggctcttaaagtgttatttaaagctcagctggagaaagccggagtggagcatcagctcagaagagaagtagaaatacagtcccaccttcggcatcctaatattcttagactgtatggttatttccatgatgctaccagagtctacctaattctggaatatgcaccacttggaacagtttatagagaacttcagaaactttcaaagtttgatgagcagagaactgctacttatataacagaattggcaaatgccctgtcttactgtcattcgaagagagttattcatagagacattaagccagagaacttacttcttggatcagctggagagcttaaaattgcagattttgggtggtcagtacatgctccatcttccaggaggaccactctctgtggcaccctggactacctgccccctgaaatgattgaaggtcggatgcatgatgagaaggtggatctctggagccttggagttctttgctatgaatttttagttgggaagcctccttttgaggcaaacacataccaagagacctacaaaagaatatcacgggttgaattcacattccctgactttgtaacagagggagccagggacctcatttcaagactgttgaagcataatcccagccagaggccaatgctcagagaagtacttgaacacccctggatcacagcaaattcatcaaaaccatcaaattgccaaaacaaagaatcagctagcaaacagtcttaggaatcgtgcagggggagaaatccttgagccagggctgccatataacctgacaggaacatgctactgaagtttattttaccattgactgctgccctcaatctagaacgctacacaagaaatatttgttttactcagcaggtgtgccttaacctccctattcagaaagctccacatcaataaacatgacactctgaagtgaaagtagccacgagaattgtgctacttatactggttcataatctggaggcaaggttcgactgcagccgccccgtcagcctgtgctaggcatggtgtcttcacaggaggcaaatccagagcctggctgtggggaaagtgaccactctgccctgaccccgatcagttaaggagctgtgcaataaccttcctagtacctgagtgagtgtgtaacttattgggttggcgaagcctggtaaagctgttggaatgagtatgtgattctttttaagtatgaaaataaagatatatgtacagacttgtattttttctctggtggcattcctttaggaatgctgtgtgtctgtccggcaccccggtaggcctgattgggtttctagtcctccttaaccacttatctcccatatgagagtgtgaaaaataggaacacgtgctctacctccatttagggatttgcttgggatacagaagaggccatgtgtctcagagctgttaagggcttatttttttaaaacattggagtcatagcatgtgtgtaaactttaaatatgcaaataaataagtatctatgtc

SEQ ID NO: 110344 - DNA, 2223 bp, Homo sapiens
  Payload ID: 1654
  Gene Symbol: AURKA
  Gene Name: aurora kinase A
  Uniprot ID: O14965
  ENST ID: ENST00000312783
  CDS Start-End: 244-1455
acaaggcagcctcgctcgagcgcaggccaatcggctttctagctagagggtttaactcctatttaaaaagaagaacctttgaattctaacggctgagctcttggaagacttgggtccttgggtcgcagggtctcactccattgcccaggccagagtgcggggatatttgataagaaacttcagtgaaggccgggcgcggtggctcatgcccgtaatcccagcattttcggaggccgaggcatcatggaccgatctaaagaaaactgcatttcaggacctgttaaggctacagctccagttggaggtccaaaacgtgttctcgtgactcagcaatttccttgtcagaatccattacctgtaaatagtggccaggctcagcgggtcttgtgtccttcaaattcttcccagcgcattcctttgcaagcacaaaagcttgtctccagtcacaagccggttcagaatcagaagcagaagcaattgcaggcaaccagtgtacctcatcctgtctccaggccactgaataacacccaaaagagcaagcagcccctgccatcggcacctgaaaataatcctgaggaggaactggcatcaaaacagaaaaatgaagaatcaaaaaagaggcagtgggctttggaagactttgaaattggtcgccctctgggtaaaggaaagtttggtaatgtttatttggcaagagaaaagcaaagcaagtttattctggctcttaaagtgttatttaaagctcagctggagaaagccggagtggagcatcagctcagaagagaagtagaaatacagtcccaccttcggcatcctaatattcttagactgtatggttatttccatgatgctaccagagtctacctaattctggaatatgcaccacttggaacagtttatagagaacttcagaaactttcaaagtttgatgagcagagaactgctacttatataacagaattggcaaatgccctgtcttactgtcattcgaagagagttattcatagagacattaagccagagaacttacttcttggatcagctggagagcttaaaattgcagattttgggtggtcagtacatgctccatcttccaggaggaccactctctgtggcaccctggactacctgccccctgaaatgattgaaggtcggatgcatgatgagaaggtggatctctggagccttggagttctttgctatgaatttttagttgggaagcctccttttgaggcaaacacataccaagagacctacaaaagaatatcacgggttgaattcacattccctgactttgtaacagagggagccagggacctcatttcaagactgttgaagcataatcccagccagaggccaatgctcagagaagtacttgaacacccctggatcacagcaaattcatcaaaaccatcaaattgccaaaacaaagaatcagctagcaaacagtcttaggaatcgtgcagggggagaaatccttgagccagggctgccatataacctgacaggaacatgctactgaagtttattttaccattgactgctgccctcaatctagaacgctacacaagaaatatttgttttactcagcaggtgtgccttaacctccctattcagaaagctccacatcaataaacatgacactctgaagtgaaagtagccacgagaattgtgctacttatactggttcataatctggaggcaaggttcgactgcagccgccccgtcagcctgtgctaggcatggtgtcttcacaggaggcaaatccagagcctggctgtggggaaagtgaccactctgccctgaccccgatcagttaaggagctgtgcaataaccttcctagtacctgagtgagtgtgtaacttattgggttggcgaagcctggtaaagctgttggaatgagtatgtgattctttttaagtatgaaaataaagatatatgtacagacttgtattttttctctggtggcattcctttaggaatgctgtgtgtctgtccggcaccccggtaggcctgattgggtttctagtcctccttaaccacttatctcccatatgagagtgtgaaaaataggaacacgtgctctacctccatttagggatttgcttgggatacagaagaggccatgtgtctcagagctgttaagggcttatttttttaaaacattggagtcatagcatgtgtgtaaactttaaatatgcaaataaataagtatctatgtc

SEQ ID NO: 110345 - DNA, 2112 bp, Homo sapiens
  Payload ID: 1654
  Gene Symbol: AURKA
  Gene Name: aurora kinase A
  Uniprot ID: O14965
  ENST ID: ENST00000371356
  CDS Start-End: 133-1344
cttggaagacttgggtccttgggtcgcaggctggagtgcaatggtgtgatctcagctcactgcaacctctgcttcctgggtttaagtgattctcctgcctcagcctcccgagtagctgggattacaggcatcatggaccgatctaaagaaaactgcatttcaggacctgttaaggctacagctccagttggaggtccaaaacgtgttctcgtgactcagcaatttccttgtcagaatccattacctgtaaatagtggccaggctcagcgggtcttgtgtccttcaaattcttcccagcgcattcctttgcaagcacaaaagcttgtctccagtcacaagccggttcagaatcagaagcagaagcaattgcaggcaaccagtgtacctcatcctgtctccaggccactgaataacacccaaaagagcaagcagcccctgccatcggcacctgaaaataatcctgaggaggaactggcatcaaaacagaaaaatgaagaatcaaaaaagaggcagtgggctttggaagactttgaaattggtcgccctctgggtaaaggaaagtttggtaatgtttatttggcaagagaaaagcaaagcaagtttattctggctcttaaagtgttatttaaagctcagctggagaaagccggagtggagcatcagctcagaagagaagtagaaatacagtcccaccttcggcatcctaatattcttagactgtatggttatttccatgatgctaccagagtctacctaattctggaatatgcaccacttggaacagtttatagagaacttcagaaactttcaaagtttgatgagcagagaactgctacttatataacagaattggcaaatgccctgtcttactgtcattcgaagagagttattcatagagacattaagccagagaacttacttcttggatcagctggagagcttaaaattgcagattttgggtggtcagtacatgctccatcttccaggaggaccactctctgtggcaccctggactacctgccccctgaaatgattgaaggtcggatgcatgatgagaaggtggatctctggagccttggagttctttgctatgaatttttagttgggaagcctccttttgaggcaaacacataccaagagacctacaaaagaatatcacgggttgaattcacattccctgactttgtaacagagggagccagggacctcatttcaagactgttgaagcataatcccagccagaggccaatgctcagagaagtacttgaacacccctggatcacagcaaattcatcaaaaccatcaaattgccaaaacaaagaatcagctagcaaacagtcttaggaatcgtgcagggggagaaatccttgagccagggctgccatataacctgacaggaacatgctactgaagtttattttaccattgactgctgccctcaatctagaacgctacacaagaaatatttgttttactcagcaggtgtgccttaacctccctattcagaaagctccacatcaataaacatgacactctgaagtgaaagtagccacgagaattgtgctacttatactggttcataatctggaggcaaggttcgactgcagccgccccgtcagcctgtgctaggcatggtgtcttcacaggaggcaaatccagagcctggctgtggggaaagtgaccactctgccctgaccccgatcagttaaggagctgtgcaataaccttcctagtacctgagtgagtgtgtaacttattgggttggcgaagcctggtaaagctgttggaatgagtatgtgattctttttaagtatgaaaataaagatatatgtacagacttgtattttttctctggtggcattcctttaggaatgctgtgtgtctgtccggcaccccggtaggcctgattgggtttctagtcctccttaaccacttatctcccatatgagagtgtgaaaaataggaacacgtgctctacctccatttagggatttgcttgggatacagaagaggccatgtgtctcagagctgttaagggcttatttttttaaaacattggagtcatagcatgtgtgtaaactttaaatatgcaaataaataagtatctatgtc

SEQ ID NO: 110346 - DNA, 1902 bp, Homo sapiens
  Payload ID: 1654
  Gene Symbol: AURKA
  Gene Name: aurora kinase A
  ENST ID: ENST00000395907
  CDS Start-End: 54-1097
gaattctaacggctgagctcttggaagacttgggtccttgggtcgcaggcatcatggaccgatctaaagaaaactgcatttcaggacctgttaaggctacagctccagttggaggtccaaaacgtgttctcgtgactcagcaatttccttgtcagaatccattacctgtaaatagtggccaggctcagcgggtcttgtgtccttcaaattcttcccagcgcattcctttgcaagcacaaaagcttgtctccagtcacaagccggttcagaatcagaagcagaagcaattgcaggcaaccagtgtacctcatcctgtctccaggccactgaataacacccaaaagagcaagcagcccctgccatcggcacctgaaaataatcctgaggaggaactggcatcaaaacagaaaaatgaagaatcaaaaaagaggcagtgggctttggaagactttgaaattggtcgccctctgggtaaaggaaagtttggtaatgtttatttggcaagagaaaagcaaagcaagtttattctggctcttaaagtgttatttaaagctcagctggagaaagccggagtggagcatcagctcagaagagaagtagaaatacagtcccaccttcggcatcctaatattcttagactgtatggttatttccatgatgctaccagagtctacctaattctggaatatgcaccacttggaacagtttatagagaacttcagaaactttcaaagtttgatgagcagagaactgctacttatataacagaattggcaaatgccctgtcttactgtcattcgaagagagttattcatagagacattaagccagagaacttacttcttggatcagctggagagcttaaaattgcagattttgggtggtcagtacatgctccatcttccaggaggaccactctctgtggcaccctggactacctgccccctgaaatgattgaaggtcggatgcatgatgagaaggtggatctctggagccttggagttctttgctatgaatttttagttgggaagcctccttttgaggcaaacacataccaagagacctacaaaagaatatcacgggtaagacgcaactgaaaaggacccagcacatctgctggaattctttccttatcagcctgaactgcaggccaagatccgaacatctatactatttgatctctctaacctgtgttttgtgatattttatcatttgttgtactccaggttgaattcacattccctgactttgtaacagagggagccagggacctcatttcaagactgttgaagcataatcccagccagaggccaatgctcagagaagtacttgaacacccctggatcacagcaaattcatcaaaaccatcaaattgccaaaacaaagaatcagctagcaaacagtcttaggaatcgtgcagggggagaaatccttgagccagggctgccatataacctgacaggaacatgctactgaagtttattttaccattgactgctgccctcaatctagaacgctacacaagaaatatttgttttactcagcaggtgtgccttaacctccctattcagaaagctccacatcaataaacatgacactctgaagtgaaagtagccacgagaattgtgctacttatactggttcataatctggaggcaaggttcgactgcagccgccccgtcagcctgtgctaggcatggtgtcttcacaggaggcaaatccagagcctggctgtggggaaagtgaccactctgccctgaccccgatcagttaaggagctgtgcaataaccttcctagtacctgagtgagtgtgtaacttattgggttggcgaagcctggtaaagctgttggaatgagtatgtgattctttttaagtatgaaaataaagatatatgtacaga

SEQ ID NO: 110347 - DNA, 2145 bp, Homo sapiens
  Payload ID: 1654
  Gene Symbol: AURKA
  Gene Name: aurora kinase A
  Uniprot ID: O14965
  ENST ID: ENST00000395911
  CDS Start-End: 166-1377
gaattctaacggctgagctcttggaagacttgggtccttgggtcgcaggtgggagccgacgggctggagtgcaatggtgtgatctcagctcactgcaacctctgcttcctgggtttaagtgattctcctgcctcagcctcccgagtagctgggattacaggcatcatggaccgatctaaagaaaactgcatttcaggacctgttaaggctacagctccagttggaggtccaaaacgtgttctcgtgactcagcaatttccttgtcagaatccattacctgtaaatagtggccaggctcagcgggtcttgtgtccttcaaattcttcccagcgcattcctttgcaagcacaaaagcttgtctccagtcacaagccggttcagaatcagaagcagaagcaattgcaggcaaccagtgtacctcatcctgtctccaggccactgaataacacccaaaagagcaagcagcccctgccatcggcacctgaaaataatcctgaggaggaactggcatcaaaacagaaaaatgaagaatcaaaaaagaggcagtgggctttggaagactttgaaattggtcgccctctgggtaaaggaaagtttggtaatgtttatttggcaagagaaaagcaaagcaagtttattctggctcttaaagtgttatttaaagctcagctggagaaagccggagtggagcatcagctcagaagagaagtagaaatacagtcccaccttcggcatcctaatattcttagactgtatggttatttccatgatgctaccagagtctacctaattctggaatatgcaccacttggaacagtttatagagaacttcagaaactttcaaagtttgatgagcagagaactgctacttatataacagaattggcaaatgccctgtcttactgtcattcgaagagagttattcatagagacattaagccagagaacttacttcttggatcagctggagagcttaaaattgcagattttgggtggtcagtacatgctccatcttccaggaggaccactctctgtggcaccctggactacctgccccctgaaatgattgaaggtcggatgcatgatgagaaggtggatctctggagccttggagttctttgctatgaatttttagttgggaagcctccttttgaggcaaacacataccaagagacctacaaaagaatatcacgggttgaattcacattccctgactttgtaacagagggagccagggacctcatttcaagactgttgaagcataatcccagccagaggccaatgctcagagaagtacttgaacacccctggatcacagcaaattcatcaaaaccatcaaattgccaaaacaaagaatcagctagcaaacagtcttaggaatcgtgcagggggagaaatccttgagccagggctgccatataacctgacaggaacatgctactgaagtttattttaccattgactgctgccctcaatctagaacgctacacaagaaatatttgttttactcagcaggtgtgccttaacctccctattcagaaagctccacatcaataaacatgacactctgaagtgaaagtagccacgagaattgtgctacttatactggttcataatctggaggcaaggttcgactgcagccgccccgtcagcctgtgctaggcatggtgtcttcacaggaggcaaatccagagcctggctgtggggaaagtgaccactctgccctgaccccgatcagttaaggagctgtgcaataaccttcctagtacctgagtgagtgtgtaacttattgggttggcgaagcctggtaaagctgttggaatgagtatgtgattctttttaagtatgaaaataaagatatatgtacagacttgtattttttctctggtggcattcctttaggaatgctgtgtgtctgtccggcaccccggtaggcctgattgggtttctagtcctccttaaccacttatctcccatatgagagtgtgaaaaataggaacacgtgctctacctccatttagggatttgcttgggatacagaagaggccatgtgtctcagagctgttaagggcttatttttttaaaacattggagtcatagcatgtgtgtaaactttaaatatgcaaataaataagtatctatgtc

SEQ ID NO: 110348 - DNA, 2169 bp, Homo sapiens
  Payload ID: 1654
  Gene Symbol: AURKA
  Gene Name: aurora kinase A
  Uniprot ID: O14965
  ENST ID: ENST00000395913
  CDS Start-End: 190-1401
cttaaacgcgactcaaggcgtcgggtttgttgtcaaccaatcacaaggcagcctcgctcgagcgcaggccaatcggctttctagctagagggtttaactcctatttaaaaagaagaacctttgaattctaacggctgagctcttggaagacttgggtccttgggtcgcaggtgggagccgacgggcatcatggaccgatctaaagaaaactgcatttcaggacctgttaaggctacagctccagttggaggtccaaaacgtgttctcgtgactcagcaatttccttgtcagaatccattacctgtaaatagtggccaggctcagcgggtcttgtgtccttcaaattcttcccagcgcattcctttgcaagcacaaaagcttgtctccagtcacaagccggttcagaatcagaagcagaagcaattgcaggcaaccagtgtacctcatcctgtctccaggccactgaataacacccaaaagagcaagcagcccctgccatcggcacctgaaaataatcctgaggaggaactggcatcaaaacagaaaaatgaagaatcaaaaaagaggcagtgggctttggaagactttgaaattggtcgccctctgggtaaaggaaagtttggtaatgtttatttggcaagagaaaagcaaagcaagtttattctggctcttaaagtgttatttaaagctcagctggagaaagccggagtggagcatcagctcagaagagaagtagaaatacagtcccaccttcggcatcctaatattcttagactgtatggttatttccatgatgctaccagagtctacctaattctggaatatgcaccacttggaacagtttatagagaacttcagaaactttcaaagtttgatgagcagagaactgctacttatataacagaattggcaaatgccctgtcttactgtcattcgaagagagttattcatagagacattaagccagagaacttacttcttggatcagctggagagcttaaaattgcagattttgggtggtcagtacatgctccatcttccaggaggaccactctctgtggcaccctggactacctgccccctgaaatgattgaaggtcggatgcatgatgagaaggtggatctctggagccttggagttctttgctatgaatttttagttgggaagcctccttttgaggcaaacacataccaagagacctacaaaagaatatcacgggttgaattcacattccctgactttgtaacagagggagccagggacctcatttcaagactgttgaagcataatcccagccagaggccaatgctcagagaagtacttgaacacccctggatcacagcaaattcatcaaaaccatcaaattgccaaaacaaagaatcagctagcaaacagtcttaggaatcgtgcagggggagaaatccttgagccagggctgccatataacctgacaggaacatgctactgaagtttattttaccattgactgctgccctcaatctagaacgctacacaagaaatatttgttttactcagcaggtgtgccttaacctccctattcagaaagctccacatcaataaacatgacactctgaagtgaaagtagccacgagaattgtgctacttatactggttcataatctggaggcaaggttcgactgcagccgccccgtcagcctgtgctaggcatggtgtcttcacaggaggcaaatccagagcctggctgtggggaaagtgaccactctgccctgaccccgatcagttaaggagctgtgcaataaccttcctagtacctgagtgagtgtgtaacttattgggttggcgaagcctggtaaagctgttggaatgagtatgtgattctttttaagtatgaaaataaagatatatgtacagacttgtattttttctctggtggcattcctttaggaatgctgtgtgtctgtccggcaccccggtaggcctgattgggtttctagtcctccttaaccacttatctcccatatgagagtgtgaaaaataggaacacgtgctctacctccatttagggatttgcttgggatacagaagaggccatgtgtctcagagctgttaagggcttatttttttaaaacattggagtcatagcatgtgtgtaaactttaaatatgcaaataaataagtatctatgtc

SEQ ID NO: 110349 - DNA, 2238 bp, Homo sapiens
  Payload ID: 1654
  Gene Symbol: AURKA
  Gene Name: aurora kinase A
  Uniprot ID: O14965
  ENST ID: ENST00000395914
  CDS Start-End: 258-1469
acaaggcagcctcgctcgagcgcaggccaatcggctttctagctagagggtttaactcctatttaaaaagaagaacctttgaattctaacggctgagctcttggaagacttgggtccttgggtcgcaggtgggagccgacggggtctcactccattgcccaggccagagtgcggggatatttgataagaaacttcagtgaaggccgggcgcggtggctcatgcccgtaatcccagcattttcggaggccgaggcatcatggaccgatctaaagaaaactgcatttcaggacctgttaaggctacagctccagttggaggtccaaaacgtgttctcgtgactcagcaatttccttgtcagaatccattacctgtaaatagtggccaggctcagcgggtcttgtgtccttcaaattcttcccagcgcattcctttgcaagcacaaaagcttgtctccagtcacaagccggttcagaatcagaagcagaagcaattgcaggcaaccagtgtacctcatcctgtctccaggccactgaataacacccaaaagagcaagcagcccctgccatcggcacctgaaaataatcctgaggaggaactggcatcaaaacagaaaaatgaagaatcaaaaaagaggcagtgggctttggaagactttgaaattggtcgccctctgggtaaaggaaagtttggtaatgtttatttggcaagagaaaagcaaagcaagtttattctggctcttaaagtgttatttaaagctcagctggagaaagccggagtggagcatcagctcagaagagaagtagaaatacagtcccaccttcggcatcctaatattcttagactgtatggttatttccatgatgctaccagagtctacctaattctggaatatgcaccacttggaacagtttatagagaacttcagaaactttcaaagtttgatgagcagagaactgctacttatataacagaattggcaaatgccctgtcttactgtcattcgaagagagttattcatagagacattaagccagagaacttacttcttggatcagctggagagcttaaaattgcagattttgggtggtcagtacatgctccatcttccaggaggaccactctctgtggcaccctggactacctgccccctgaaatgattgaaggtcggatgcatgatgagaaggtggatctctggagccttggagttctttgctatgaatttttagttgggaagcctccttttgaggcaaacacataccaagagacctacaaaagaatatcacgggttgaattcacattccctgactttgtaacagagggagccagggacctcatttcaagactgttgaagcataatcccagccagaggccaatgctcagagaagtacttgaacacccctggatcacagcaaattcatcaaaaccatcaaattgccaaaacaaagaatcagctagcaaacagtcttaggaatcgtgcagggggagaaatccttgagccagggctgccatataacctgacaggaacatgctactgaagtttattttaccattgactgctgccctcaatctagaacgctacacaagaaatatttgttttactcagcaggtgtgccttaacctccctattcagaaagctccacatcaataaacatgacactctgaagtgaaagtagccacgagaattgtgctacttatactggttcataatctggaggcaaggttcgactgcagccgccccgtcagcctgtgctaggcatggtgtcttcacaggaggcaaatccagagcctggctgtggggaaagtgaccactctgccctgaccccgatcagttaaggagctgtgcaataaccttcctagtacctgagtgagtgtgtaacttattgggttggcgaagcctggtaaagctgttggaatgagtatgtgattctttttaagtatgaaaataaagatatatgtacagacttgtattttttctctggtggcattcctttaggaatgctgtgtgtctgtccggcaccccggtaggcctgattgggtttctagtcctccttaaccacttatctcccatatgagagtgtgaaaaataggaacacgtgctctacctccatttagggatttgcttgggatacagaagaggccatgtgtctcagagctgttaagggcttatttttttaaaacattggagtcatagcatgtgtgtaaactttaaatatgcaaataaataagtatctatgtct

SEQ ID NO: 110350 - DNA, 2114 bp, Homo sapiens
  Payload ID: 1654
  Gene Symbol: AURKA
  Gene Name: aurora kinase A
  Uniprot ID: O14965
  ENST ID: ENST00000395915
  CDS Start-End: 135-1346
cacaaggcagcctcgctcgagcgcaggccaatcggctttctagctagagggtttaactcctatttaaaaagaagaacctttgaattctaacggctgagctcttggaagacttgggtccttgggtcgcaggcatcatggaccgatctaaagaaaactgcatttcaggacctgttaaggctacagctccagttggaggtccaaaacgtgttctcgtgactcagcaatttccttgtcagaatccattacctgtaaatagtggccaggctcagcgggtcttgtgtccttcaaattcttcccagcgcattcctttgcaagcacaaaagcttgtctccagtcacaagccggttcagaatcagaagcagaagcaattgcaggcaaccagtgtacctcatcctgtctccaggccactgaataacacccaaaagagcaagcagcccctgccatcggcacctgaaaataatcctgaggaggaactggcatcaaaacagaaaaatgaagaatcaaaaaagaggcagtgggctttggaagactttgaaattggtcgccctctgggtaaaggaaagtttggtaatgtttatttggcaagagaaaagcaaagcaagtttattctggctcttaaagtgttatttaaagctcagctggagaaagccggagtggagcatcagctcagaagagaagtagaaatacagtcccaccttcggcatcctaatattcttagactgtatggttatttccatgatgctaccagagtctacctaattctggaatatgcaccacttggaacagtttatagagaacttcagaaactttcaaagtttgatgagcagagaactgctacttatataacagaattggcaaatgccctgtcttactgtcattcgaagagagttattcatagagacattaagccagagaacttacttcttggatcagctggagagcttaaaattgcagattttgggtggtcagtacatgctccatcttccaggaggaccactctctgtggcaccctggactacctgccccctgaaatgattgaaggtcggatgcatgatgagaaggtggatctctggagccttggagttctttgctatgaatttttagttgggaagcctccttttgaggcaaacacataccaagagacctacaaaagaatatcacgggttgaattcacattccctgactttgtaacagagggagccagggacctcatttcaagactgttgaagcataatcccagccagaggccaatgctcagagaagtacttgaacacccctggatcacagcaaattcatcaaaaccatcaaattgccaaaacaaagaatcagctagcaaacagtcttaggaatcgtgcagggggagaaatccttgagccagggctgccatataacctgacaggaacatgctactgaagtttattttaccattgactgctgccctcaatctagaacgctacacaagaaatatttgttttactcagcaggtgtgccttaacctccctattcagaaagctccacatcaataaacatgacactctgaagtgaaagtagccacgagaattgtgctacttatactggttcataatctggaggcaaggttcgactgcagccgccccgtcagcctgtgctaggcatggtgtcttcacaggaggcaaatccagagcctggctgtggggaaagtgaccactctgccctgaccccgatcagttaaggagctgtgcaataaccttcctagtacctgagtgagtgtgtaacttattgggttggcgaagcctggtaaagctgttggaatgagtatgtgattctttttaagtatgaaaataaagatatatgtacagacttgtattttttctctggtggcattcctttaggaatgctgtgtgtctgtccggcaccccggtaggcctgattgggtttctagtcctccttaaccacttatctcccatatgagagtgtgaaaaataggaacacgtgctctacctccatttagggatttgcttgggatacagaagaggccatgtgtctcagagctgttaagggcttatttttttaaaacattggagtcatagcatgtgtgtaaactttaaatatgcaaataaataagtatctatgtc

SEQ ID NO: 110351 - DNA, 879 bp, Homo sapiens
  Payload ID: 1654
  Gene Symbol: AURKA
  Gene Name: aurora kinase A
  ENST ID: ENST00000420474
  CDS Start-End: 314-879
aatcggctttctagctagagggtttaactcctatttaaaaagaagaacctttgaattctaacggctgagctcttggaagacttgggtccttgggtcgcagggtctcactccattgcccaggccagagtgcggggatatttgataagaaacttcagtgaaggccgggcgcggtggctcatgcccgtaatcccagcattttcggaggccgaggctggagtgcaatggtgtgatctcagctcactgcaacctctgcttcctgggtttaagtgattctcctgcctcagcctcccgagtagctgggattacaggcatcatggaccgatctaaagaaaactgcatttcaggacctgttaaggctacagctccagttggaggtccaaaacgtgttctcgtgactcagcaatttccttgtcagaatccattacctgtaaatagtggccaggctcagcgggtcttgtgtccttcaaattcttcccagcgcattcctttgcaagcacaaaagcttgtctccagtcacaagccggttcagaatcagaagcagaagcaattgcaggcaaccagtgtacctcatcctgtctccaggccactgaataacacccaaaagagcaagcagcccctgccatcggcacctgaaaataatcctgaggaggaactggcatcaaaacagaaaaatgaagaatcaaaaaagaggcagtgggctttggaagactttgaaattggtcgccctctgggtaaaggaaagtttggtaatgtttatttggcaagagaaaagcaaagcaagtttattctggctcttaaagtgttatttaaagctcagctggagaaagccggagtggagcatcagctcagaagagaagtagaaatacagtcccaccttcg

SEQ ID NO: 110352 - DNA, 991 bp, Homo sapiens
  Payload ID: 1654
  Gene Symbol: AURKA
  Gene Name: aurora kinase A
  ENST ID: ENST00000441357
  CDS Start-End: 178-991
gaattctaacggctgagctcttggaagacttgggtccttgggtcgcaggtgggagccgacggggtctcactccattgcccaggccagagtgcggggatatttgataagaaacttcagtgaaggccgggcgcggtggctcatgcccgtaatcccagcattttcggaggccgaggcatcatggaccgatctaaagaaaactgcatttcaggacctgttaaggctacagctccagttggaggtccaaaacgtgttctcgtgactcagcaatttccttgtcagaatccattacctgtaaatagtggccaggctcagcgggtcttgtgtccttcaaattcttcccagcgcattcctttgcaagcacaaaagcttgtctccagtcacaagccggttcagaatcagaagcagaagcaattgcaggcaaccagtgtacctcatcctgtctccaggccactgaataacacccaaaagagcaagcagcccctgccatcggcacctgaaaataatcctgaggaggaactggcatcaaaacagaaaaatgaagaatcaaaaaagaggcagtgggctttggaagactttgaaattggtcgccctctgggtaaaggaaagtttggtaatgtttatttggcaagagaaaagcaaagcaagtttattctggctcttaaagtgttatttaaagctcagctggagaaagccggagtggagcatcagctcagaagagaagtagaaatacagtcccaccttcggcatcctaatattcttagactgtatggttatttccatgatgctaccagagtctacctaattctggaatatgcaccacttggaacagtttatagagaacttcagaaactttcaaagtttgatgagcagagaactgctacttatataacagaattggcaaatgccctgtcttactgtcattcgaagagagttattcatagagacattaagccagagaacttacttcttggatcagctggagagcttaaaa

SEQ ID NO: 110353 - DNA, 584 bp, Homo sapiens
  Payload ID: 1654
  Gene Symbol: AURKA
  Gene Name: aurora kinase A
  ENST ID: ENST00000451915
  CDS Start-End: 346-584
tgagctcttggaagacttgggtccttgggtcgcagggtctcactccattgcccaggccagagtgcggggatatttgataagaaacttcagtgaaggccgggcgcggtggctcatgcccgtaatcccagcattttcggaggccgagcaggtatgccagtaggctgcacagggatggaagtgatccattagaggagagatgatggagcagcaagaccatcaggagtgaagactccgtgacagaggatgggacgcagtgcccaaggggaggttggccttgcagggaaagcacatgcctgtccctccctcattagcttcatttggacaaaacatgtaaaatccggcatcatggaccgatctaaagaaaactgcatttcaggacctgttaaggctacagctccagttggaggtccaaaacgtgttctcgtgactcagcaatttccttgtcagaatccattacctgtaaatagtggccaggctcagcgggtcttgtgtccttcaaattcttcccagcgcattcctttgcaagcacaaaagcttgtctccagtcacaagccggttcagaatcagaagcagaagcaattgca

SEQ ID NO: 110354 - DNA, 744 bp, Homo sapiens
  Payload ID: 1654
  Gene Symbol: AURKA
  Gene Name: aurora kinase A
  ENST ID: ENST00000422322
  CDS Start-End: 305-744
ctcagtggcggacgaggacggcggggacaaggggcggctggtcggagtggcggagcgtcaagtcccctgtcggttcctccgtccctgagtgtccttggcgctgccttgtgcccgcccagcgcctttgcatccgctcctgggcaccgaggcgccctgtaggatactgcttgttacttattacagctagagggtctcactccattgcccaggccagagtgcggggatatttgataagaaacttcagtgaaggccgggcgcggtggctcatgcccgtaatcccagcattttcggaggccgaggcatcatggaccgatctaaagaaaactgcatttcaggacctgttaaggctacagctccagttggaggtccaaaacgtgttctcgtgactcagcaatttccttgtcagaatccattacctgtaaatagtggccaggctcagcgggtcttgtgtccttcaaattcttcccagcgcattcctttgcaagcacaaaagcttgtctccagtcacaagccggttcagaatcagaagcagaagcaattgcaggcaaccagtgtacctcatcctgtctccaggccactgaataacacccaaaagagcaagcagcccctgccatcggcacctgaaaataatcctgaggaggaactggcatcaaaacagaaaaatgaagaatcaaaaaagaggcagtgggctttggaagactttgaaattggtcgccctctgggtaaaggaaagtttggtaatgt

SEQ ID NO: 110355 - DNA, 810 bp, Homo sapiens
  Payload ID: 1654
  Gene Symbol: AURKA
  Gene Name: aurora kinase A
  ENST ID: ENST00000456249
  CDS Start-End: 492-810
cctttgaattctaacggctgagctcttggaagacttgggtccttgggtcgcaggtgggagccgacgggtgggtagaccgtgggggatatctcagtggcggacgaggacggcggggacaaggggcggctggtcggagtggcggagcgtcaagtcccctgtcggttcctccgtccctgagtgtccttggcgctgccttgtgcccgcccagcgcctttgcatccgctcctgggcaccgaggcgccctgtaggatactgcttgttacttattacagctagagggtctcactccattgcccaggccagagtgcggggatatttgataagaaacttcagtgaaggccgggcgcggtggctcatgcccgtaatcccagcattttcggaggccgaggctggagtgcaatggtgtgatctcagctcactgcaacctctgcttcctgggtttaagtgattctcctgcctcagcctcccgagtagctgggattacaggcatcatggaccgatctaaagaaaactgcatttcaggacctgttaaggctacagctccagttggaggtccaaaacgtgttctcgtgactcagcaatttccttgtcagaatccattacctgtaaatagtggccaggctcagcgggtcttgtgtccttcaaattcttcccagcgcattcctttgcaagcacaaaagcttgtctccagtcacaagccggttcagaatcagaagcagaagcaattgcaggcaaccagtgtacctcatcctgtctccaggccactgaataacacccaaaagagcaagcagcccctgccatcggcacctg

SEQ ID NO: 110356 - DNA, 2116 bp, Homo sapiens
  Payload ID: 1655
  Gene Symbol: AUNIP
  Gene Name: aurora kinase A and ninein interacting protein
  Uniprot ID: Q9H7T9
  ENST ID: ENST00000374298
  CDS Start-End: 56-1129
ctgaggcgccgggagcctgcgccggcgtcctgccggcttcgtctcctcagcggccatgaggcggacaggccccgaggaggaggcctgcggcgtgtggctggacgcggcggcgctgaagaggcggaaagtgcagacacatttaatcaaaccaggcaccaaaatgctaacactccttcctggagaaagaaaggctaatatttattttactcaaagaagagctccatctacaggcattcaccagagaagcattgcttccttcttcaccttgcagccaggaaagacaaatggcagtgaccagaagagtgtttcatctcatacagaaagtcagatcaacaaagagtccaagaaaaatgcgacccagctagaccatttgatcccaggcttagcacacgattgcatggcatcccctttagccacttcaaccactgcagacatccaggaagctggactctctcctcagtccctccagacttctggccaccacagaatgaaaaccccattttcaactgagctatctttgctccagcctgatactccagactgtgctggagatagtcataccccactggctttttccttcaccgaggacttggaaagttcttgtttgctagaccgaaaggaagaaaaaggggattctgccaggaaatgggaatggcttcatgagtctaagaagaactatcagagtatggagaaacacaccaaactacctggggacaaatgctgtcagcccttaggcaagactaaattggaaagaaaggtgtctgccaaagaaaacaggcaggcccctgtcctccttcaaacatacagggaatcctggaatggagaaaacatagaatcagtgaaacaaagccgtagtccagtttctgtgttttcctgggacaatgaaaagaatgacaaggactcctggagtcaacttttcactgaagattctcaaggccagcgggtcattgcccacaacactagagctccttttcaagatgtaaccaataactggaattgggacttagggccgtttcctaacagtccttgggctcagtgccaggaggatgggccaactcaaaatctgaagcctgatttgctctttacccaggactctgaaggtaatcaagttatcagacaccaattctaaatgtttgaagctttgtttctaaaagtaccttgaaatgatagagatgtaggaaaatatagttgtgggtggagagaggagtgagtttgtttaggtgggaaggtggcatgggatgaagttgtcattactgagcatcttctctgtgtaaataaagggcagtaccattgttaagacagtgggattggcatcatggctttccctcaggaaggtggtggctggtaaattccctgaatgagtctatgatgaacactgaggcagcacagtgggtatttatctctatgaaagtgccttttactcagcctgcacagagccatctctttgcccttccagatgtctgactgggaccttgcttatggatgtgtttttttttttttttttttgagatggagtctcgctctgttgccaggctggagtgcagtggtgcgacctcagctcactgcaccctctgtctcccggattcaagcgattctcctgcctcagcctcccgaatagcagggactacaggcatgcgccaccacgcccagctaattttttttggatttttagtagagacgaggtttcaccatattagccaggatggtctccatctcctgacctcctgatccgcccacctcagcctcccaaagtgctgagattacaggcataagccaccgcgcccagccagatgtgtgagcttttaatctctggctgatcttaacccacatcagcctaagcttgggatgattactcttgacccttttttttcagtgattagcaaatctccccacaacccaggtgtggagagaagagaggtagaatggtgctagtttcctattttatttttgtggtaactgtacagcactttaaagttatatactctatgtttaaatatctcccttaaaaagcctgagctgtacaacaatctggatgtgactctgttacccttttcccacaagataggagggaatcccctttgtaaaactatgaatccaaataaatgtttacaaagtg

SEQ ID NO: 110357 - DNA, 1392 bp, Homo sapiens
  Payload ID: 1655
  Gene Symbol: AUNIP
  Gene Name: aurora kinase A and ninein interacting protein
  Uniprot ID: Q9H7T9
  ENST ID: ENST00000538789
  CDS Start-End: 102-1217
cgttggcgcgagatccgaacgtcggcggccgcggttctggcgttccctgaggcgccgggagcctgcgccggcgtcctgccggcttcgtctcctcagcggccatgaggcggacaggccccgaggaggaggcctgcggcgtgtggctggacgcggcggcgctgaagaggcggaaagtgcagacacatttaatcaaaccaggcaccaaaatgctaacactccttcctggagaaagaaaggctaatatttattttactcaaagaagagctccatctacaggcattcaccagagaagcattgcttccttcttcaccttgcagccaggaaagacaaatggcagtgaccagaagagtgtttcatctcatacagaaagtcagatcaacaaagagtccaagaaaaatgcgacccagctagaccatttgatcccaggcttagcacacgattgcatggcatcccctttagccacttcaaccactgcagacatccaggaagctggactctctcctcagtccctccagacttctggccaccacagaatgaaaaccccattttcaactgagctatctttgctccagcctgatactccagactgtgctggagatagtcataccccactggctttttccttcaccgaggacttggaaagttcttgtttgctagaccgaaaggaagaaaaaggggattctgccaggaaatgggaatggcttcatgagtctaagaagaactatcagagtatggagaaacacaccaaactacctggggacaaatgctgtcagcccttaggcaagactaaattggaaagaaaggtgtctgccaaagaaaacaggcaggcccctgtcctccttcaaacatacagggaatcctggaatggagaaaacatagaatcagtgaaacaaagccgtagtccagtttctgtgttttcctgggacaatgaaaagaatgacaaggactcctggagtcaacttttcactgaagattctcaaggccagcgggtcattgcccacaacactagagctccttttcaagatgtaaccaataactggaattgggacttagggccgtttcctaacagtccttgggctcagtgccaggaggatgggccaactcaaaatctgaagcctgatttgctctttacccaggactctgaagtccaagctctagcttgtcagcaagactgttgcagaagatctatccttaagaggcagaaacatctgcggtgaggaaggcagctattgaaggtattccaggagcatgagactgagtttgcagagctgagggttgtcaatttccttttctactgatatcttcttcctttagagcaaacttcctccttaggacctcagagataagcacagcagggtcttcctccttcaataaactccggttcctagagac

SEQ ID NO: 110358 - DNA, 798 bp, Homo sapiens
  Payload ID: 1656
  Gene Symbol: AURKAIP1
  Gene Name: aurora kinase A interacting protein 1
  Uniprot ID: Q9NWT8
  ENST ID: ENST00000321751
  CDS Start-End: 130-729
tttgagccgcgtcgaggtcgggcttgggaagggtcagcgggaggcctgagggcgccgggcgctgcggcaggcgggcccggggtccagccgagaggctcccctgggacctgtggccgccgcccacagaccatgctcctggggcgcctgacttcccagctgttgagggccgttccttgggcaggcggccgcccgccttggcccgtctctggagtgctgggcagccgggtctgcgggcccctttacagcacatcgccggccggcccaggtagggcggcctctctccctcgcaagggggcccagctggagctggaggagatgctggtccccaggaagatgtccgtcagccccctggagagctggctcacggcccgctgcttcctgcccagactggataccgggaccgcagggactgtggctccaccgcaatcctaccagtgtccgcccagccagataggggaaggggccgagcagggggatgaaggcgtcgcggatgcgcctcaaattcagtgcaaaaacgtgctgaagatccgccggcggaagatgaaccaccacaagtaccggaagctggtgaagaagacgcggttcctgcggaggaaggtccaggagggacgcctgagacgcaagcagatcaagttcgagaaagacctgaggcgcatctggctgaaggcggggctaaaggaagcccccgaaggctggcagacccccaagatctacctgcggggcaaatgagtctggcgccgcccttcccgcccgttgctgctgtgatccgtagtaataaattctcagaggactcagcct

SEQ ID NO: 110359 - DNA, 1047 bp, Homo sapiens
  Payload ID: 1656
  Gene Symbol: AURKAIP1
  Gene Name: aurora kinase A interacting protein 1
  Uniprot ID: Q9NWT8
  ENST ID: ENST00000338338
  CDS Start-End: 377-976
ggaatccggcccctgggtggtccggaaacgattctggacctgcgggtatatccagggcccgcaccccctgggattgtgggaaatgtagttttttgcctccgtaagggaccaggcggagctgaggaaccgcgcgaggactgggaccgtgattccactaaccggaaaccgtcgcctttcgggcccggcggggcctgagccaatgcagaatcgggggccgcgaggacgccagcgggcgctgtgcgtaggaaccgccgggtggccgctgccgatcggggccgacttggggacggaccggaagtgcccgagggcggccgcagaacggtcaatttgagccgcgtcgagctcccctgggacctgtggccgccgcccacagaccatgctcctggggcgcctgacttcccagctgttgagggccgttccttgggcaggcggccgcccgccttggcccgtctctggagtgctgggcagccgggtctgcgggcccctttacagcacatcgccggccggcccaggtagggcggcctctctccctcgcaagggggcccagctggagctggaggagatgctggtccccaggaagatgtccgtcagccccctggagagctggctcacggcccgctgcttcctgcccagactggataccgggaccgcagggactgtggctccaccgcaatcctaccagtgtccgcccagccagataggggaaggggccgagcagggggatgaaggcgtcgcggatgcgcctcaaattcagtgcaaaaacgtgctgaagatccgccggcggaagatgaaccaccacaagtaccggaagctggtgaagaagacgcggttcctgcggaggaaggtccaggagggacgcctgagacgcaagcagatcaagttcgagaaagacctgaggcgcatctggctgaaggcggggctaaaggaagcccccgaaggctggcagacccccaagatctacctgcggggcaaatgagtctggcgccgcccttcccgcccgttgctgctgtgatccgtagtaataaattctcagaggactcagccttt

SEQ ID NO: 110360 - DNA, 1072 bp, Homo sapiens
  Payload ID: 1656
  Gene Symbol: AURKAIP1
  Gene Name: aurora kinase A interacting protein 1
  Uniprot ID: Q9NWT8
  ENST ID: ENST00000338370
  CDS Start-End: 402-1001
cgaggtcgggcttgggaagggtcagcgggaggcctgagggcgccgggcgctgcggcaggcgggcccggggtccagccgagagggtccgggcgccaggcaacgcgattcgcgcgggggtgaacccggggagggggccggcctccccgttctgggacctttcggtgcgtccgagcgcgacaccgcccgcgtcgggggcttgggagcctcggggcgcgagctgtgttggaagcaaagtcctccttgtgggttggggtggcggagggagaagggaagcgagggtcgcggcgggaccagacgccccagtcccggcccgcccgcgactactgaaggcgctgccgcctgacctgaacgggcacttgtgttccagctcccctgggacctgtggccgccgcccacagaccatgctcctggggcgcctgacttcccagctgttgagggccgttccttgggcaggcggccgcccgccttggcccgtctctggagtgctgggcagccgggtctgcgggcccctttacagcacatcgccggccggcccaggtagggcggcctctctccctcgcaagggggcccagctggagctggaggagatgctggtccccaggaagatgtccgtcagccccctggagagctggctcacggcccgctgcttcctgcccagactggataccgggaccgcagggactgtggctccaccgcaatcctaccagtgtccgcccagccagataggggaaggggccgagcagggggatgaaggcgtcgcggatgcgcctcaaattcagtgcaaaaacgtgctgaagatccgccggcggaagatgaaccaccacaagtaccggaagctggtgaagaagacgcggttcctgcggaggaaggtccaggagggacgcctgagacgcaagcagatcaagttcgagaaagacctgaggcgcatctggctgaaggcggggctaaaggaagcccccgaaggctggcagacccccaagatctacctgcggggcaaatgagtctggcgccgcccttcccgcccgttgctgctgtgatccgtagtaataaattctcagaggactcagccttt

SEQ ID NO: 110361 - DNA, 875 bp, Homo sapiens
  Payload ID: 1656
  Gene Symbol: AURKAIP1
  Gene Name: aurora kinase A interacting protein 1
  Uniprot ID: Q9NWT8
  ENST ID: ENST00000378853
  CDS Start-End: 212-811
tcaatttgagccgcgtcgaggtcgggcttgggaagggtcagcgggaggcctgagggcgccgggcgctgcggcaggcgggcccggggtccagccgagagggtccgggcgccaggcaacgcgattcgcgcgggggtgaacccggggagggggccggcctccccgttctgggacctttcgctcccctgggacctgtggccgccgcccacagaccatgctcctggggcgcctgacttcccagctgttgagggccgttccttgggcaggcggccgcccgccttggcccgtctctggagtgctgggcagccgggtctgcgggcccctttacagcacatcgccggccggcccaggtagggcggcctctctccctcgcaagggggcccagctggagctggaggagatgctggtccccaggaagatgtccgtcagccccctggagagctggctcacggcccgctgcttcctgcccagactggataccgggaccgcagggactgtggctccaccgcaatcctaccagtgtccgcccagccagataggggaaggggccgagcagggggatgaaggcgtcgcggatgcgcctcaaattcagtgcaaaaacgtgctgaagatccgccggcggaagatgaaccaccacaagtaccggaagctggtgaagaagacgcggttcctgcggaggaaggtccaggagggacgcctgagacgcaagcagatcaagttcgagaaagacctgaggcgcatctggctgaaggcggggctaaaggaagcccccgaaggctggcagacccccaagatctacctgcggggcaaatgagtctggcgccgcccttcccgcccgttgctgctgtgatccgtagtaataaattctcagaggactc

SEQ ID NO: 110362 - DNA, 1254 bp, Homo sapiens
  Payload ID: 1657
  Gene Symbol: AURKB
  Gene Name: aurora kinase B
  Uniprot ID: Q96GD4
  ENST ID: ENST00000316199
  CDS Start-End: 79-1116
cagattcagttgtttgcgggcggccgggagagtagcagtgccttggaccccagctctcctccccctttctctctaaggatggcccagaaggagaactcctacccctggccctacggccgacagacggctccatctggcctgagcaccctgccccagcgagtcctccggaaagagcctgtcaccccatctgcacttgtcctcatgagccgctccaatgtccagcccacagctgcccctggccagaaggtgatggagaatagcagtgggacacccgacatcttaaccaggcggcacttcacaattgatgactttgagattgggcgtcctctgggcaaaggcaagtttggaaacgtgtacttggctcgggagaagaaaagccatttcatcgtggcgctcaaggtcctcttcaagtcccagatagagaaggagggcgtggagcatcagctgcgcagagagatcgaaatccaggcccacctgcaccatcccaacatcctgcgtctctacaactatttttatgaccggaggaggatctacttgattctagagtatgccccccgcggggagctctacaaggagctgcagaagagctgcacatttgacgagcagcgaacagccacgatcatggaggagttggcagatgctctaatgtactgccatgggaagaaggtgattcacagagacataaagccagaaaatctgctcttagggctcaagggagagctgaagattgctgacttcggctggtctgtgcatgcgccctccctgaggaggaagacaatgtgtggcaccctggactacctgcccccagagatgattgaggggcgcatgcacaatgagaaggtggatctgtggtgcattggagtgctttgctatgagctgctggtggggaacccaccctttgagagtgcatcacacaacgagacctatcgccgcatcgtcaaggtggacctaaagttccccgcttccgtgcccatgggagcccaggacctcatctccaaactgctcaggcataacccctcggaacggctgcccctggcccaggtctcagcccacccttgggtccgggccaactctcggagggtgctgcctccctctgcccttcaatctgtcgcctgatggtccctgtcattcactcgggtgcgtgtgtttgtatgtctgtgtatgtataggggaaagaagggatccctaactgttcccttatctgttttctacctcctcctttgtttaataaaggctgaagctttttgtactcat

SEQ ID NO: 110363 - DNA, 1167 bp, Homo sapiens
  Payload ID: 1657
  Gene Symbol: AURKB
  Gene Name: aurora kinase B
  Uniprot ID: Q96GD4
  ENST ID: ENST00000534871
  CDS Start-End: 128-1039
agattcagttgtttgcgggcggccgggagagtagcagtgccttggaccccaggctccatctggcctgagcaccctgccccagcgagtcctccggaaagagcctgtcaccccatctgcacttgtcctcatgagccgctccaatgtccagcccacagctgcccctggccagaaggtgatggagaatagcagtgggacacccgacatcttaacgcggcacttcacaattgatgactttgagattgggcgtcctctgggcaaaggcaagtttggaaacgtgtacttggctcgggagaagaaaagccatttcatcgtggcgctcaaggtcctcttcaagtcccagatagagaaggagggcgtggagcatcagctgcgcagagagatcgaaatccaggcccacctgcaccatcccaacatcctgcgtctctacaactatttttatgaccggaggaggatctacttgattctagagtatgccccccgcggggagctctacaaggagctgcagaagagctgcacatttgacgagcagcgaacagccacgatcatggaggagttggcagatgctctaatgtactgccatgggaagaaggtgattcacagagacataaagccagaaaatctgctcttagggctcaagggagagctgaagattgctgacttcggctggtctgtgcatgcgccctccctgaggaggaagacaatgtgtggcaccctggactacctgcccccagagatgattgaggggcgcatgcacaatgagaaggtggatctgtggtgcattggagtgctttgctatgagctgctggtggggaacccaccctttgagagtgcatcacacaacgagacctatcgccgcatcgtcaaggtggacctaaagttccccgcttccgtgcccatgggagcccaggacctcatctccaaactgctcaggcataacccctcggaacggctgcccctggcccaggtctcagcccacccttgggtccgggccaactctcggagggtgctgcctccctctgcccttcaatctgtcgcctgatggtccctgtcattcactcgggtgcgtgtgtttgtatgtctgtgtatgtataggggaaagaagggatccctaactgttcccttatctgttttctacctcctcctttgtttaataaaggctgaagcttt

SEQ ID NO: 110364 - DNA, 746 bp, Homo sapiens
  Payload ID: 1657
  Gene Symbol: AURKB
  Gene Name: aurora kinase B
  ENST ID: ENST00000580998
  CDS Start-End: 24-395
ctcctccccctttctctctaaggatggcccagaaggagaactcctacccctggccctacggccgacagacggctccatctggcctgagcaccctgccccagcgagtcctccggaaagagcctgtcaccccatctgcacttgtcctcatgagccgctccaatgtccagcccacagctgcccctggccagaaggtgatggagaatagcagtgggacacccgacatcttaacgcggcacttcacaattgatgactttgagattgggcgtcctctgggcaaagatcatggaggagttggcagatgctctaatgtactgccatgggaagaaggtgattcacagagacataaagccagaaaatctgctcttagggctcaagggagagctgaagattgctgacttcggctggtctgtgcatgcgccctccctgaggaggaagacaatgtgtggcaccctggactacctgcccccagagatgattgaggggcgcatgcacaatgagaaggtggatctgtggtgcattggagtgctttgctatgagctgctggtggggaacccaccctttgagagtgcatcacacaacgagacctatcgccgcatcgtcaaggtggacctaaagttccccgcttccgtgcccatgggagcccaggacctcatctccaaactgctcaggcataacccctcggaacggctgcccctggcccaggtctcagcccacccttgggtccgggccaactctcggagggtgct

SEQ ID NO: 110365 - DNA, 397 bp, Homo sapiens
  Payload ID: 1657
  Gene Symbol: AURKB
  Gene Name: aurora kinase B
  ENST ID: ENST00000583915
  CDS Start-End: 189-397
agattcagttgtttgcgggcggccgggagagtagcagtgccttggaccccagcacattccaccccggtcatcagacaaaggcaccctcagagctaccccctgctccttctcaggctccatctggcctgagcaccctgccccagcgagtcctccggaaagagcctgtcaccccatctgcacttgtcctcatgagccgctccaatgtccagcccacagctgcccctggccagaaggtgatggagaatagcagtgggacacccgacatcttaacgcggcacttcacaattgatgactttgagattgggcgtcctctgggcaaaggcaagtttggaaacgtgtacttggctcgggagaagaaaagccatttcatcgtggcgctcaaggtcctcttcaagtc

SEQ ID NO: 110366 - DNA, 939 bp, Homo sapiens
  Payload ID: 1657
  Gene Symbol: AURKB
  Gene Name: aurora kinase B
  Uniprot ID: Q96GD4
  ENST ID: ENST00000578549
  CDS Start-End: 1-939
atggcccagaaggagaactcctacccctggccctacggccgacagacggctccatctggcctgagcaccctgccccagcgagtcctccggaaagagcctgtcaccccatctgcacttgtcctcatgagccgctccaatgtccagcccacagctgcccctggccagaaggtgatggagaatagcagtgggacacccgacatcttaacgcggcacttcacaattgatgactttgagattgggcgtcctctgggcaaagctcttttatgcctttggcctgaggcctcctctgtctcttcccccagccatcccaacatcctgcgtctctacaactatttttatgaccggaggaggatctacttgattctagagtatgccccccgcggggagctctacaaggagctgcagaagagctgcacatttgacgagcagcgaacagccacgatcatggaggagttggcagatgctctaatgtactgccatgggaagaaggtgattcacagagacataaagccagaaaatctgctcttagggctcaagggagagctgaagattgctgacttcggctggtctgtgcatgcgccctccctgaggaggaagacaatgtgtggcaccctggactacctgcccccagagatgattgaggggcgcatgcacaatgagaaggtggatctgtggtgcattggagtgctttgctatgagctgctggtggggaacccaccctttgagagtgcatcacacaacgagacctatcgccgcatcgtcaaggtggacctaaagttccccgcttccgtgcccatgggagcccaggacctcatctccaaactgctcaggcataacccctcggaacggctgcccctggcccaggtctcagcccacccttgggtccgggccaactctcggagggtgctgcctccctctgcccttcaatctgtcgcctga

SEQ ID NO: 110367 - DNA, 739 bp, Homo sapiens
  Payload ID: 1657
  Gene Symbol: AURKB
  Gene Name: aurora kinase B
  ENST ID: ENST00000584972
  CDS Start-End: 1-727
gcggcacttcacaattgatgactttgagattgggcgtcctctgggcaaaggcaagtttggaaacgtgtacttggctcgggagaagaaaagccatttcatcgtggcgctcaaggtcctcttcaagtcccagatagagaaggagggcgtggagcatcagctgcgcagagagatcgaaatccaggcccacctgcaccatcccaacatcctgcgtctctacaactatttttatgaccggaggaggatctacttgattctagagtatgccccccgcggggagctctacaaggagctgcagaagagctgcacatttgacgagcagcgaacagccacgatcatggaggagttggcagatgctctaatgtactgccatgggaagaaggtgattcacagagacataaagccagaaaatctgctcttagggctcaagggagagctgaagattgctgacttcggctggtctgtgcatgcgccctccctgaggaggaagacaatgtgtggcaccctggactacctgcccccagagatgattgaggggcgcatgcacaatgagaaggtggacctaaagttccccgcttccgtgcccatgggagcccaggacctcatctccaaactgctcaggcataacccctcggaacggctgcccctggcccaggtctcagcccacccttgggtccgggccaactctcggagggtgctgcctccctctgcccttcaatctgtcgcctgatggtccctgtca

SEQ ID NO: 110368 - DNA, 742 bp, Homo sapiens
  Payload ID: 1657
  Gene Symbol: AURKB
  Gene Name: aurora kinase B
  ENST ID: ENST00000581511
  CDS Start-End: 57-742
ggcagattcagttgtttgcgggcggccgggagagtagcagtgccttggaccccaggatggcccagaaggagaactcctacccctggccctacggccgacagacggctccatctggcctgagcaccctgccccagcgagtcctccggaaagagcctgtcaccccatctgcacttgtcctcatgagccgctccaatgtccagcccacagctgcccctggccagaaggtgatggagaatagcagtgggacacccgacatcttaacgcggcacttcacaattgatgactttgagattgggcgtcctctgggcaaaggcaagtttggaaacgtgtacttggctcgggagaagaaaagccatttcatcgtggcgctcaaggtcctcttcaagtcccagatagagaaggagggcgtggagcatcagctgcgcagagagatcgaaatccaggcccacctgcaccatcccaacatcctgcgtctctacaactatttttatgaccggaggaggatctacttgattctagagtatgccccccgcggggagctctacaaggagctgcagaagagctgcacatttgacgagcagcgaacagccacgatcatggaggagttggcagatgctctaatgtactgccatgggaagaaggtgattcacagagacataaagccagaaaatctgctcttagggctcaagggagagctgaagattgctgacttcggctggtctgtgcatgcgccctccctgag

SEQ ID NO: 110369 - DNA, 867 bp, Homo sapiens
  Payload ID: 1657
  Gene Symbol: AURKB
  Gene Name: aurora kinase B
  ENST ID: ENST00000577833
  CDS Start-End: 176-867
tgcgggcggccgggagagtagcagtgccttggaccccagcacattccaccccggtcatcagacaaaggcaccctcagagctaccccctgctccttctcaggctccatctggcctgagcaccctgccccagcgagtcctccggaaagagcctgtcaccccatctgcacttgtcctcatgagccgctccaatgtccagcccacagctgcccctggccagaaggtgatggagaatagcagtgggacacccgacatcttaaccaggcggcacttcacaattgatgactttgagattgggcgtcctctgggcaaaggcaagtttggaaacgtgtacttggctcgggagaagaaaagccatttcatcgtggcgctcaaggtcctcttcaagtcccagatagagaaggagggcgtggagcatcagctgcgcagagagatcgaaatccaggcccacctgcaccatcccaacatcctgcgtctctacaactatttttatgaccggaggaggatctacttgattctagagtatgccccccgcggggagctctacaaggagctgcagaagagctgcacatttgacgagcagcgaacagccacgatcatggaggagttggcagatgctctaatgtactgccatgggaagaaggtgattcacagagacataaagccagaaaatctgctcttagggctcaagggagagctgaagattgctgacttcggctggtctgtgcatgcgccctccctgaggaggaagacaatgtgtggcaccctggactacctgcccccagagatgattgaggggcgcatgcacaatgagaaggtggatctgtggtgcattggagtgctttgctatgagctgctggtggggaaccc

SEQ ID NO: 110370 - DNA, 1227 bp, Homo sapiens
  Payload ID: 1657
  Gene Symbol: AURKB
  Gene Name: aurora kinase B
  Uniprot ID: Q96GD4
  ENST ID: ENST00000585124
  CDS Start-End: 95-1129
ccagggcgcggcgtggcagattcagttgtttgcgggcggccgggagagtagcagtgccttggaccccagctctcctccccctttctctctaaggatggcccagaaggagaactcctacccctggccctacggccgacagacggctccatctggcctgagcaccctgccccagcgagtcctccggaaagagcctgtcaccccatctgcacttgtcctcatgagccgctccaatgtccagcccacagctgcccctggccagaaggtgatggagaatagcagtgggacacccgacatcttaacgcggcacttcacaattgatgactttgagattgggcgtcctctgggcaaaggcaagtttggaaacgtgtacttggctcgggagaagaaaagccatttcatcgtggcgctcaaggtcctcttcaagtcccagatagagaaggagggcgtggagcatcagctgcgcagagagatcgaaatccaggcccacctgcaccatcccaacatcctgcgtctctacaactatttttatgaccggaggaggatctacttgattctagagtatgccccccgcggggagctctacaaggagctgcagaagagctgcacatttgacgagcagcgaacagccacgatcatggaggagttggcagatgctctaatgtactgccatgggaagaaggtgattcacagagacataaagccagaaaatctgctcttagggctcaagggagagctgaagattgctgacttcggctggtctgtgcatgcgccctccctgaggaggaagacaatgtgtggcaccctggactacctgcccccagagatgattgaggggcgcatgcacaatgagaaggtggatctgtggtgcattggagtgctttgctatgagctgctggtggggaacccaccctttgagagtgcatcacacaacgagacctatcgccgcatcgtcaaggtggacctaaagttccccgcttccgtgcccatgggagcccaggacctcatctccaaactgctcaggcataacccctcggaacggctgcccctggcccaggtctcagcccacccttgggtccgggccaactctcggagggtgctgcctccctctgcccttcaatctgtcgcctgatggtccctgtcattcactcgggtgcgtgtgtttgtatgtctgtgtatgtataggggaaagaagggatccctaactgttcccttatctgttttctacct

SEQ ID NO: 110371 - DNA, 771 bp, Homo sapiens
  Payload ID: 1657
  Gene Symbol: AURKB
  Gene Name: aurora kinase B
  ENST ID: ENST00000582368
  CDS Start-End: 256-771
cccagctctcctccccctttctctctaaggatggcccagaaggagaactcctacccctggccctacggccgacagacgtacgggtcccaagtttgacgacagaacccgctctggtcatttgtagccacatcctgtcaggtgctgccaacgtgaatctgaccagccagtgactcccagctggctccatctggcctgagcaccctgccccagcgagtcctccggaaagagcctgtcaccccatctgcacttgtcctcatgagccgctccaatgtccagcccacagctgcccctggccagaaggtgatggagaatagcagtgggacacccgacatcttaacgcggcacttcacaattgatgactttgagattgggcgtcctctgggcaaaggcaagtttggaaacgtgtacttggctcgggagaagaaaagccatttcatcgtggcgctcaaggtcctcttcaagtcccagatagagaaggagggcgtggagcatcagctgcgcagagagatcgaaatccaggcccacctgcaccatcccaacatcctgcgtctctacaactatttttatgaccggaggaggatctacttgattctagagtatgccccccgcggggagctctacaaggagctgcagaagagctgcacatttgacgagcagcgaacagccacgatcatggaggagttggcagatgctctaatgtactgccatgggaagaaggtgattcacagagacataaagccagaaaatctgctcttagggctcaagggagag

SEQ ID NO: 110372 - DNA, 1247 bp, Homo sapiens
  Payload ID: 1658
  Gene Symbol: AURKC
  Gene Name: aurora kinase C
  Uniprot ID: Q9UQB9
  ENST ID: ENST00000302804
  CDS Start-End: 187-1116
cggctgctcacgacgccgcggatcccgaagcctgtgtagcagtgagacatcagtgaggctgcaggacgagcaggattggaagcgccccggccagaaagtgaccccccacccctttcaggaccctgtgaacgggaacagccatccagagggttcaggaaggcgtccgcgccctcacctcttctccccatgagctcccccagagctgtggtgcagctgggcaaagctcaacctgcaggcgaagagttggctacagcaaaccaaacagcccagcagcccagcagcccagccatgcggcgcctcacagtcgatgactttgaaatcgggcgtcccctgggcaaggggaaatttgggaatgtgtacctggctcggctcaaggaaagccatttcattgtggccctgaaggttctcttcaagtcgcagatagagaaggaaggactggagcaccagctgcgccgggaaattgagatccaggctcatctacaacaccccaatatcctgcgcctgtataactatttccatgatgcacgccgggtgtacctgattctggaatatgctccaaggggtgagctctacaaggagctgcagaaaagcgagaaattagatgaacagcgcacagccacgataatagaggagttggcagatgccctgacctactgccatgacaagaaagtgattcacagagatattaagccagagaacctgctgctggggttcaggggtgaggtgaagattgcagattttggctggtctgtgcacaccccctccctgaggaggaagacaatgtgtgggacactggactacttgccgccagaaatgattgaggggagaacatatgatgaaaaggtggatttgtggtgcattggagtgctctgctatgagctgctggtgggatatccaccctttgagagcgcctcccacagtgagacttacagacgcatcctcaaggtagatgtgaggtttccactatcaatgcctctgggggcccgggacttgatttccaggcttctcagataccagcccttggagagactgcccctggcccagatcctgaagcacccctgggttcaggcccactcccgaagggtgctgcctccctgtgctcagatggcttcctgagccctgtctgcctctgttccctttgtgtgtgttcagggagctctcctggctctgccacctcatttgtctttatttttttctcttttaagatgtaagatgctaattaataaaagctgaatcatttcatacca

SEQ ID NO: 110373 - DNA, 1318 bp, Homo sapiens
  Payload ID: 1658
  Gene Symbol: AURKC
  Gene Name: aurora kinase C
  ENST ID: ENST00000448930
  CDS Start-End: 364-1188
cacaacggccatcaccacctctccgcaccctctgtctccttccttctcgggcctcacccctggccctcgctttcagtgcccagcccggaccgcagcactccagttccgccccaacccgggaaccctggactgaggctcccgtttctgtcctttctattgggcgcacttccgatggcgtcaggaatttcagccaataggagccagccaggaagtacctctctgagcggttggtgccgggtataaaagaaggccgcgcagccacggctgctcacgacgccgcggatcccgaagcctgtgtagcagtgagacatcagtgaggtggctacagcaaaccaaacagcccagcagcccagcagcccagccatgcggcgcctcacagtcgatgactttgaaatcgggcgtcccctgggcaaggggaaatttgggaatgtgtacctggctcggctcaaggaaagccatttcattgtggccctgaaggttctcttcaagtcgcagatagagaaggaaggactggagcaccagctgcgccgggaaattgagatccaggctcatctacaacaccccaatatcctgcgcctgtataactatttccatgatgcacgccgggtgtacctgattctggaatatgctccaaggggtgagctctacaaggagctgcagaaaagcgagaaattagatgaacagcgcacagccacgataatagaggagttggcagatgccctgacctactgccatgacaagaaagtgattcacagagatattaagccagagaacctgctgctggggttcaggggtgaggtgaagattgcagattttggctggtctgtgcaccccctccctgagaggaagacaatgtgtgggacactggactacttgccgccagaaatgattgaggggagaacatatgatgaaaaggtggatttgtggtgcattggagtgctctgctatgagctgctggtgggatatccaccctttgagagcgcctcccacagtgagacttacagacgcatcctcaaggtagatgtgaggtttccactatcaatgcctctgggggcccgggacttgatttccaggcttctcagataccagcccttggagagactgcccctggcccagatcctgaagcacccctgggttcaggcccactcccgaagggtgctgcctccctgtgctcagatggcttcctgagccctgtctgcctctgttccctttgtgtgtgttcagggagctctcctggctctgccacctcatttgtctttatttttttctcttttaagatgtaagatgctaattaataaaagctgaatcatttcatacc

SEQ ID NO: 110374 - DNA, 978 bp, Homo sapiens
  Payload ID: 1658
  Gene Symbol: AURKC
  Gene Name: aurora kinase C
  Uniprot ID: Q9UQB9
  ENST ID: ENST00000415300
  CDS Start-End: 106-978
ggaagtacctctctgagcggttggtgccgggtataaaagaaggccgcgcagccacggctgctcacgacgccgcggatcccgaagcctgtgtagcagtgagacatcatggctacagcaaaccaaacagcccagcagcccagcagcccagccatgcggcgcctcacagtcgatgactttgaaatcgggcgtcccctgggcaaggggaaatttgggaatgtgtacctggctcggctcaaggaaagccatttcattgtggccctgaaggttctcttcaagtcgcagatagagaaggaaggactggagcaccagctgcgccgggaaattgagatccaggctcatctacaacaccccaatatcctgcgcctgtataactatttccatgatgcacgccgggtgtacctgattctggaatatgctccaaggggtgagctctacaaggagctgcagaaaagcgagaaattagatgaacagcgcacagccacgataatagaggagttggcagatgccctgacctactgccatgacaagaaagtgattcacagagatattaagccagagaacctgctgctggggttcaggggtgaggtgaagattgcagattttggctggtctgtgcacaccccctccctgaggaggaagacaatgtgtgggacactggactacttgccgccagaaatgattgaggggagaacatatgatgaaaaggtggatttgtggtgcattggagtgctctgctatgagctgctggtgggatatccaccctttgagagcgcctcccacagtgagacttacagacgcatcctcaaggtagatgtgaggtttccactatcaatgcctctgggggcccgggacttgatttccaggcttctcagataccagcccttggagagactgcccctggcccagatcctgaagcacccctgggttcaggcccactcccgaagggtgctgcctccctgtgctcagatggcttcctga

SEQ ID NO: 110375 - DNA, 1610 bp, Homo sapiens
  Payload ID: 1658
  Gene Symbol: AURKC
  Gene Name: aurora kinase C
  ENST ID: ENST00000601799
  CDS Start-End: 110-250
ggaagcgccccggccagaaagtgaccccccacccctttcaggaccctgtgaacgggaacagccatccagagggttcaggaaggcgtccgcgccctcacctcttctccccatgagctcccccagagctgtggtgcagctgggcaaagctcaacctgcaggcgaagagtgtgagagccagcgccagagaaaggacgcagggaaggctggggactgggccaggggtcgggtgcacagaagacacatgtgttgacatctcccctccctctcctcctccccaacgctcttcttttctccccactccctcccttccctccaattctttctttcacctctccctcccctactctctcctccccttcctttctctctgcctcttcttcacctcctcctcccctccctaccttaccttactctttcttcttccccttacctctccctccccctctccctgccttccccttccctctctttctctcctccccttcttcccctcacctctcgctccctattcccttctctactgttctcctctcctctctttctctccccttctccttccctcccctctcccttcctatctccctcctcctcctctctttcagtggctacagcaaaccaaacagcccagcagcccagcagcccagccatgcggcgcctcacagtcgatgactttgaaatcgggcgtcccctgggcaaggggaaatttgggaatgtgtacctggctcggctcaaggaaagccatttcattgtggccctgaaggttctcttcaagtcgcagatagagaaggaaggactggagcaccagctgcgccgggaaattgagatccaggctcatctacaacaccccaatatcctgcgcctgtataactatttccatgatgcacgccgggtgtacctgattctggaatatgctccaaggggtgagctctacaaggagctgcagaaaagcgagaaattagatgaacagcgcacagccacggtgagataatagaggagttggcagatgccctgacctactgccatgacaagaaagtgattcacagagatattaagccagagaacctgctgctggggttcaggggtgaggtgaagattgcagattttggctggtctgtgcacaccccctccctgaggaggaagacaatgtgtgggacactggactacttgccgccagaaatgattgaggggagaacatatgatgaaaaggtggatttgtggtgcattggagtgctctgctatgagctgctggtgggatatccaccctttgagagcgcctcccacagtgagacttacagacgcatcctcaaggtagatgtgaggtttccactatcaatgcctctgggggcccgggacttgatttccaggcttctcagataccagcccttggagagactgcccctggcccagatcctgaagcacccctgggttcaggcccactcccgaagggtgctgcctccctgtgctcagatggcttcctgagccctgtctgcctctgttccctttgtgtgtgttcagggagctctcctggctctgccacctcatttgtctttatttttttctcttttaagatgtaagatgctaattaataaaagctgaatcatttcatacca

SEQ ID NO: 110376 - DNA, 545 bp, Homo sapiens
  Payload ID: 1658
  Gene Symbol: AURKC
  Gene Name: aurora kinase C
  ENST ID: ENST00000594599
  CDS Start-End: 1-414
aggggtgagctctacaaggagctgcagaaaagcgagaaattagatgaacagcgcacagccacggtgaggaggaagacaatgtgtgggacactggactacttgccgccagaaatgattgaggggagaacatatgatgaaaaggtggatttgtggtgcattggagtgctctgctatgagctgctggtgggatatccaccctttgagagcgcctcccacagtgagacttacagacgcatcctcaaggtagatgtgaggtttccactatcaatgcctctgggggcccgggacttgatttccaggcttctcagataccagcccttggagagactgcccctggcccagatcctgaagcacccctgggttcaggcccactcccgaagggtgctgcctccctgtgctcagatggcttcctgagccctgtctgcctctgttccctttgtgtgtgttcagggagctctcctggctctgccacctcatttgtctttatttttttctcttttaagatgtaagatgctaattaataaaagctgaatcatttcatacca

SEQ ID NO: 110377 - DNA, 921 bp, Homo sapiens
  Payload ID: 1658
  Gene Symbol: AURKC
  Gene Name: aurora kinase C
  ENST ID: ENST00000599062
  CDS Start-End: 1-921
atgagctcccccagagctgtggtgcagctgggcaaagctcaacctgcaggcgaagagtcaaaccaaacagcccagcagcccagcagcccagccatgcggcgcctcacagtcgatgactttgaaatcgggcgtcccctgggcaaggggaaatttgggaatgtgtacctggctcggctcaaggaaagccatttcattgtggccctgaaggttctcttcaagtcgcagatagagaaggaaggactggagcaccagctgcgccgggaaattgagatccaggctcatctacaacaccccaatatcctgcgcctgtataactatttccatgatgcacgccgggtgtacctgattctggaatatgctccaaggggtgagctctacaaggagctgcagaaaagcgagaaattagatgaacagcgcacagccacgataatagaggagttggcagatgccctgacctactgccatgacaagaaagtgattcacagagatattaagccagagaacctgctgctggggttcaggggtgaggtgaagattgcagattttggctggtctgtgcacaccccctccctgaggaggaagacaatgtgtgggacactggactacttgccgccagaaatgattgaggggagaacatatgatgaaaaggtggatttgtggtgcattggagtgctctgctatgagctgctggtgggatatccaccctttgagagcgcctcccacagtgagacttacagacgcatcctcaaggtagatgtgaggtttccactatcaatgcctctgggggcccgggacttgatttccaggcttctcagataccagcccttggagagactgcccctggcccagatcctgaagcacccctgggttcaggcccactcccgaagggtgctgcctccctgtgctcagatggcttcctga

SEQ ID NO: 110378 - DNA, 877 bp, Homo sapiens
  Payload ID: 1658
  Gene Symbol: AURKC
  Gene Name: aurora kinase C
  ENST ID: ENST00000596375
  CDS Start-End: 59-400
ctcctctctttcagtggctacagcaaaccaaacagcccagcagcccagcagcccagccatgcggcgcctcacagtcgatgactttgaaatcgggcgtcccctgggcaaggggaaatttgggaatgtgtacctggctcggctcaaggaaagccatttcattgtggccctgaaggttctcttcaagtcgcagatagagaaggaaggactggagcaccagctgcgccgggaaattgagatccaggctcatctacaacaccccaatatcctgcgcctgtataactatttccatgatgcacgccgggtgtacctgattctggaatatgctccaaggggtgagctctacaaggagctgcagaaaagcgagaaattagatgaacagcgcacagccacggtgagataatagaggagttggcagatgccctgacctactgccatgacaagaaagtgattcacagagatattaagccagagaacctgctgctggggttcaggggtgaggtgaagattgcagattttggctggtctgtgcacaccccctccctgaggaggaagacaatgtgtgggacactggactacttgccgccagaaatgattgaggggagaacatatgatgaaaaggtggatttgtggtgcattggagtgctctgctatgagctgctggtgggatatccaccctttgagagcgcctcccacagtgagacttacagacgcatcctcaaggtagatgtgaggtttccactatcaatgcctctgggggcccgggacttgatttccaggcttctcagataccagcccttggagagactgcccctggcccagatcctgaagcacccctgggttcaggcccactcccgaagggtgctgcctccctgtgctc

SEQ ID NO: 110379 - DNA, 1125 bp, Homo sapiens
  Payload ID: 1658
  Gene Symbol: AURKC
  Gene Name: aurora kinase C
  Uniprot ID: Q9UQB9
  ENST ID: ENST00000598785
  CDS Start-End: 168-995
cccttcttcccctcacctctcgctccctattcccttctctactgttctcctctcctctctttctctccccttctccttccctcccctctcccttcctatctccctcctcctcctctctttcagtggctacagcaaaccaaacagcccagcagcccagcagcccagccatgcggcgcctcacagtcgatgactttgaaatcgggcgtcccctgggcaaggggaaatttgggaatgtgtacctggctcggctcaaggaaagccatttcattgtggccctgaaggttctcttcaagtcgcagatagagaaggaaggactggagcaccagctgcgccgggaaattgagatccaggctcatctacaacaccccaatatcctgcgcctgtataactatttccatgatgcacgccgggtgtacctgattctggaatatgctccaaggggtgagctctacaaggagctgcagaaaagcgagaaattagatgaacagcgcacagccacgataatagaggagttggcagatgccctgacctactgccatgacaagaaagtgattcacagagatattaagccagagaacctgctgctggggttcaggggtgaggtgaagattgcagattttggctggtctgtgcacaccccctccctgaggaggaagacaatgtgtgggacactggactacttgccgccagaaatgattgaggggagaacatatgatgaaaaggtggatttgtggtgcattggagtgctctgctatgagctgctggtgggatatccaccctttgagagcgcctcccacagtgagacttacagacgcatcctcaaggtagatgtgaggtttccactatcaatgcctctgggggcccgggacttgatttccaggcttctcagataccagcccttggagagactgcccctggcccagatcctgaagcacccctgggttcaggcccactcccgaagggtgctgcctccctgtgctcagatggcttcctgagccctgtctgcctctgttccctttgtgtgtgttcagggagctctcctggctctgccacctcatttgtctttatttttttctcttttaagatgtaagatgctaattaataaaagctgaatcatttcatacc

SEQ ID NO: 110380 - DNA, 6173 bp, Homo sapiens
  Payload ID: 1659
  Gene Symbol: AUTS2
  Gene Name: autism susceptibility candidate 2
  Uniprot ID: Q8WXX7
  ENST ID: ENST00000342771
  CDS Start-End: 322-4101
ctgtgtgttcagccattactttgctcggcgctgctcccaggcatctccgaccctcggtgctgtggggagccccacacttgggctcctcgcctctcgccctcgctccccgtccctcctcccctctctccgccccttcccccttttctttctcctctctttcttcccctctctcccttctttcggccgccgtctcccccgcgccctcctcggggcggagggaagccgtgaagggggagggagggctcggtgtcaatttttttttgtgtggctgcggccgtagcctgtggcgggcaagcggggagaccccggcgcagcagaaccatggatggcccgacgcggggccatggactccgcaaaaagcggcggtcgcggtcgcagcgagaccgggagaggcgctcccggggcgggctgggggccggcgcggccggcggcggcggggctggccggacccgggcgctctcactcgcctcgtcgtcgggctccgacaaggaagacaatgggaagcccccgtcctccgccccgtcccggcccagacccccgcggaggaagcggagagagtccacctcggcagaagaggacatcattgatggatttgccatgaccagctttgtcacttttgaagcgctggagaaagatgtagcacttaagcctcaggaacgtgtggagaaacgccagacgcccctgaccaagaagaaacgagaagcacttaccaatggcttgtcctttcattcaaagaagagcagactcagccacccacaccactacagctcagatcgagaaaatgaccgcaatctctgccagcaccttgggaagagaaagaaaatgccgaaggcactcagacagctcaagccaggacagaacagctgcagggacagtgacagtgaaagtgccagtggagaatccaagggcttccaccggagcagctctcgggaaaggctcagtgatagttcagctccttccagcttgggaacaggctacttctgtgacagtgacagtgaccaggaagagaaggcatcagatgccagctctgaaaaactcttcaacactgttattgtaaacaaagatccggagttaggtgttggcacgctaccagaacatgacagccaggatgcagggccgattgtccccaagatatcgggtctagagagaagccaggagaagagccaggactgttgcaaagagccaatctttgagcctgtggtgcttaaagacccctgccctcaggtcgcacagccaataccccagccgcagacggagccccaactccgagctccttctccggaccctgacttggtgcagcgcacagaggccccacctcaacccccacctctgagtacacagccaccacagggccctcctgaggcccagctccagcctgccccgcagcctcaggtgcagaggccacccaggccacagtcccccacccagctgctccatcagaacctcccacctgtgcaggcccacccctctgctcagagcctctcccagccattgtcagcctacaacagcagtagcttaagcctcaacagtttaagcagcagcagaagcagcactccagcgaagactcagcccgccccacctcacatctcccaccacccctctgcctccccgttccccctctccctgcccaaccacagccccctgcacagcttcacacccaccctccagccccccgcacactcacatcaccccaatatgtttgcccctcccactgctctgcctcctccaccaccactgacatcaggaagtctgcaggtggccggacacccggccgggagcacttactcagagcaagacatcttgcgacaggaactgaacactcgttttttggcctctcagagtgctgaccgcggggcttccctgggccctccgccctacctgcggaccgagttccatcagcaccagcaccagcaccagcacacccaccagcacacgcaccagcacaccttcacgccgttcccccacgccatcccacccaccgccatcatgccgacgccagcacctcccatgtttgacaaataccctacaaaagttgacccattctaccggcacagtctcttccattcctatcctcctgcagtgtcgggcatcccccctatgatcccacccactggcccttttggttcactacaaggagcatttcagccgaagacatccaaccctatcgatgtcgctgctcggcctgggacagtcccacacactttactccaaaaggacccgaggttgacagatcctttcagacctatgttaaggaaaccagggaagtggtgtgctatgcatgttcacatcgcctggcagatttaccaccaccaacagaaagtcaagaaacagatgcagtcagacccacataagctggactttggactgaaacctgagttcctgagccgccctccaggccccagtctttttggagccatccaccacccccatgacctggcacggccttcaactttgttctctgccgctggtgctgcacacccaactgggaccccttttgggccacctcctcatcacagcaacttcctcaaccctgctgcccacctagagccttttaatcggccgtctacattcacaggcctagcagcagttggtggcaatgccttcgggggacttggaaatccttccgttacacccaactcaatgttcggccacaaggatggccccagtgtgcagaactttagcaaccctcacgaaccctggaaccggctgcaccgaacgcctccgtcgttcccgacccctccgccctggctgaagccaggggagctggagcgcagcgcgtccgctgcagctcatgacagagatagagatgtagataaacgagactcatctgttagtaaagatgacaaagaaagggaaagcgtcgagaagagacactccagccacccttcaccagcacctgtcctcccggtgaatgccctgggacatacccgcagctccactgaacagatccgggctcatctgaacactgaggctcgggagaaggacaaacccaaagagagggagagagaccactcggaatcccgcaaggacctggccgccgacgagcacaaggcgaaagagggccacctgcccgagaaggacgggcacggccacgaggggcgcgccgcgggcgaagaggccaagcagctggcccgggtgccgtctccctacgtgcggaccccggtggtggagagtgccaggcccaacagcacctcgagccgggaggccgagccgcgcaagggtgagccggcctacgagaaccccaagaagagctccgaggtcaaggtgaaggaggagcggaaggaagaccatgacctgcctccagaggccccgcagacccaccgggcctcggagccgccgcctcccaactcctcgtccagcgtgcacccggggcccctggcctcgatgcccatgacggtgggggtgacgggcattcaccccatgaacagcatcagcagcctggacaggactcgcatgatgacccccttcatgggcatcagccccctcccgggcggagagcgcttcccgtacccttctttccactgggaccccatccgggaccccttgagggatccttaccgagaacttgacattcaccggagagacccgctgggcagggacttcctgctaaggaacgacccgctccaccggctctcgactccccggctgtacgaagccgaccgctccttcagggaccgggagcctcacgactacagccaccaccaccaccaccaccaccacccgctgtctgtggaccctcggcgggagcacgagcggggaggccacctggacgagcgggagcgcttgcacatgctcagagaagactacgagcacacgcggctccactccgtgcaccccgcctccctcgacggacacctcccccaccccagcctcatcaccccgggactccccagcatgcactatccccgcatcagccccaccgcgggcaaccagaacggactcctcaacaagacccctccgacagcagcgctgagcgcacctcccccgctcatctccacgctggggggccgcccggtctctcccagaaggacgactcctctgtccgcagagataagggagaggcccccttcccacacgctgaaggatatcgaggcccgataagccgagaacaggagcaagaacgaggaagaagaaaccctaggcagacaccaggccaggcttgagagacagaactcctgcatggctcacacagactgggggggaaagccccaccccttccccttgtaaaaaatgtatagactcagtgcacattttgaaatgttttgtatattatatgttgagatttttcagatcttttagcccagtcatatgttctcacgtctcctactttttgtttctcgtataaaactttttgatttgaaccaaaacagtgaagatgacaacacacaccaattggatgataattgtagcgggggcggtgggggggagaagtccacgccatccatcatgcaaaattctttcagatgaggtgggaaggccgtgtacatagttatgtaaaaagagattgcttcatgagctaatggttcatatatgcaaaagggtaagatgaaagctttactttgtacaaatgtaaatagataaagtaacataatacattaatacttcttaaaatgtgctatttgcaaacttacttaatatcagtgaacacagtcggctaaagctgtgttcccatatattgttatagacagctaaacccttcaactatgcaatgaatgttcgggcttttcacaaaagcccgcctaactcaaaggagccttttcaaatccatttacagcatacttaaggtcatattttccctgaacaagcgcttacgtgatatgactctgttttccttgcttgttttttttcaaacggagaaacatcctgttttgcaaattggaccccaggctggaacttagcatctgaagttgccgcttgtgggctctgggggaaagtgtagccccggagaggtaactgaggacatgagcaaccagtgccagggagggtgggatttgccagatgccaaaatcaggggacgggtggtggtgtctgtcagacacacacaggtcgccagtgacttcacacacacctcatgtgagaaccatgccttttttagtgtgtcctatttcatacctgtacacacttcctcgttttgtaatgagatttacttacacccaaacagatcctgaaagaaagcttcaagttttctcagatgatggatatgttttcactgtattcaataactgacggatgtaaggtgcacgtttcctgatgtgacgcactgtattccagctggtgatcaagtctgggaacagccgtaacaggtcaaccttgtggagccatcgcgagttagagggtgaaagatggcagaaaaaaaagtcttgtgtgtgagtgtgttttttgagtttgcatcaatcttaatgtctcttcataatacttttataatacattaagcctcttgtctacatatttggagagaatatgactttactagcagagaaatacaatatatcttgtctactggactgtaaaatatatgtatgaaataaaattagttccatttggtcttctagtatattaaagtgctatctgacgttgttatcctgtttttgcaaaaaaaaaaaaaaaaaaaagttaactacagaccattgtttctaataagcagagagatctattttagtagtaaactgaaggtttagttgtgagcttcagattttgtgaactccagatgttgtgcggtgtttttttttttttttaagacaacaactaaaaaaaatgcaaggaatatgtacactggaactgtagtggtagctttcagtattgtaaagagattgttctatacggacctttttgctgtttatcctgtatgtaataaagtcctttctagatcctatgtgaaaagaaaagtgaagcaactgaatcttcagcatgttctcatcggcggagccttcttgtgtaatgtaaactgtgccatgttattaaaaaatgtgaactaagcttccagctgcttgtttgtgtgaggtgaccatcattaccttagggaagaagccatacctgtacaagaccgggctcttgaaaagaaacacctcgaacccagcccgtgtaagaacagaaggctcacctgcagtggctgaccaccctacccaactcggttagtgtctcaccaatttgttactataaacatttgcacccca

SEQ ID NO: 110381 - DNA, 5950 bp, Homo sapiens
  Payload ID: 1659
  Gene Symbol: AUTS2
  Gene Name: autism susceptibility candidate 2
  Uniprot ID: Q8WXX7
  ENST ID: ENST00000406775
  CDS Start-End: 736-4443
cgctcgcagtttcgccctctcttccgctaatgattgcattattatgctcccctctctggggggtctcgcccctcttgggtcgctccggagccccggcctcccctggctgcatttcttaaaaatttgggagcctgggagtgagttttctccgaggcgtgtgtgagaggcggcgggggtgttttcctgcgcgaggggcgggtgaagttcattgcccccacttttcccgcgacctttttcggacccgattttggatcgagttgaggggggcgcgggcgttttcggggggcggggggcgcggcggagaatggccgcggggagggctccccggagcctcccagtctcttgatcaaagcattccgctattctgatttattgcttgcttggtgagttatttttttttcctctaaaggagacctgtgtgttcagccattactttgctcggcgctgctcccaggcatctccgaccctcggtgctgtggggagccccacacttgggctcctcgcctctcgccctcgctccccgtccctcctcccctctctccgccccttcccccttttctttctcctctctttcttcccctctctcccttctttcggccgccgtctcccccgcgccctcctcggggcggagggaagccgtgaagggggagggagggctcggtgtcaatttttttttgtgtggctgcggccgtagcctgtggcgggcaagcggggagaccccggcgcagcagaaccatggatggcccgacgcggggccatggactccgcaaaaagcggcggtcgcggtcgcagcgagaccgggagaggcgctcccggggcgggctgggggccggcgcggccggcggcggcggggctggccggacccgggcgctctcactcgcctcgtcgtcgggctccgacaaggaagacaatgggaagcccccgtcctccgccccgtcccggcccagacccccgcggaggaagcggagagagtccacctcggcagaagaggacatcattgatggatttgccatgaccagctttgtcacttttgaagcgctggagaaagatgtagcacttaagcctcaggaacgtgtggagaaacgccagacgcccctgaccaagaagaaacgagaagcacttaccaatggcttgtcctttcattcaaagaagagcagactcagccacccacaccactacagctcagatcgagaaaatgaccgcaatctctgccagcaccttgggaagagaaagaaaatgccgaaggcactcagacagctcaagccaggacagaacagctgcagggacagtgacagtgaaagtgccagtggagaatccaagggcttccaccggagcagctctcgggaaaggctcagtgatagttcagctccttccagcttgggaacaggctacttctgtgacagtgacagtgaccaggaagagaaggcatcagatgccagctctgaaaaactcttcaacactgttattgtaaacaaagatccggagttaggtgttggcacgctaccagaacatgacagccaggatgcagggccgattgtccccaagatatcgggtctagagagaagccaggagaagagccaggactgttgcaaagagccaatctttgagcctgtggtgcttaaagacccctgccctcaggtcgcacagccaataccccagccgcagacggagccccaactccgagctccttctccggaccctgacttggtgcagcgcacagaggccccacctcaacccccacctctgagtacacagccaccacagggccctcctgaggcccagctccagcctgccccgcagcctcaggtgcagaggccacccaggccacagtcccccacccagctgctccatcagaacctcccacctgtgcaggcccacccctctgctcagagcctctcccagccattgtcagcctacaacagcagtagcttaagcctcaacagtttaagcagcagcagaagcagcactccagcgaagactcagcccgccccacctcacatctcccaccacccctctgcctccccgttccccctctccctgcccaaccacagccccctgcacagcttcacacccaccctccagccccccgcacactcacatcaccccaatatgtttgcccctcccactgctctgcctcctccaccaccactgacatcaggaagtctgcaggtggccggacacccggccgggagcacttactcagagcaagacatcttgcgacaggaactgaacactcgttttttggcctctcagagtgctgaccgcggggcttccctgggccctccgccctacctgcggaccgagttccatcagcaccagcaccagcaccagcacacccaccagcacacgcaccagcacaccttcacgccgttcccccacgccatcccacccaccgccatcatgccgacgccagcacctcccatgtttgacaaataccctacaaaagttgacccattctaccggcacagtctcttccattcctatcctcctgcagtgtcgggcatcccccctatgatcccacccactggcccttttggttcactacaaggagcatttcagccgaagttgacagatcctttcagacctatgttaaggaaaccagggaagtggtgtgctatgcatgttcacatcgcctggcagatttaccaccaccaacagaaagtcaagaaacagatgcagtcagacccacataagctggactttggactgaaacctgagttcctgagccgccctccaggccccagtctttttggagccatccaccacccccatgacctggcacggccttcaactttgttctctgccgctggtgctgcacacccaactgggaccccttttgggccacctcctcatcacagcaacttcctcaaccctgctgcccacctagagccttttaatcggccgtctacattcacaggcctagcagcagttggtggcaatgccttcgggggacttggaaatccttccgttacacccaactcaatgttcggccacaaggatggccccagtgtgcagaactttagcaaccctcacgaaccctggaaccggctgcaccgaacgcctccgtcgttcccgacccctccgccctggctgaagccaggggagctggagcgcagcgcgtccgctgcagctcatgacagagatagagatgtagataaacgagactcatctgttagtaaagatgacaaagaaagggaaagcgtcgagaagagacactccagccacccttcaccagcacctgtcctcccggtgaatgccctgggacatacccgcagctccactgaacagatccgggctcatctgaacactgaggctcgggagaaggacaaacccaaagagagggagagagaccactcggaatcccgcaaggacctggccgccgacgagcacaaggcgaaagagggccacctgcccgagaaggacgggcacggccacgaggggcgcgccgcgggcgaagaggccaagcagctggcccgggtgccgtctccctacgtgcggaccccggtggtggagagtgccaggcccaacagcacctcgagccgggaggccgagccgcgcaagggtgagccggcctacgagaaccccaagaagagctccgaggtcaaggtgaaggaggagcggaaggaagaccatgacctgcctccagaggccccgcagacccaccgggcctcggagccgccgcctcccaactcctcgtccagcgtgcacccggggcccctggcctcgatgcccatgacggtgggggtgacgggcattcaccccatgaacagcatcagcagcctggacaggactcgcatgatgacccccttcatgggcatcagccccctcccgggcggagagcgcttcccgtacccttctttccactgggaccccatccgggaccccttgagggatccttaccgagaacttgacattcaccggagagacccgctgggcagggacttcctgctaaggaacgacccgctccaccggctctcgactccccggctgtacgaagccgaccgctccttcagggaccgggagcctcacgactacagccaccaccaccaccaccaccaccacccgctgtctgtggaccctcggcgggagcacgagcggggaggccacctggacgagcgggagcgcttgcacatgctcagagaagactacgagcacacgcggctccactccgtgcaccccgcctccctcgacggacacctcccccaccccagcctcatcaccccgggactccccagcatgcactatccccgcatcagccccaccgcgggcaaccagaacggactcctcaacaagacccctccgacagcagcgctgagcgcacctcccccgctcatctccacgctggggggccgcccggtctctcccagaaggacgactcctctgtccgcagagataagggagaggcccccttcccacacgctgaaggatatcgaggcccgataagccgagaacaggagcaagaacgaggaagaagaaaccctaggcagacaccaggccaggcttgagagacagaactcctgcatggctcacacagactgggggggaaagccccaccccttccccttgtaaaaaatgtatagactcagtgcacattttgaaatgttttgtatattatatgttgagatttttcagatcttttagcccagtcatatgttctcacgtctcctactttttgtttctcgtataaaactttttgatttgaaccaaaacagtgaagatgacaacacacaccaattggatgataattgtagcgggggcggtgggggggagaagtccacgccatccatcatgcaaaattctttcagatgaggtgggaaggccgtgtacatagttatgtaaaaagagattgcttcatgagctaatggttcatatatgcaaaagggtaagatgaaagctttactttgtacaaatgtaaatagataaagtaacataatacattaatacttcttaaaatgtgctatttgcaaacttacttaatatcagtgaacacagtcggctaaagctgtgttcccatatattgttatagacagctaaacccttcaactatgcaatgaatgttcgggcttttcacaaaagcccgcctaactcaaaggagccttttcaaatccatttacagcatacttaaggtcatattttccctgaacaagcgcttacgtgatatgactctgttttccttgcttgttttttttcaaacggagaaacatcctgttttgcaaattggaccccaggctggaacttagcatctgaagttgccgcttgtgggctctgggggaaagtgtagccccggagaggtaactgaggacatgagcaaccagtgccagggagggtgggatttgccagatgccaaaatcaggggacgggtggtggtgtctgtcagacacacacaggtcgccagtgacttcacacacacctcatgtgagaaccatgccttttttagtgtgtcctatttcatacctgtacacacttcctcgttttgtaatgagatttacttacacccaaacagatcctgaaagaaagcttcaagttttctcagatgatggatatgttttcactgtattcaataactgacggatgtaaggtgcacgtttcctgatgtgacgcactgtattccagctggtgatcaagtctgggaacagccgtaacaggtcaaccttgtggagccatcgcgagttagagggtgaaagatggcagaaaaaaaagtcttgtgtgtgagtgtgttttttgagtttgcatcaatcttaatgtctcttcataatacttttataatacattaagcctcttgtctacatatttggagagaatatgactttactagcagagaaatacaatatatcttgtctactggactgtaaaatatatgtatgaaataaaattagttccatttggtcttctagtatattaaagtgctatctgacgttgttatcctgtttttgcaaaaaaaaaaaaaaaa

SEQ ID NO: 110382 - DNA, 957 bp, Homo sapiens
  Payload ID: 1659
  Gene Symbol: AUTS2
  Gene Name: autism susceptibility candidate 2
  Uniprot ID: Q8WXX7
  ENST ID: ENST00000403018
  CDS Start-End: 44-844
agcctgtggcgggcaagcggggagaccccggcgcagcagaaccatggatggcccgacgcggggccatggactccgcaaaaagcggcggtcgcggtcgcagcgagaccgggagaggcgctcccggggcgggctgggggccggcgcggccggcggcggcggggctggccggacccgggcgctctcactcgcctcgtcgtcgggctccgacaaggaagacaatgggaagcccccgtcctccgccccgtcccggcccagacccccgcggaggaagcggagagagtccacctcggcagaagaggacatcattgatggatttgccatgaccagctttgtcacttttgaagcgctggagaaagatgtagcacttaagcctcaggaacgtgtggagaaacgccagacgcccctgaccaagaagaaacgagaagcacttaccaatggcttgtcctttcattcaaagaagagcagactcagccacccacaccactacagctcagatcgagaaaatgaccgcaatctctgccagcaccttgggaagagaaagaaaatgccgaaggcactcagacagctcaagccaggacagaacagctgcagggacagtgacagtgaaagtgccagtggagaatccaagggcttccaccggagcagctctcgggaaaggctcagtgatagttcagctccttccagcttgggaacaggctacttcagatcagggaagatgtgccttggagaggaagcatgtcttaaatctggaaatgatatgaagagggatgtcagcaacacttcatcctgggccagtaatagggagagtttcttttctctcgtcaaattgcttaaaggattctagttccgtttggtgtggtcactcacatttgaattctaatactctatgtgatatagattctgttgactactgttagcgtgaccccaatgagaaattaaacacttccctccttttca

SEQ ID NO: 110383 - DNA, 550 bp, Homo sapiens
  Payload ID: 1659
  Gene Symbol: AUTS2
  Gene Name: autism susceptibility candidate 2
  ENST ID: ENST00000418686
  CDS Start-End: 1-550
acgttatggagaggagttattctacatctcactgccccgataaatgagtctcttcctaataaagagccttttaatcggccgtctacattcacaggcctagcagcagttggtggcaatgccttcgggggacttggaaatccttccgttacacccaactcaatgttcggccacaaggatggccccagtgtgcagaactttagcaaccctcacgaaccctggaaccggctgcaccgaacgcctccgtcgttcccgacccctccgccctggctgaagccaggggagctggagcgcagcgcgtccgctgcagctcatgacagagatagagatgtagataaacgagactcatctgttagtaaagatgacaaagaaagggaaagcgtcgagaagagacactccagccacccttcaccagcacctgtcctcccggtgaatgccctgggacatacccgcagctccactgaacagatccgggctcatctgaacactgaggctcgggagaaggacaaacccaaagagagggagagagaccactcggaatcccgcaaggacc

SEQ ID NO: 110384 - DNA, 542 bp, Homo sapiens
  Payload ID: 1659
  Gene Symbol: AUTS2
  Gene Name: autism susceptibility candidate 2
  ENST ID: ENST00000443672
  CDS Start-End: 1-542
tgtttgcccctcccactgctctgcctcctccaccaccactgacatcaggaagtctgcaggtggccggacacccggccgggagcacttactcagagcaagacatcttgcgacaggaactgaacactcgttttttggcctctcagagtgctgaccgcggggcttccctgggccctccgccctacctgcggaccgagttccatcagcaccagcaccagcaccagcacacccaccagcacacgcaccagcacaccttcacgccgttcccccacgccatcccacccaccgccatcatgccgacgccagcacctcccatgctcttccattcctatcctcctgcagtgtcgggcatcccccctatgatcccacccactggcccttttggttcactacaaggagcatttcagccgaagacatccaaccctatcgatgtcgctgctcggcctgggacagtcccacacactttactccaaaaggacccgaggttgacagatcctttcagacctatgttaaggaaaccagggaagtggtgtgctatgcatgtt

SEQ ID NO: 110385 - DNA, 595 bp, Homo sapiens
  Payload ID: 1659
  Gene Symbol: AUTS2
  Gene Name: autism susceptibility candidate 2
  ENST ID: ENST00000416482
  CDS Start-End: 1-595
ctctttttctcctggtgctttccagagcctttggagacctgtgccgggggtggggcttggagctcccgtgccgatggttaaagatccggagttaggtgttggcacgctaccagaacatgacagccaggatgcagggccgattgtccccaagatatcgggtctagagagaagccaggagaagagccaggactgttgcaaagagccaatctttgagcctgtggtgcttaaagacccctgccctcaggtcgcacagccaataccccagccgcagacggagccccaactccgagctccttctccggaccctgacttggtgcagcgcacagaggccccacctcaacccccacctctgagtacacagccaccacagggccctcctgaggcccagctccagcctgccccgcagcctcaggtgcagaggccacccaggccacagtcccccacccagctgctccatcagaacctcccacctgtgcaggcccacccctctgctcagagcctctcccagccattgtcagcctacaacagcagtagcttaagcctcaacagtttaagcagcagaagcagcactccagcgaagactcagcccgcccca

SEQ ID NO: 110386 - DNA, 565 bp, Homo sapiens
  Payload ID: 1659
  Gene Symbol: AUTS2
  Gene Name: autism susceptibility candidate 2
  ENST ID: ENST00000449547
  CDS Start-End: 1-302
tggactttggactgaaacctgagttcctgagccgccctccaggccccagtctttttggagccatccaccacccccatgacctggcacggccttcaactttgttctctgccgctggtgctgcacacccaactgggaccccttttgggccacctcctcatcacagcaacttcctcaaccctgctgcccacctagagccttttaatcggccgtctacattcacaggcctagcagcagttggtggcaatgccttcgggggacttggaaatccttccgttactcccaataatatgtattcattttaactctgaatgctgttaaaagttttttgggaaagcgtcgagaagagacactccagccacccttcaccagcacctgtcctcccggtgaatgccctgggacatacccgcagctccactgaacagatccgggctcatctgaacactgaggctcgggagaaggacaaacccaaagagagggagagagaccactcggaatcccgcaaggacctggccgccgacgagcacaaggcgaaagagggccacctgcccgagaaggacgggcacgg

SEQ ID NO: 110387 - DNA, 449 bp, Homo sapiens
  Payload ID: 1659
  Gene Symbol: AUTS2
  Gene Name: autism susceptibility candidate 2
  ENST ID: ENST00000439256
  CDS Start-End: 1-188
ttgacagatcctttcagacctatgttaaggaaaccagggaagtggtgtgctatgcatgttcacatcgcctggcagatttaccaccaccaacagaaagtcaaggtcagtccgaccttcgtggtgtagggaagaatgggatgcacataaacagatgcagtcagacccacataagctggactttggactgaaacctgagttcctgagccgccctccaggccccagtctttttggagccatccaccacccccatgacctggcacggccttcaactttgttctctgccgctggtgctgcacacccaactgggaccccttttgggccacctcctcatcacagcaacttcctcaaccctgctgcccacctagagccttttaatcggccgtctacattcacaggcctagcagcagttggtggcaatgccttcgggggacttggaaatccttccgtta

SEQ ID NO: 110388 - DNA, 4583 bp, Homo sapiens
  Payload ID: 1659
  Gene Symbol: AUTS2
  Gene Name: autism susceptibility candidate 2
  ENST ID: ENST00000611706
  CDS Start-End: 57-3092
aggcatcagatgccagctctgaaaaactcttcaacactgttattgtaaacaaagatccggagttaggtgttggcacgctaccagaacatgacagccaggatgcagggccgattgtccccaagatatcgggtctagagagaagccaggagaagagccaggactgttgcaaagagccaatctttgagcctgtggtgcttaaagacccctgccctcaggtcgcacagccaataccccagccgcagacggagccccaactccgagctccttctccggaccctgacttggtgcagcgcacagaggccccacctcaacccccacctctgagtacacagccaccacagggccctcctgaggcccagctccagcctgccccgcagcctcaggtgcagaggccacccaggccacagtcccccacccagctgctccatcagaacctcccacctgtgcaggcccacccctctgctcagagcctctcccagccattgtcagcctacaacagcagtagcttaagcctcaacagtttaagcagcagcagaagcagcactccagcgaagactcagcccgccccacctcacatctcccaccacccctctgcctccccgttccccctctccctgcccaaccacagccccctgcacagcttcacacccaccctccagccccccgcacactcacatcaccccaatatgtttgcccctcccactgctctgcctcctccaccaccactgacatcaggaagtctgcaggtggccggacacccggccgggagcacttactcagagcaagacatcttgcgacaggaactgaacactcgttttttggcctctcagagtgctgaccgcggggcttccctgggccctccgccctacctgcggaccgagttccatcagcaccagcaccagcaccagcacacccaccagcacacgcaccagcacaccttcacgccgttcccccacgccatcccacccaccgccatcatgccgacgccagcacctcccatgtttgacaaataccctacaaaagttgacccattctaccggcacagtctcttccattcctatcctcctgcagtgtcgggcatcccccctatgatcccacccactggcccttttggttcactacaaggagcatttcagccgaagacatccaaccctatcgatgtcgctgctcggcctgggacagtcccacacactttactccaaaaggacccgaggttgacagatcctttcagacctatgttaaggaaaccagggaagtggtgtgctatgcatgttcacatcgcctggcagatttaccaccaccaacagaaagtcaagaaacagatgcagtcagacccacataagctggactttggactgaaacctgagttcctgagccgccctccaggccccagtctttttggagccatccaccacccccatgacctggcacggccttcaactttgttctctgccgctggtgctgcacacccaactgggaccccttttgggccacctcctcatcacagcaacttcctcaaccctgctgcccacctagagccttttaatcggccgtctacattcacaggcctagcagcagttggtggcaatgccttcgggggacttggaaatccttccgttacacccaactcaatgttcggccacaaggatggccccagtgtgcagaactttagcaaccctcacgaaccctggaaccggctgcaccgaacgcctccgtcgttcccgacccctccgccctggctgaagccaggggagctggagcgcagcgcgtccgctgcagctcatgacagagatagagatgtagataaacgagactcatctgttagtaaagatgacaaagaaagggaaagcgtcgagaagagacactccagccacccttcaccagcacctgtcctcccggtgaatgccctgggacatacccgcagctccactgaacagatccgggctcatctgaacactgaggctcgggagaaggacaaacccaaagagagggagagagaccactcggaatcccgcaaggacctggccgccgacgagcacaaggcgaaagagggccacctgcccgagaaggacgggcacggccacgaggggcgcgccgcgggcgaagaggccaagcagctggcccgggtgccgtctccctacgtgcggaccccggtggtggagagtgccaggcccaacagcacctcgagccgggaggccgagccgcgcaagggtgagccggcctacgagaaccccaagaagagctccgaggtcaaggtgaaggaggagcggaaggaagaccatgacctgcctccagaggccccgcagacccaccgggcctcggagccgccgcctcccaactcctcgtccagcgtgcacccggggcccctggcctcgatgcccatgacggtgggggtgacgggcattcaccccatgaacagcatcagcagcctggacaggactcgcatgatgacccccttcatgggcatcagccccctcccgggcggagagcgcttcccgtacccttctttccactgggaccccatccgggaccccttgagggatccttaccgagaacttgacattcaccggagagacccgctgggcagggacttcctgctaaggaacgacccgctccaccggctctcgactccccggctgtacgaagccgaccgctccttcagggaccgggagcctcacgactacagccaccaccaccaccaccaccaccacccgctgtctgtggaccctcggcgggagcacgagcggggaggccacctggacgagcgggagcgcttgcacatgctcagagaagactacgagcacacgcggctccactccgtgcaccccgcctccctcgacggacacctcccccaccccagcctcatcaccccgggactccccagcatgcactatccccgcatcagccccaccgcgggcaaccagaacggactcctcaacaagacccctccgacagcagcgctgagcgcacctcccccgctcatctccacgctggggggccgcccggtctctcccagaaggacgactcctctgtccgcagagataagggagaggcccccttcccacacgctgaaggatatcgaggcccgataagccgagaacaggagcaagaacgaggaagaagaaaccctaggcagacaccaggccaggcttgagagacagaactcctgcatggctcacacagactgggggggaaagccccaccccttccccttgtaaaaaatgtatagactcagtgcacattttgaaatgttttgtatattatatgttgagatttttcagatcttttagcccagtcatatgttctcacgtctcctactttttgtttctcgtataaaactttttgatttgaaccaaaacagtgaagatgacaacacacaccaattggatgataattgtagcgggggcggtgggggggagaagtccacgccatccatcatgcaaaattctttcagatgaggtgggaaggccgtgtacatagttatgtaaaaagagattgcttcatgagctaatggttcatatatgcaaaagggtaagatgaaagctttactttgtacaaatgtaaatagataaagtaacataatacattaatacttcttaaaatgtgctatttgcaaacttacttaatatcagtgaacacagtcggctaaagctgtgttcccatatattgttatagacagctaaacccttcaactatgcaatgaatgttcgggcttttcacaaaagcccgcctaactcaaaggagccttttcaaatccatttacagcatacttaaggtcatattttccctgaacaagcgcttacgtgatatgactctgttttccttgcttgttttttttcaaacggagaaacatcctgttttgcaaattggaccccaggctggaacttagcatctgaagttgccgcttgtgggctctgggggaaagtgtagccccggagaggtaactgaggacatgagcaaccagtgccagggagggtgggatttgccagatgccaaaatcaggggacgggtggtggtgtctgtcagacacacacaggtcgccagtgacttcacacacacctcatgtgagaaccatgccttttttagtgtgtcctatttcatacctgtacacacttcctcgttttgtaatgagatttacttacacccaaacagatcctgaaagaaagcttcaagttttctcagatgatggatatgttttcactgtattcaataactgacggatgtaaggtgcacgtttcctgatgtgacgcactgtattccagctggtgatcaagtctgggaacagccgtaacaggtcaaccttgtggagccatcgcgagttagagggtgaaagatggcagaaaaaaaagtcttgtgtgtgagtgtgttttttgagtttgcatcaatcttaatgtctcttcataatacttttataatacattaagcctcttgtctacatatttggagagaatatgactttactagcagagaaatacaatatatcttgtctactggactgtaaaatatatgtatgaaataaaattagttccatttggtcttctagtatattaaagtgctatctgacgttgttatcctgtttttgc

SEQ ID NO: 110389 - DNA, 4511 bp, Homo sapiens
  Payload ID: 1659
  Gene Symbol: AUTS2
  Gene Name: autism susceptibility candidate 2
  ENST ID: ENST00000615871
  CDS Start-End: 57-3020
aggcatcagatgccagctctgaaaaactcttcaacactgttattgtaaacaaagatccggagttaggtgttggcacgctaccagaacatgacagccaggatgcagggccgattgtccccaagatatcgggtctagagagaagccaggagaagagccaggactgttgcaaagagccaatctttgagcctgtggtgcttaaagacccctgccctcaggtcgcacagccaataccccagccgcagacggagccccaactccgagctccttctccggaccctgacttggtgcagcgcacagaggccccacctcaacccccacctctgagtacacagccaccacagggccctcctgaggcccagctccagcctgccccgcagcctcaggtgcagaggccacccaggccacagtcccccacccagctgctccatcagaacctcccacctgtgcaggcccacccctctgctcagagcctctcccagccattgtcagcctacaacagcagtagcttaagcctcaacagtttaagcagcagcagaagcagcactccagcgaagactcagcccgccccacctcacatctcccaccacccctctgcctccccgttccccctctccctgcccaaccacagccccctgcacagcttcacacccaccctccagccccccgcacactcacatcaccccaatatgtttgcccctcccactgctctgcctcctccaccaccactgacatcaggaagtctgcaggtggccggacacccggccgggagcacttactcagagcaagacatcttgcgacaggaactgaacactcgttttttggcctctcagagtgctgaccgcggggcttccctgggccctccgccctacctgcggaccgagttccatcagcaccagcaccagcaccagcacacccaccagcacacgcaccagcacaccttcacgccgttcccccacgccatcccacccaccgccatcatgccgacgccagcacctcccatgtttgacaaataccctacaaaagttgacccattctaccggcacagtctcttccattcctatcctcctgcagtgtcgggcatcccccctatgatcccacccactggcccttttggttcactacaaggagcatttcagccgaagttgacagatcctttcagacctatgttaaggaaaccagggaagtggtgtgctatgcatgttcacatcgcctggcagatttaccaccaccaacagaaagtcaagaaacagatgcagtcagacccacataagctggactttggactgaaacctgagttcctgagccgccctccaggccccagtctttttggagccatccaccacccccatgacctggcacggccttcaactttgttctctgccgctggtgctgcacacccaactgggaccccttttgggccacctcctcatcacagcaacttcctcaaccctgctgcccacctagagccttttaatcggccgtctacattcacaggcctagcagcagttggtggcaatgccttcgggggacttggaaatccttccgttacacccaactcaatgttcggccacaaggatggccccagtgtgcagaactttagcaaccctcacgaaccctggaaccggctgcaccgaacgcctccgtcgttcccgacccctccgccctggctgaagccaggggagctggagcgcagcgcgtccgctgcagctcatgacagagatagagatgtagataaacgagactcatctgttagtaaagatgacaaagaaagggaaagcgtcgagaagagacactccagccacccttcaccagcacctgtcctcccggtgaatgccctgggacatacccgcagctccactgaacagatccgggctcatctgaacactgaggctcgggagaaggacaaacccaaagagagggagagagaccactcggaatcccgcaaggacctggccgccgacgagcacaaggcgaaagagggccacctgcccgagaaggacgggcacggccacgaggggcgcgccgcgggcgaagaggccaagcagctggcccgggtgccgtctccctacgtgcggaccccggtggtggagagtgccaggcccaacagcacctcgagccgggaggccgagccgcgcaagggtgagccggcctacgagaaccccaagaagagctccgaggtcaaggtgaaggaggagcggaaggaagaccatgacctgcctccagaggccccgcagacccaccgggcctcggagccgccgcctcccaactcctcgtccagcgtgcacccggggcccctggcctcgatgcccatgacggtgggggtgacgggcattcaccccatgaacagcatcagcagcctggacaggactcgcatgatgacccccttcatgggcatcagccccctcccgggcggagagcgcttcccgtacccttctttccactgggaccccatccgggaccccttgagggatccttaccgagaacttgacattcaccggagagacccgctgggcagggacttcctgctaaggaacgacccgctccaccggctctcgactccccggctgtacgaagccgaccgctccttcagggaccgggagcctcacgactacagccaccaccaccaccaccaccaccacccgctgtctgtggaccctcggcgggagcacgagcggggaggccacctggacgagcgggagcgcttgcacatgctcagagaagactacgagcacacgcggctccactccgtgcaccccgcctccctcgacggacacctcccccaccccagcctcatcaccccgggactccccagcatgcactatccccgcatcagccccaccgcgggcaaccagaacggactcctcaacaagacccctccgacagcagcgctgagcgcacctcccccgctcatctccacgctggggggccgcccggtctctcccagaaggacgactcctctgtccgcagagataagggagaggcccccttcccacacgctgaaggatatcgaggcccgataagccgagaacaggagcaagaacgaggaagaagaaaccctaggcagacaccaggccaggcttgagagacagaactcctgcatggctcacacagactgggggggaaagccccaccccttccccttgtaaaaaatgtatagactcagtgcacattttgaaatgttttgtatattatatgttgagatttttcagatcttttagcccagtcatatgttctcacgtctcctactttttgtttctcgtataaaactttttgatttgaaccaaaacagtgaagatgacaacacacaccaattggatgataattgtagcgggggcggtgggggggagaagtccacgccatccatcatgcaaaattctttcagatgaggtgggaaggccgtgtacatagttatgtaaaaagagattgcttcatgagctaatggttcatatatgcaaaagggtaagatgaaagctttactttgtacaaatgtaaatagataaagtaacataatacattaatacttcttaaaatgtgctatttgcaaacttacttaatatcagtgaacacagtcggctaaagctgtgttcccatatattgttatagacagctaaacccttcaactatgcaatgaatgttcgggcttttcacaaaagcccgcctaactcaaaggagccttttcaaatccatttacagcatacttaaggtcatattttccctgaacaagcgcttacgtgatatgactctgttttccttgcttgttttttttcaaacggagaaacatcctgttttgcaaattggaccccaggctggaacttagcatctgaagttgccgcttgtgggctctgggggaaagtgtagccccggagaggtaactgaggacatgagcaaccagtgccagggagggtgggatttgccagatgccaaaatcaggggacgggtggtggtgtctgtcagacacacacaggtcgccagtgacttcacacacacctcatgtgagaaccatgccttttttagtgtgtcctatttcatacctgtacacacttcctcgttttgtaatgagatttacttacacccaaacagatcctgaaagaaagcttcaagttttctcagatgatggatatgttttcactgtattcaataactgacggatgtaaggtgcacgtttcctgatgtgacgcactgtattccagctggtgatcaagtctgggaacagccgtaacaggtcaaccttgtggagccatcgcgagttagagggtgaaagatggcagaaaaaaaagtcttgtgtgtgagtgtgttttttgagtttgcatcaatcttaatgtctcttcataatacttttataatacattaagcctcttgtctacatatttggagagaatatgactttactagcagagaaatacaatatatcttgtctactggactgtaaaatatatgtatgaaataaaattagttccatttggtcttctagtatattaaagtgctatctgacgttgttatcctgtttttgc

SEQ ID NO: 110390 - DNA, 3600 bp, Homo sapiens
  Payload ID: 1660
  Gene Symbol: AMFR
  Gene Name: autocrine motility factor receptor, E3 ubiquitin protein ligase
  Uniprot ID: Q9UKV5
  ENST ID: ENST00000290649
  CDS Start-End: 212-2143
ctcttccgcgccggcaggggcagcagcgggagcagcgcggggcggagcggcgccagcagccaggagcggcccggcccggcccggcgcggcggcggcggcggcagcggcagcggcagcgacgccagagcccgtgggcgccgttcgcgaggccgccgcagaggcccggccgcagcgcagggaagcctgggggccagaggtcgccgctgccgccatgccgctgctcttcctcgagcgcttcccctggcccagcctccgcacctacacgggcctcagcggcctggccctgctgggcaccatcatcagcgcctaccgcgcgctcagccagcccgaggccggccccggcgagccggaccagctaacggcctcgctgcagcctgagccgccggcgcccgcccggccgagcgccgggggaccccgggcccgcgatgtggcccagtacctgctctcagacagcctcttcgtgtgggttctagtaaataccgcttgctgtgttttgatgttggtggctaagctcatccagtgtattgtgtttggccctcttcgagtgagtgagagacagcatctcaaagacaaattttggaattttattttctacaagttcattttcatctttggtgtgctgaatgtccagacagtggaagaggtggtcatgtggtgcctctggtttgccggacttgtctttctgcacctgatggttcagctctgcaaggatcgatttgaatatctttccttctcgcccaccacgccgatgagcagccacggtcgagtcctgtccctgttggttgccatgctgctttcctgctgtggactggcggccgtctgctccatcaccggctacacccacggaatgcacaccttggctttcatggctgcagagtctcttcttgtgacagtgaggactgctcatgtgattttacgatacgtaattcacctctgggacctcaaccacgaagggacgtgggaaggaaaggggacgtatgtctattacacagactttgtcatggagctcactctcctgtccctggacctcatgcaccatattcacatgttgttatttggcaacatctggttatccatggccagcctggtcatctttatgcagctgcgttacctgtttcatgaggtgcaacgtcgaattcgtcggcacaagaactatctacgtgtggttggaaacatggaggccaggtttgcagttgcaactccagaggagctggctgtcaacaatgacgactgtgccatctgttgggactccatgcaggctgcgcggaaactgccctgtggacatcttttccacaactcctgtcttcgttcctggctagaacaagacacctcctgtccaacatgcagaatgtctcttaatattgccgacaataatcgtgtcagggaagaacatcaaggagagaacttggatgagaatttggttcctgtagcagcagccgaagggagacctcgcttaaaccaacacaatcacttcttccatttcgatgggtctcggattgcgagctggctgccgagtttttcggttgaagtgatgcacaccaccaacattcttggcattacgcaggccagcaactcccagctcaatgcaatggctcatcagattcaagagatgtttccccaggttccataccatctggtactgcaggacctccagctgacacgctcagttgaaataacaacagacaatattttagaaggacggattcaagtaccttttcctacacagcggtcagatagcatcagacctgcattgaacagtcctgtggaaaggccaagcagtgaccaggaagagggagaaacttctgctcagaccgagcgtgtgccactggacctcagtcctcgcctggaggagacgctggacttcggcgaggtggaagtggagcccagtgaggtggaagacttcgaggctcgtgggagccgcttctccaagtctgctgatgagagacagcgcatgctggtgcagcgtaaggacgaactcctccagcaagctcgcaaacgtttcttgaacaaaagttctgaagatgatgcggcctcagagagcttcctcccctcggaaggtgcgtcctctgaccccgtgaccctgcgtcgaaggatgctggctgccgccgcggaacggaggcttcagaagcagcagacctcctagcgctcccttgccttcctcagctgcctcctgcgccctgtgcccgactgactggaggaggcctgtcccaattctgcccgctccatggaaaagcgggcttgactgcattgccgctgtataaagcatgtggtcttatagtgtttggacagctgataaatttaatccttctttgtaatactttctatgtgacatttctcttccccttagaaacactgcaaattttaactgtaggtatgatctcttctggtgttgactggactgcttggggtgggggacgatcaggaggaagtgagcagtcgcctgcctgcagcaggcagcttctactcctgcctcatgcgtacgtcccacaaatgcaggtgtcctgagcaccacacccagtgggaagagtgtgggggaggcgcacagtgtgagcccgcccccacgtcgtggggtaacatctgttatcaaactgctgtcgttgttgtggaagcatgtagactgtgccagaggccagacccacgggctcatgcacccctgagccagcagggcatcttggaaaaggaactcttggttcgatacctggagcagaggaggggaaagtccagggctatagggtgtgatgaagtcacccctttctgtcccactacatctgggactgactttccgagcctccagtccaaagccggcttgatttccgtgaactctggtgctcctgcatctcatgagtgtgccccatgggtcccctcccctctcagcatttccttgtcccgtctggacctggggagtggttaggcagcaagctttggtttatggttttcattcattggtgaagtaaattaggcagtgctaaagcctgtgggtttggtccttgaacaagatgtgggccttgcaagatgggagagtaaaccttgaagggctttattaaagaaataaaaaagaacttttgtatcttttatcctgggagcactgcgttttcctagctgtgttattcctggtttaattcagcagagaaggtaaggtgtgaacctacctgccttggagagggcccaggtcccaaatctcttcaaattcttcacatgtttaactttaaggatttgaaccatgaagtcataggttacagacctcagttttatgccccattggattactttttttttttttttttttttttttttttttactctttgaaagctttgttttgtggtagtccttttgggaagaatccagtattatccacaattattggcaaagtttaaatgtattttacataacggaaagtttttagaatgttgaaaagtaattgaaaaaggtgataggtaaatttttaggcaaagataatttatttcaataaatctttcaaaagccttaccttgaaatgctgttagtaaatttctgtgatttttttttttaatttgttttgctgagagcatagctatttgtttttattgtaaaacaataataataataaaaagcaaactcta

SEQ ID NO: 110391 - DNA, 567 bp, Homo sapiens
  Payload ID: 1660
  Gene Symbol: AMFR
  Gene Name: autocrine motility factor receptor, E3 ubiquitin protein ligase
  ENST ID: ENST00000563664
  CDS Start-End: 72-567
aacatcgcgtggggttgcgaggaggaggccccgaggggcaggttctagtaaataccgcttgctgtgttttgatgttggtggctaagctcatccagtgtattgtgtttggccctcttcgagtgagtgagagacagcatctcaaagacaaattttggaattttattttctacaagttcattttcatctttggtgtgctgaatgtccagacagtggaagaggtggtcatgtggtgcctctggtttgccggacttgtctttctgcacctgatggttcagctctgcaaggatcgatttgaatatctttccttctcgcccaccacgccgatgagcagccacggtcgagtcctgtccctgttggttgccatgctgctttcctgctgtggactggcggccgtctgctccatcaccggctacacccacggaatgcacaccttggctttcatggctgcagagtctcttcttgtgacagtgaggactgctcatgtgattttacgatacgtaattcacctctgggacctcaaccacgaagggacgtgggaaggaaaggggacgtatgtctattacacag

SEQ ID NO: 110392 - DNA, 866 bp, Homo sapiens
  Payload ID: 1660
  Gene Symbol: AMFR
  Gene Name: autocrine motility factor receptor, E3 ubiquitin protein ligase
  ENST ID: ENST00000567738
  CDS Start-End: 1-866
tggttatccatggccagcctggtcatctttatgcagctgcgttacctgtttcatgaggtgcaacgtcgaattcgtcggcacaagaactatctacgtgtggttggaaacatggaggccaggtttgcagttgcaactccagaggagctggctgtcaacaatgacgactgtgccatctgttgggactccatgcaggctgcgcggaaactgccctgtggacatcttttccacaactcctgtcttcgttcctggctagaacaagacacctcctgtccaacatgcagaatgtctcttaatattgccgacaataatcgtgtcagggaagaacatcaaggagagaacttggatgagaatttggttcctgtagcagcagccgaagggagacctcgcttaaaccaacacaatcacttcttccatttcgatggagatgacagctccatgcgtgttactgcccctgaagacgttccagtgggacaggaggtggaggtggtcgacagtgatactgatgctcctgacctgtggtctcggattgcgagctggctgccgagtttttcggttgaagtgatgcacaccaccaacattcttggcattacgcaggccagcaactcccagctcaatgcaatggctcatcagattcaagagatgtttccccaggttccataccatctggtactgcaggacctccagctgacacgctcagttgaaataacaacagacaatattttagaaggacggattcaagtaccttttcctacacagcggtcagatagcatcagacctgcattgaacagtcctgtggaaaggccaagcagtgaccaggaagagggagaaacttctgctcagaccgagcgtgtgccactggacctcag

SEQ ID NO: 110393 - DNA, 803 bp, Homo sapiens
  Payload ID: 1660
  Gene Symbol: AMFR
  Gene Name: autocrine motility factor receptor, E3 ubiquitin protein ligase
  ENST ID: ENST00000565445
  CDS Start-End: 116-803
ctaggggcccctccgccagggacccccgagggcgagcgcctggggggcgcggccttgctcgcgggagcgctgctgagggagagtggttctagtaaataccgcttgctgtgttttgatgttggtggctaagctcatccagtgtattgtgtttggccctcttcgagtgagtgagagacagcatctcaaagacaaattttggaattttattttctacaagttcattttcatctttggtgtgctgaatgtccagacagtggaagaggtggtcatgtggtgcctctggtttgccggacttgtctttctgcacctgatggttcagctctgcaaggatcgatttgaatatctttccttctcgcccaccacgccgatgagcagccacggtcgagtcctgtccctgttggttgccatgctgctttcctgctgtggactggcggccgtctgctccatcaccggctacacccacggaatgcacaccttggctttcatggctgcagagtctcttcttgtgacagtgaggactgctcatgtgattttacgatacgtaattcacctctgggacctcaaccacgaagggacgtgggaaggaaaggggacgtatgtctattacacagactttgtcatggagctcactctcctgtccctggacctcatgcaccatattcacatgttgttatttggcaacatctggttatccatggccagcctggtcatctttatgcagctgcgttacctgtttcatgaggtgcaacgtcgaattcgtcggcacaagaactatctacgtgtggttggaaacatggaggcca

SEQ ID NO: 110394 - DNA, 2249 bp, Homo sapiens
  Payload ID: 1660
  Gene Symbol: AMFR
  Gene Name: autocrine motility factor receptor, E3 ubiquitin protein ligase
  ENST ID: ENST00000492830
  CDS Start-End: 1-900
tatttggcaacatctggttatccatggccagcctggtcatctttatgcagctgcgttacctgtttcatgaggtgcaacgtcgaattcgtcggcacaagaactatctacgtgtggttggaaacatggaggccaggtttgcagttgcaactccagaggagctggctgtcaacaatgacgactgtgccatctgttgggactccatgcaggctgcgcggaaactgccctgtggacatcttttccacaaggtctcggattgcgagctggctgccgagtttttcggttgaagtgatgcacaccaccaacattcttggcattacgcaggccagcaactcccagctcaatgcaatggctcatcagattcaagagatgtttccccaggttccataccatctggtactgcaggacctccagctgacacgctcagttgaaataacaacagacaatattttagaaggacggattcaagtaccttttcctacacagcggtcagatagcatcagacctgcattgaacagtcctgtggaaaggccaagcagtgaccaggaagagggagaaacttctgctcagaccgagcgtgtgccactggacctcagtcctcgcctggaggagacgctggacttcggcgaggtggaagtggagcccagtgaggtggaagacttcgaggctcgtgggagccgcttctccaagtctgctgatgagagacagcgcatgctggtgcagcgtaaggacgaactcctccagcaagctcgcaaacgtttcttgaacaaaagttctgaagatgatgcggcctcagagagcttcctcccctcggaaggtgcgtcctctgaccccgtgaccctgcgtcgaaggatgctggctgccgccgcggaacggaggcttcagaagcagcagacctcctagcgctcccttgccttcctcagctgcctcctgcgccctgtgcccgactgactggaggaggcctgtcccaattctgcccgctccatggaaaagcgggcttgactgcattgccgctgtataaagcatgtggtcttatagtgtttggacagctgataaatttaatccttctttgtaatactttctatgtgacatttctcttccccttagaaacactgcaaattttaactgtaggtatgatctcttctggtgttgactggactgcttggggtgggggacgatcaggaggaagtgagcagtcgcctgcctgcagcaggcagcttctactcctgcctcatgcgtacgtcccacaaatgcaggtgtcctgagcaccacacccagtgggaagagtgtgggggaggcgcacagtgtgagcccgcccccacgtcgtggggtaacatctgttatcaaactgctgtcgttgttgtggaagcatgtagactgtgccagaggccagacccacgggctcatgcacccctgagccagcagggcatcttggaaaaggaactcttggttcgatacctggagcagaggaggggaaagtccagggctatagggtgtgatgaagtcacccctttctgtcccactacatctgggactgactttccgagcctccagtccaaagccggcttgatttccgtgaactctggtgctcctgcatctcatgagtgtgccccatgggtcccctcccctctcagcatttccttgtcccgtctggacctggggagtggttaggcagcaagctttggtttatggttttcattcattggtgaagtaaattaggcagtgctaaagcctgtgggtttggtccttgaacaagatgtgggccttgcaagatgggagagtaaaccttgaagggctttattaaagaaataaaaaagaacttttgtatcttttatcctgggagcactgcgttttcctagctgtgttattcctggtttaattcagcagagaaggtaaggtgtgaacctacctgccttggagagggcccaggtcccaaatctcttcaaattcttcacatgtttaactttaaggatttgaaccatgaagtcataggttacagacctcagttttatgccccattggattactttttttttttttttttttttttttttttttactctttgaaagctttgttttgtggtagtccttttgggaagaatccagtattatccacaattattggcaaagtttaaatgtattttacataacggaaagtttttagaatgttgaaaagtaattgaaaaaggtgataggtaaatttttaggcaaagataatttatttcaataaatctttcaaaagccttaccttg

SEQ ID NO: 110395 - DNA, 2257 bp, Homo sapiens
  Payload ID: 1661
  Gene Symbol: AIRE
  Gene Name: autoimmune regulator
  Uniprot ID: O43918
  ENST ID: ENST00000291582
  CDS Start-End: 128-1765
agacgggcgggcgcacagccggcgcggaggccccacagccccgccgggacccgaggccaagcgaggggctgccagtgtcccgggacccaccgcgtccgccccagccccgggtccccgcgcccaccccatggcgacggacgcggcgctacgccggcttctgaggctgcaccgcacggagatcgcggtggccgtggacagcgccttcccactgctgcacgcgctggctgaccacgacgtggtccccgaggacaagtttcaggagacgcttcatctgaaggaaaaggagggctgcccccaggccttccacgccctcctgtcctggctgctgacccaggactccacagccatcctggacttctggagggtgctgttcaaggactacaacctggagcgctatggccggctgcagcccatcctggacagcttccccaaagatgtggacctcagccagccccggaaggggaggaagcccccggccgtccccaaggctttggtaccgccacccagactccccaccaagaggaaggcctcagaagaggctcgagctgccgcgccagcagccctgactccaaggggcaccgccagcccaggctctcaactgaaggccaagccccccaagaagccggagagcagcgcagagcagcagcgccttccactcgggaacgggattcagaccatgtcagcttcagtccagagagctgtggccatgtcctccggggacgtcccgggagcccgaggggccgtggaggggatcctcatccagcaggtgtttgagtcaggcggctccaagaagtgcatccaggttggcggggagttctacactcccagcaagttcgaagactccggcagtgggaagaacaaggcccgcagcagcagtggcccgaagcctctggttcgagccaagggagcccagggcgctgcccccggtggaggtgaggctaggctgggccagcagggcagcgttcccgcccctctggccctccccagtgacccccagctccaccagaagaatgaggacgagtgtgccgtgtgtcgggacggcggggagctcatctgctgtgacggctgccctcgggccttccacctggcctgcctgtcccctccgctccgggagatccccagtgggacctggaggtgctccagctgcctgcaggcaacagtccaggaggtgcagccccgggcagaggagccccggccccaggagccacccgtggagaccccgctccccccggggcttaggtcggcgggagaggaggtaagaggtccacctggggaacccctagccggcatggacacgactcttgtctacaagcacctgccggctccgccttctgcagccccgctgccagggctggactcctcggccctgcaccccctactgtgtgtgggtcctgagggtcagcagaacctggctcctggtgcgcgttgcggggtgtgcggagatggtacggacgtgctgcggtgtactcactgcgccgctgccttccactggcgctgccacttcccagccggcacctcccggcccgggacgggcctgcgctgcagatcctgctcaggagacgtgaccccagcccctgtggagggggtgctggcccccagccccgcccgcctggcccctgggcctgccaaggatgacactgccagtcacgagcccgctctgcacagggatgacctggagtcccttctgagcgagcacaccttcgatggcatcctgcagtgggccatccagagcatggcccgtccggcggcccccttcccctcctgaccccagatggccgggacatgcagctctgatgagagagtgctgagaaggacacctccttcctcagtcctggaagccggccggctgggatcaagaaggggacagcgccacctcttgtcagtgctcggctgtaaacagctctgtgtttctggggacaccagccatcatgtgcctggaaattaaaccctgccccacttctctactctggaagtccccgggagcctctccttgcctggtgacctactaaaaatataaaaattagctgggtgtggtggtgggtgcctgtaatcccagctacatgggagcctgaggcatgagaatcacttgaactcgggaggtggaggttgcagtgagctgagattgcgccactgcactccagtctggtcggcaagagtgagactccgtctcaaaaacaaaacaaaacaaaaaaaccacataacataaatttatcatctcgaccacttttcagttcagtggcattcacatctcatgtaa

SEQ ID NO: 110396 - DNA, 3033 bp, Homo sapiens
  Payload ID: 1662
  Gene Symbol: ATG10
  Gene Name: autophagy related 10
  Uniprot ID: Q9H0Y0
  ENST ID: ENST00000282185
  CDS Start-End: 295-957
agtgcgcacgctccgactcggccgtggcggacctgactgaaggaggccgcggacctgactgaaggaggccacggccacttctggttggcctcggggcgcgctggctcggctcttcctccgccctcgaggcccccgcagtcccatcattcagttccgtagggtcaccggcgcggcagtggcctcgcagggcgctgggtccctctccccagctctcctccccctggccccgtcgccccgccctcgccgggctgggctgcggggtcaggggccgagcggagagggttatcatttaacatggaagaagatgagttcattggagaaaaaacattccaacgttattgtgcagaattcattaaacattcacaacagataggtgatagttgggaatggagaccatcaaaggactgttctgatggctacatgtgcaaaatacactttcaaattaagaatgggtctgtgatgtcacatctaggagcatctacccatggacagacatgtcttcccatggaggaggctttcgagctacccttggatgattgtgaagtgattgaaactgcagcagcgtccgaagtgattaaatatgagtatcatgtcttatattcctgtagctaccaagtgcctgtactttactttagggcaagctttttagatgggagacctttaactctgaaggacatatgggaaggagttcatgagtgctataagatgcgactgctacagggaccatgggacactattacgcaacaggaacatccaatacttgggcaacccttttttgtacttcatccctgcaagacgaatgaattcatgactcctgtattaaagaattctcagaaaatcaataagaatgtcaactatatcacatcatggctgagcattgtagggccagttgttgggctgaatctacctctgagttatgccaaagcaacgtctcaggatgaacgaaatgtcccttaacaagattcttctattgagtttaggaattgcggcacgaagaatgccaagagtttacctggccagccctggctttaataggactgataccatggaatatttcatctcaccaagatgtgacatggattatttttcccttggacacaaatgtctacagcaactggtgtttgataggctgaatgtttagaagaaacacttcaaagggatacatcatggccaggcatggtggctcacacctgtaatccaagcactttgggaggccaaggtgggagcatcacttgatcctgggagttcgagaccagcctgggcaacatggtgaaaccctgtcggtacaaaaaaatacaaaaatttgcctgtttatggtggtgtgttcctgtagtcccagctccccaggaggctgaggtgggaggttggctttaacccaggaggcagaggttgcagtgagctgagactgtgccactgcagtccagcctgggtgacagagccagacactgtctcggggaaaaaaaaaaaaaaaaaaagacacatcactataaatagcaaaaaaacaaatctaacttattaatactaggaataccaacattattagggcacttgcaggttattcttttctaggccaagtacttcacttccatttgtctgacatggagattgagggagaaatgtatttgtgtgttcattttaatgtaagatatataaaaattaaattactggatttacctgtccctgaaactggtgttataaacatgacctatcttaagtgattttcccacaatcaaactcaggaacaatagattatttctgttttactccaaaagagagagagagagtgagtgtgagtgtgtgtgtgtgtgtgtgtgtatgtgtgggtgtttgtgtagatagttgtaaaacaaagaaaaaacacaatattttactgtgagataatatgttttaccagcaaagtgtggcatagtaattagaagttttctaaaaagctataggagatatttaaacattaaaatttctttttgacctatagtaataaaacaatggtcattttacccctctgcttctcaaccccacagctgctctgctgtactctttgagggctcttgagcgagtcttcatgtccctgagacttattttcctcatctttaatttgaaactaacaagctacctcatagggttgctgtgagaaccacatgagatcattaatgcatgataagatattgtaaagtattatacgaatattcattaaatgctcacctttcttgtatataattggtattcactaaggctgtaaataagtttcatagccagttaagtattaagataaacctaacctggaacaattttttttttggttgcttgttttgttttttgctttcatttgctaggagctgaaacgaagattaaaatgtcattggctttttagagagtctagattagtgtgtctttgaatgagggatatacttaaaatcacctgaggatcgtttacagctacagatgctggggccacctgacacagtctctctgggggtgattctgctctggagaacctctggtctggatatacctttattgtgacattgatttgtattgttttgctctactgacaggccttttccaatccatacaagctgaacttgcttcctaatgtttgtctaggccttacatggatagtaaggaagcttaggagacatgtacacaaggcagcccacttgtaggaaactgcttcaggtgaggacatcattcaccagtggatcaccgagcaccgtgacagcaccctcagtccacgtctgcagattaagagctgaactctcacagagaaagtggaagtagagaaagggttaattcaaactgctagaaaagctaaaagtaaattttaaaatgctgagctgcccatattcatgctaggatgagagccggcttaaatgcttgctgggcattttggtatttaccacttagcatgttttcaacttctgtgagggattttccccccaatctccctaatgtaaacacagatttctcagcaagtcatttctcaagccatgtcatttctagtgtaaaataaattataataatgtgtcatctgaa

SEQ ID NO: 110397 - DNA, 1438 bp, Homo sapiens
  Payload ID: 1662
  Gene Symbol: ATG10
  Gene Name: autophagy related 10
  Uniprot ID: Q9H0Y0
  ENST ID: ENST00000355178
  CDS Start-End: 295-672
agtgcgcacgctccgactcggccgtggcggacctgactgaaggaggccgcggacctgactgaaggaggccacggccacttctggttggcctcggggcgcgctggctcggctcttcctccgccctcgaggcccccgcagtcccatcattcagttccgtagggtcaccggcgcggcagtggcctcgcagggcgctgggtccctctccccagctctcctccccctggccccgtcgccccgccctcgccgggctgggctgcggggtcaggggccgagcggagagggttatcatttaacatggaagaagatgagttcattggagaaaaaacattccaacgttattgtgcagaattcattaaacattcacaacagataggtgatagttgggaatggagaccatcaaaggactgttctgatggctacatgtgcaaaatacactttcaaattaagaatgggtctgtgatgtcacatctaggagcatctacccatggacagacatgtcttcccatggaggtgaagtcttgctctgtcacccaggctggagtgcagttgcgtgatctcagctcactgcaacctccgccttctgggttcaagcagttctcctgcctcagccttccgagtaactgggactacaggggttcaccactacacctggctaattttttgtatttttagtagagataaggtttcaccatgttggtcaggctggtcttgaactcctgacatcaagtaatccatccgcctcagcctcccaaagtgctgagattacaggcatgagccactgtgcctggccctgagcttaaaataaaagttaaattaaaaaaaaaataatgttgatgttttcatttttgcaatcaatagcttagttagactcaaattgcaaactgtcattgcctgtagtaggcagtggcatagaactcaattcagctcttttaacctgagttttaagctgctttcagattgccccacacatacatggttcaggagtcagccagagacttgggctgagtttaaacatagaatctggggttgtcctcttctggctgtcttctttcttgggcatctgcatcattctctagcacctatggtttttccaggctctttcccccagtttcctccagtcagaaagatggcaagagtttttgctgcctgccctcccccagtccttgtgccaacaccaccaccattgcagctgcctccagggaaaaactgcaaaaaccaaatcacttgctccaggtgttgactcctcttcaaaatctatttttgttaaatctccaaagcctcaaataggttttcttcctagaatttatatctgttatttgtagcaggattggtctgtaaggcactcagtcttctacatcatgggtcagcagattacagcccttgggttaaatccagccacctgcttgttttattaataaagttttgttggaactaaacc

SEQ ID NO: 110398 - DNA, 1795 bp, Homo sapiens
  Payload ID: 1662
  Gene Symbol: ATG10
  Gene Name: autophagy related 10
  Uniprot ID: Q9H0Y0
  ENST ID: ENST00000458350
  CDS Start-End: 404-1066
gcggacctgactgaaggaggccgcggacctgactgaaggaggccacggccacttctggttggcctcggggcgcgctggctcggctcttcctccgccctcgaggcccccgcagtcccatcattcagttccgtagggtcaccggcgcggcagtggcctcgcagggcgctgggtccctctccccagctctcctccccctggccccgtcgccccgccctcgccgggctgggctgcggggtcaggggccgagcggagagggtagagacggggtttcaccgtgttagccaagatggtctcgatctcctgacctcgtgatccgcccgcctcggcctcccaaagtgctgggattacaggcgtgagccactgcgcccggcctgttgtacagttattaaagttatcatttaacatggaagaagatgagttcattggagaaaaaacattccaacgttattgtgcagaattcattaaacattcacaacagataggtgatagttgggaatggagaccatcaaaggactgttctgatggctacatgtgcaaaatacactttcaaattaagaatgggtctgtgatgtcacatctaggagcatctacccatggacagacatgtcttcccatggaggaggctttcgagctacccttggatgattgtgaagtgattgaaactgcagcagcgtccgaagtgattaaatatgagtatcatgtcttatattcctgtagctaccaagtgcctgtactttactttagggcaagctttttagatgggagacctttaactctgaaggacatatgggaaggagttcatgagtgctataagatgcgactgctacagggaccatgggacactattacgcaacaggaacatccaatacttgggcaacccttttttgtacttcatccctgcaagacgaatgaattcatgactcctgtattaaagaattctcagaaaatcaataagaatgtcaactatatcacatcatggctgagcattgtagggccagttgttgggctgaatctacctctgagttatgccaaagcaacgtctcaggatgaacgaaatgtcccttaacaagattcttctattgagtttaggaattgcggcacgaagaatgccaagagtttacctggccagccctggctttaataggactgataccatggaatatttcatctcaccaagatgtgacatggattatttttcccttggacacaaatgtctacagcaactggtgtttgataggctgaatgtttagaagaaacacttcaaagggatacatcatggccaggcatggtggctcacacctgtaatccaagcactttgggaggccaaggtgggagcatcacttgatcctgggagttcgagaccagcctgggcaacatggtgaaaccctgtcggtacaaaaaaatacaaaaatttgcctgtttatggtggtgtgttcctgtagtcccagctccccaggaggctgaggtgggaggttggctttaacccaggaggcagaggttgcagtgagctgagactgtgccactgcagtccagcctgggtgacagagccagacactgtctcggggaaaaaaaaaaaaaaaaaaagacacatcactataaatagcaaaaaaacaaatctaacttattaatactaggaataccaacattattagggcacttgcaggttattcttttctaggccaagtacttcacttccatttgtctgacatggagattgagggagaaatgtatttgtgtgttcattttaatgtaagatatataaaaattaaattactggatttacctgtccctgaaa

SEQ ID NO: 110399 - DNA, 549 bp, Homo sapiens
  Payload ID: 1662
  Gene Symbol: ATG10
  Gene Name: autophagy related 10
  ENST ID: ENST00000510085
  CDS Start-End: 441-549
gtgcgcacgctccgactcggccgtggcggacctgactgaaggaggccgcggacctgactgaaggaggccacggccacttctggttggcctcggggcgcgctggctcggctcttcctccgccctcgaggcccccgcagtcccatcattcagttccgtagggtcaccggcgcggcagtggcctcgcagggcgctgggtccctctccccagctctcctccccctggccccgtcgccccgccctcgccgggctgggctgcggggtcaggggccgagcggagagggagtcttgctctgtcgcccaggctggagtgcagtggcacgatctcggctcactgcaacctctgcctctcgggttaaagcaattctcctgcctcagcctcccgagttgctgggactacaggtgcccgccaccacgctcagctaatttttttatcatttaacatggaagaagatgagttcattggagaaaaaacattccaacgttattgtgcagaattcattaaacattcacaacagataggtgatagttgggaatggagaccatcaaagg

SEQ ID NO: 110400 - DNA, 813 bp, Homo sapiens
  Payload ID: 1662
  Gene Symbol: ATG10
  Gene Name: autophagy related 10
  ENST ID: ENST00000504770
  CDS Start-End: 59-574
gccctcgccgggctgggctgcggggtcaggggccgagcggagagggttatcatttaacatggaagaagatgagttcattggagaaaaaacattccaacgttattgtgcagaattcattaaacattcacaacagataggtgatagttgggaatggagaccatcaaaggactgttctgatggctacatgtgcaaaatacactttcaaattaagaatgggtctgtgatgtcacatctaggagcatctacccatggacagacatgtcttcccatggaggaggctttcgagctacccttggatgattgtgaagtgattgaaactgcagcagcgtccgaagtgattaaatatgagtatcatgtcttatattcctgtagctaccaagtgcctgtactttactttagggcaagctttttagatgggagacctttaactctgaaggacatatgggaaggagttcatgagtgctataagatgcgactgctacagggaccatgggacactattacgcaacagatcttcaccaagaggtgttcagaaggacatatttcagtgacaaagaatattatcccagaatgaatgctgacacatagggaaaaatggaacatccaatacttgggcaacccttttttgtacttcatccctgcaagacgaatgaattcatgactcctgtattaaagaattctcagaaaatcaataagaatgtcaactatatcacatcatggctgagcattgtagggccagttgttgggctgaatctacctctgagttatgccaaagcaacgtctcaggatgaacgaaatgtcccttaacaaggt

SEQ ID NO: 110401 - DNA, 978 bp, Homo sapiens
  Payload ID: 1662
  Gene Symbol: ATG10
  Gene Name: autophagy related 10
  Uniprot ID: Q9H0Y0
  ENST ID: ENST00000513443
  CDS Start-End: 448-825
ccgcagtcccatcattcagttccgtagggtcaccggcgcggcagtggcctcgcagggcgctgggtccctctccccagctctcctccccctggccccgtcgccccgccctcgccgggctgggctgcggggtcaggggccgagcggagaggggtgagtattccccacagcccttgccggttgtctcctcccggctctgcttcccacacggtccttgccccactcctaggacagggaggaagggcacgcgcgggtaggcgggaaacagcccagtcctgaacaaaaggccggggaagcgggtccccgccggtaactgcaggcctgtgctggccgccgcgagcggggaagggcgaggacactccctcctcggggacccggtccccgtcgcgcacacggtgtcaccagcacacctggcccagtacccaaagcaccctcgaattatcatttaacatggaagaagatgagttcattggagaaaaaacattccaacgttattgtgcagaattcattaaacattcacaacagataggtgatagttgggaatggagaccatcaaaggactgttctgatggctacatgtgcaaaatacactttcaaattaagaatgggtctgtgatgtcacatctaggagcatctacccatggacagacatgtcttcccatggaggtgaagtcttgctctgtcacccaggctggagtgcagttgcgtgatctcagctcactgcaacctccgccttctgggttcaagcagttctcctgcctcagccttccgagtaactgggactacaggggttcaccactacacctggctaattttttgtatttttagtagagataaggtttcaccatgttggtcaggctggtcttgaactcctgacatcaagtaatccatccgcctcagcctcccaaagtgctgagattacaggcatgagccactgtgcctggccctgagcttaaaataaaagttaaattaaaaaaaaaa

SEQ ID NO: 110402 - DNA, 618 bp, Homo sapiens
  Payload ID: 1662
  Gene Symbol: ATG10
  Gene Name: autophagy related 10
  ENST ID: ENST00000513634
  CDS Start-End: 14-568
gttatcatttaacatggaagaagatgagttcattggagaaaaaacattccaacgttattgtgcagaattcattaaacattcacaacagataggtgatagttgggaatggagaccatcaaaggactgttctgatggctacatgtgcaaaatacactttcaaattaagaatgggtctgtgatgtcacatctaggagcatctacccatggacagacatgtcttcccatggaggaggctttcgagctacccttggatgattgtgaagtgattgaaactgcagcagcgtccgaagtgattaaatatgagtatcatgtcttatattcctgtagctaccaagtgcctgtactttactttagggcaagctttttagatgggagacctttaactctgaaggacatatgggaaggagttcatgagtgctataagatgcgactgctacagggaccatgggacactattacgcaacaggaacatccaatacttgggcaacccttttttgtacttcatccctgcaagacgaatgaattcatgactcctgtattaaagaattctcagaaaatcaataagtaagaaacaccatcaagatacattggcttctactctgattttaaaagtgtaaa

SEQ ID NO: 110403 - DNA, 1439 bp, Homo sapiens
  Payload ID: 1663
  Gene Symbol: ATG101
  Gene Name: autophagy related 101
  Uniprot ID: Q9BSB4
  ENST ID: ENST00000336854
  CDS Start-End: 479-1135
gcggcttccggtcccggctcagcctccgacccaggtggtctggagcctgccgggagagtggtggcatctgagaggctggtcgtggactgtggttgggggaggtgggagctgttttaaccgtgtgccccctctcctgtgccggcgtgggcatcccccggggcagtggaacgcgggcgctcctccagcttccgagtccagccagcctgggcgcggggcgccgcccccgagacacccgaggagtccgttcctccctggttacgtggactgtggagctggtctcttgtggctcagcgccgtgcggaggttgaagcgtacctgcggaggtcgcaccagggcgtgaggaggaggaggaagggcatgagccgagcttgaggaatccgtgctccaaactctacactcaagggtggcccttgggtagggtgaagatcccctgtctttatcctagttccacaccttggtgtgggttactgggtgcaggatgaactgtcgctcggaggtgctggaggtgtcggtggaggggcggcaggtggaggaggccatgctggctgtgctgcacacggtgcttctgcaccgcagcacaggcaagttccactacaagaaggagggcacctactccattggcaccgtgggcacccaggatgttgactgtgacttcatcgacttcacttatgtgcgtgtctcttctgaggaactggatcgtgccctgcgcaaggttgttggggagttcaaggatgcactgcgcaactctggtggcgatgggctggggcagatgtccttggagttctaccagaagaagaagtctcgctggccattctcagacgagtgcatcccatgggaagtgtggacggtcaaggtgcatgtggtagccctggccacggagcaggagcggcagatctgccgggagaaggtgggtgagaaactctgcgagaagatcatcaacatcgtggaggtgatgaatcggcatgagtacttgcccaagatgcccacacagtcggaggtggataacgtgtttgacacaggcttgcgggacgtgcagccctacctgtacaagatctccttccagatcactgatgccctgggcacctcagtcaccaccaccatgcgcaggctcatcaaagacacccttgccctctgagcgtcgctggatctctgggagctccttgatggctcccagaccttggcttttgggaattgcacttttgggcctttgggctctggaacctgctctgggtcattggtgagacttggaaggggcagcccccgctggcttcttggttttgtggttgccagcctcaggtcatccttttaatctttgctgacggttcagtcctgcctctactgtctctccatagccctggtggggtcccccttctttctccactgtacagaagagccaccactgggatggggaataaagttgagaacatgagtttgggctg

SEQ ID NO: 110404 - DNA, 658 bp, Homo sapiens
  Payload ID: 1663
  Gene Symbol: ATG101
  Gene Name: autophagy related 101
  ENST ID: ENST00000548915
  CDS Start-End: 236-658
ccgggagagtggtggcatctgagaggctgctggtctcttgtggctcagcgccgtgcggaggttgaagcgtacctgcggaggtcgcaccagggcgtgaggaggaggaggaagggcatgagccgagcttgaggaatccgtgctccaaactctacactcaagggtggcccttgggtagggtgaagatcccctgtctttatcctagttccacaccttggtgtgggttactgggtgcaggatgaactgtcgctcggaggtgctggaggtgtcggtggaggggcggcaggtggaggaggccatgctggctgtgctgcacacggtgcttctgcaccgcagcacaggcaagttccactacaagaaggagggcacctactccattggcaccgtgggcacccaggatgttgactgtgacttcatcgacttcacttatgtgcgtgtctcttctgaggaactggatcgtgccctgcgcaaggttgttggggagttcaaggatgcactgcgcaactctggtggcgatgggctggggcagatgtccttggagttctaccagaagaagaagtctcgctggccattctcagacgagtgcatcccatgggaagtgtggacggtcaaggtgcatgtggtagccctggccacggagcaggagcggcagatctgccgg

SEQ ID NO: 110405 - DNA, 846 bp, Homo sapiens
  Payload ID: 1663
  Gene Symbol: ATG101
  Gene Name: autophagy related 101
  ENST ID: ENST00000553049
  CDS Start-End: 276-846
aggtggtctggagcctgccgggagagtggtggcatctgagaggctggtcgtggactgtggttgggggagctggtctcttgtggctcagcgccgtgcggaggttgaagcgtacctgcggaggtcgcaccagggcgtgaggaggaggaggaagggcatgagccgagcttgaggaatccgtgctccaaactctacactcaagggtggcccttgggtagggtgaagatcccctgtctttatcctagttccacaccttggtgtgggttactgggtgcaggatgaactgtcgctcggaggtgctggaggtgtcggtggaggggcggcaggtggaggaggccatgctggctgtgctgcacacggtgcttctgcaccgcagcacaggcaagttccactacaagaaggagggcacctactccattggcaccgtgggcacccaggatgttgactgtgacttcatcgacttcacttatgtgcgtgtctcttctgaggaactggatcgtgccctgcgcaaggttgttggggagttcaaggatgcactgcgcaactctggtggcgatgggctggggcagatgtccttggagttctaccagaagaagaagtctcgctggccattctcagacgagtgcatcccatgggaagtgtggacggtcaaggtgcatgtggtagccctggccacggagcaggagcggcagatctgccgggagaaggtgggtgagaaactctgcgagaagatcatcaacatcgtggaggtgatgaatcggcatgagtacttgcccaagatgcccacacagtcggaggtggataacgtgtttgacacaggcttgcgggacgtgcagccctacctgtaca

SEQ ID NO: 110406 - DNA, 671 bp, Homo sapiens
  Payload ID: 1663
  Gene Symbol: ATG101
  Gene Name: autophagy related 101
  ENST ID: ENST00000550604
  CDS Start-End: 419-671
gctcagcctccgacccaggtggtctggagcctgccgggagagtggtggcatctgagaggctggtcgtggactgtggttgggggaggtgggagctgttttaaccgtgtgccccctctcctgtgccggcgtgggcatcccccggggcagtggaacgcgggcgctcctccagcttccgagtccagccagcctgggcgcggggcgccgcccccgagacacccgaggagtccgttcctccctggttacgtggactgtggaggttcgcgcgtagtggcggcgggggatacgggacccgggcgggaattccttcctgcgtccgtcccgagtctcttgatatggagccaaggtggcccttgggtagggtgaagatcccctgtctttatcctagttccacaccttggtgtgggttactgggtgcaggatgaactgtcgctcggaggtgctggaggtgtcggtggaggggcggcaggtggaggaggccatgctggctgtgctgcacacggtgcttctgcaccgcagcacaggcaagttccactacaagaaggagggcacctactccattggcaccgtgggcacccaggatgttgactgtgacttcatcgacttcacttatgtgcgtgtctcttctgaggaactggatcgtgccctgcgcaaggttgttggggagttcaagg

SEQ ID NO: 110407 - DNA, 1082 bp, Homo sapiens
  Payload ID: 1664
  Gene Symbol: ATG12
  Gene Name: autophagy related 12
  ENST ID: ENST00000379594
  CDS Start-End: 286-513
gtccgagccagcggcctaactggagtgtgcgcattcgaccgagcacagacacgttgcccaccgctcctctcccgaggtctgtagtcgcggagaaacacatgttgcgttactaacgttcagaggtctgcgacagcttcgatttgaatgactagccgggaacaccaagtttcactgtgtaattgcgtccccctactccggcgcctcctttgcgacgctccctggagaaaagcacgcccactgcacgcgctcagtcgctacttccgctctcgagtgtctccaagcaagatggcggaggagccgcagtctgtgttgcagcttcctacttcaattgctgctggaggggaaggacttacggatgtctccccagaaacaaccaccccggagcccccgtcttccgctgcagtttccccgggaacagaggaacctgctggcgacaccaagaaaaaaaatgacagtggtctctggccgggcgcggtggctcactcctgtaatcccagcactttggtaggctgaggcgggtggatcacctgaggtcaagagttcgagaccagcctggccaacatgttgacattttgctaaaggctgtgggagacactcctattatgaaaacaaagaagtgggcagtagagcgaacacgaaccatccaaggactcattgacttcatcaaaaagtttcttaaacttgtggcctcagaacagttgtttatttatgtgaatcagtcctttgctccttccccagaccaagaagttggaactctctatgagtgttttggcagtgatggtaaactggttttacattactgcaagtctcaggcgtggggatgaaccacaaagaaaatcaacttgctactacatgaaatggattttcacggaagagacagctctgaaaagttttgatgcttgtggcaagagacttaacagatgtgatctatttagtatgtgtctactctatgtttatgcataagaaaacatccatagcatgaatggactcagaaaaatgtgatttgtattaatgcaccagtcatcataaaagatggtcatgatagtacacccattgctcctacttgttactattattgctgc

SEQ ID NO: 110408 - DNA, 1558 bp, Homo sapiens
  Payload ID: 1664
  Gene Symbol: ATG12
  Gene Name: autophagy related 12
  ENST ID: ENST00000513322
  CDS Start-End: 272-442
cctaactggagtgtgcgcattcgaccgagcacagacacgttgcccaccgctcctctcccgaggtctgtagtcgcggagaaacacatgttgcgttactaacgttcagaggtctgcgacagcttcgatttgaatgactagccgggaacaccaagtttcactgtgtaattgcgtccccctactccggcgcctcctttgcgacgctccctggagaaaagcacgcccactgcacgcgctcagtcgctacttccgctctcgagtgtctccaagcaagatggcggaggagccgcagtctgtgttgcagcttcctacttcaattgctgctggaggggaaggacttacggatgtctccccagaaacaaccaccccggagcccccgtcttccgctgcagtttccccgggaacagaggaacctgctggcgacaccaagaaaaaaagtaactgaatttatttccgggcagagaggcgggaggttcagattgcatccgagtaggggtggcggccagtaaagaagcaaaatttagaggagcgcctgtcctagacctgcattttgaccagtcatcagaagaaaagaagtgtactttttgatttttaaggcctttaagttgagtgttaaaataccatctctgtctatcggtgtagggcctgatacttggctgccacacttatttttatactgtatttttttgagttggccagactgcgagctctttgaaggagggagggagctgagtggggcggggggaggggggtctcggtaattccaggtacttaacacaggagctaattatttgagtaatgttttatggtggtaggggtggtcattggcaaagcctggattagaattcatgccttccaacttaactcgcttttgcttttttccccctcccagttggttgtgaattcactccttaaaccaaaaaccaaattcttatgcagaatgaagactgctaagggaaagctaaaggcatagatgttacctttttaagaaacacattttggaacctttttgacattttgctaaaggctgtgggagacactcctattatgaaaacaaagaagtgggcagtagagcgaacacgaaccatccaaggactcattgacttcatcaaaaagtttcttaaacttgtggcctcagaacagttgtttatttatgtgaatcagtcctttgctccttccccagaccaagaagttggaactctctatgagtgttttggcagtgatggtaaactggttttacattactgcaagtctcaggcgtggggatgaaccacaaagaaaatcaacttgctactacatgaaatggattttcacggaagagacagctctgaaaagttttgatgcttgtggcaagagacttaacagatgtgatctatttagtatgtgtctactctatgtttatgcataagaaaacatccatagcatgaatggactcagaaaaatgtgatttgtattaatgcaccagtcatcataaaagatggtcatgatagtacacccattgctcctacttgttactattattgctgcagatctgcctccaaggttgaaaaggagactaaga

SEQ ID NO: 110409 - DNA, 4333 bp, Homo sapiens
  Payload ID: 1664
  Gene Symbol: ATG12
  Gene Name: autophagy related 12
  Uniprot ID: O94817
  ENST ID: ENST00000509910
  CDS Start-End: 307-729
ggaaagcggaaacatttctaggtccgagccagcggcctaactggagtgtgcgcattcgaccgagcacagacacgttgcccaccgctcctctcccgaggtctgtagtcgcggagaaacacatgttgcgttactaacgttcagaggtctgcgacagcttcgatttgaatgactagccgggaacaccaagtttcactgtgtaattgcgtccccctactccggcgcctcctttgcgacgctccctggagaaaagcacgcccactgcacgcgctcagtcgctacttccgctctcgagtgtctccaagcaagatggcggaggagccgcagtctgtgttgcagcttcctacttcaattgctgctggaggggaaggacttacggatgtctccccagaaacaaccaccccggagcccccgtcttccgctgcagtttccccgggaacagaggaacctgctggcgacaccaagaaaaaaattgacattttgctaaaggctgtgggagacactcctattatgaaaacaaagaagtgggcagtagagcgaacacgaaccatccaaggactcattgacttcatcaaaaagtttcttaaacttgtggcctcagaacagttgtttatttatgtgaatcagtcctttgctccttccccagaccaagaagttggaactctctatgagtgttttggcagtgatggtaaactggttttacattactgcaagtctcaggcgtggggatgaaccacaaagaaaatcaacttgctactacatgaaatggattttcacggaagagacagctctgaaaagttttgatgcttgtggcaagagacttaacagatgtgatctatttagtatgtgtctactctatgtttatgcataagaaaacatccatagcatgaatggactcagaaaaatgtgatttgtattaatgcaccagtcatcataaaagatggtcatgatagtacacccattgctcctacttgttactattattgctgcagatctgcctccaaggttgaaaaggagactaagactgtataaacatcttcattgtcagttctcaaaatgactgaaattgttttcatggtaaaagttaatatactaaagggttcctttttttttaatgtttacatttatctctatgtttacctttttagtcacattgacctgctggctgaatacctcaaatagtccagtagagggcagtccaccaggcagaaaaggttaggcgttttggtttcacatctttgctggggaataataggggaaatggctgtttttgctaatttttagctaatatctagccaggagagcaagcacataggacagactgaaagactgtaattttacacaatacacatggcttaattattttattgggatacagaaaaatataaattctggacaaataagtcatatacctgttttcagtcctaacatttaaggattcttgagtcccaatcacataactgtggtgttactctgtcatttatatggtgtcaaaagcacttgatgagtaaacccagtagcatctttttgagtgtttcataatgcattttccaacttgaaaacaataattgaaaaatagccttattgtatattttatgccatgactaaaagtgccatttttactgatgctattagactgataatttcttgaagtgaaatttaacctttttttctctttagtattatgtttataatgccatatttttagaaagcattccagatcaggcatggtggcttacacctgtaatcccagcactttggaaggctgaggtgtggggattgcgtgaagccacaagtttgagaccagcctggttagcaaggcaagatccccaactctacaaaaaaataaaaattaaaaaaaaattattaggctgcagaggcaagaggatcccctgagcccagaagttcaagggtatagtgagtcgtgattgtaccactgcattcctgctgagcaacagagtgagaccccatctcaaaaaagaaaaaaaaaggcattctagtaaatcgaatgtaatgtgaatggaatttcaaaacaggatctaagatggtatgtagtagaattcaaagtaatatcattttaaagttaaatgagtatggaaaaggtctgttctctagttttgtccagttcagtttactgaaggaatatatttaattatattcatatatttaacaaataaaaatatgttgaattttcgtattgtttgccactgagggttcagatgatagacctcaaaaaatcgaaaatactggttgaaatttgtagcatccatttagttattctttttgacctaaataacttaatagtttattaaatctaaggttagctaaatatgtagctaaccttatttgttttctttcctaacaactctgaagaatacataggactttgcactttttttttttttttttttttttaaagagacagcgtttcggtcttgttgcccaggctggactgtaatggcacaatcttggctcattgcaacctctacctcccgggttcaagtgattctcctgcctcagcctcctgagtagctgggattacaggcacctgccaccacacccgcctaattttttgttatttttagtggagacagggttttaccattttggccaggctggtctcaaactcctgactgacctcaggtgatccacccgccttggcctcccaaagtgctgggattataggtgtgagccaccgtgccgggcctggactttgtactttttcaaatcatatttaattatttcttgatctttactcaaagaattattctgcgctaaatttgcaacattaaacaataattaagcctggatccgataagttattgggtgactagaacctacaacacaatttatttttaatttaaactctcaagtctgattaaacttgggggaaaaactgaacattcaggtgatattttaaattttctttgtgactaaatagatgtcattaatatcatgcttcatcttactgtgcatagatgacccatggcacacaaagtatatgtataatattgcaatattgtacttccatctttaaaagtatgccaaagacttcataatgaattcaccatatttaaggaataaggcaaattaatgtttatccgaaatcaaaatgagattggataattcctggaatctgatttctgtaagtttcagtcctaaagggaccttaaatatctactagaacgaagtacagtgtatttctcagattacatgacattagtcaaccaatttagttgtaacacaaagtgagaaagccttaggtgttgaaggagtgtgaaaataaaaatctcttttcatgcagtttctgcttcattttccaaggattataatatgctgagtaaacttttggcactaaggaagccagctacaggccacgtaatgaaaactattcagaaaacagttcagcaaatactactatttgaatacagttcaaatcgtatttatataaatactctgcctacattatttaacccaaactggattattcaccattctttgaagatgccttgtgttttctgttatctacttctgctcgtgcagtttacttacaccttcaccctttcaaatcctaactcttcttcaaggcctgattcagattttaactttttaaaggctatctgaatcattcaaggagaagataccctttctctcataaaaacacttagagcaaactaccactattaaatcacttattgcatactgcctcagagccatgtgtccagttattctggtttttatctggtacccacacacacataatacttagtacatttccttatatgtaaataattagtaatgtaacacatcgagtgaatgaaattgtgattagcaaagtatgacagctaaaaacaaaggaaattttgtatagtttaagtttttgtacagcagaaggtaatggaaaatatttgcaacatatgacagtgtttttaatgtcttaagtatatgaagaatttgtttcaattggtaagaaaagaccaactgaaaaataggcaaaacataccaaatttcgattcacaaaaagatacaaatggccaacaaaacatgaaacaccttgaaccccattggttacaaaaaatacaaataaaaacaatgctgactgacaataaaaataatgtacatcttgctattagcagagttgtggggaaatcctgtcatattttggtgaatagaatatgagttggtatatcacttttagggggccatttggcaatatcaaaaaccttgaaacgtaagtataaacttcagtttgttcgtataacctgtcattcacatattgagtgcctactatgtcctaaatattggaataacactaataaagctcataagagactaa

SEQ ID NO: 110410 - DNA, 1430 bp, Homo sapiens
  Payload ID: 1664
  Gene Symbol: ATG12
  Gene Name: autophagy related 12
  Uniprot ID: O94817
  ENST ID: ENST00000500945
  CDS Start-End: 14-238
gtctccaagcaagatggcggaggagccgcagtctgtgttgcagcttcctacttcaattgctgctggaggggaaggacttacggatgtctccccagaaacaaccaccccggagcccccgtcttccgctgcagtttccccgggaacagaggaacctgctggcgacaccaagaaaaaaatttatttatgtgaatcagtcctttgctccttccccagaccaagaagttggaactctctatgagtgttttggcagtgatggtaaactggttttacattactgcaagtctcaggcgtggggatgaaccacaaagaaaatcaacttgctactacatgaaatggattttcacggaagagacagctctgaaaagttttgatgcttgtggcaagagacttaacagatgtgatctatttagtatgtgtctactctatgtttatgcataagaaaacatccatagcatgaatggactcagaaaaatgtgatttgtattaatgcaccagtcatcataaaagatggtcatgatagtacacccattgctcctacttgttactattattgctgcagatctgcctccaaggttgaaaaggagactaagactgtataaacatcttcattgtcagttctcaaaatgactgaaattgttttcatggtaaaagttaatatactaaagggttcctttttttttaatgtttacatttatctctatgtttacctttttagtcacattgacctgctggctgaatacctcaaatagtccagtagagggcagtccaccaggcagaaaaggttaggcgttttggtttcacatctttgctggggaataataggggaaatggctgtttttgctaatttttagctaatatctagccaggagagcaagcacataggacagactgaaagactgtaattttacacaatacacatggcttaattattttattgggatacagaaaaatataaattctggacaaataagtcatatacctgttttcagtcctaacatttaaggattcttgagtcccaatcacataactgtggtgttactctgtcatttatatggtgtcaaaagcacttgatgagtaaacccagtagcatctttttgagtgtttcataatgcattttccaacttgaaaacaataattgaaaaatagccttattgtatattttatgccatgactaaaagtgccatttttactgatgctattagactgataatttcttgaagtgaaatttaacctttttttctctttagtattatgtttataatgccatatttttagaaagcattccagatcaggcatggtggcttacacctgtaatcccagcactttggaaggctgaggtgtggggattgcgtgaagccacaagtttgagaccagcctggttagcaaggcaagatccccaactctacaaaaaaataaaaattaaaaaaaaa

SEQ ID NO: 110411 - DNA, 732 bp, Homo sapiens
  Payload ID: 1664
  Gene Symbol: ATG12
  Gene Name: autophagy related 12
  ENST ID: ENST00000513167
  CDS Start-End: 1-178
ggagccgcagtctgtgttgcagcttcctacttcaattgctgctggaggggaaggacttacggatgtctccccagaaacaaccaccccggagcccccgtcttccgctgcagtttccccgggaacagaggaacctgctggcgacaccaagaaaaaaattggttgtgaattcactccttaaaccaaaaaccaaattcttatgcagaatgaagactgctaagggaaagctaaaggcatagatgttacctttttaagaaacacattttggaacctttatgacagtggtctctggccgggcgcggtggctcactcctgtaatcccagcactttggtaggctgaggcgggtggatcacctgaggtcaagagttcgagaccagcctggccaacatgttgacattttgctaaaggctgtgggagacactcctattatgaaaacaaagaagtgggcagtagagcgaacacgaaccatccaaggactcattgacttcatcaaaaagtttcttaaacttgtggcctcagaacagttgtttatttatgtgaatcagtcctttgctccttccccagaccaagaagttggaactctctatgagtgttttggcagtgatggtaaactggttttacattactgcaagtctcaggcgtggggatgaaccacaaagaaaatcaacttgctactacatgaaatggattttcacggaagagacagctctgaaaagttttgatgcttgtggcaa

SEQ ID NO: 110412 - DNA, 773 bp, Homo sapiens
  Payload ID: 1664
  Gene Symbol: ATG12
  Gene Name: autophagy related 12
  ENST ID: ENST00000505993
  CDS Start-End: 1-199
gtctccaagcaagatggcggaggagccgcagtctgtgttgcagcttcctacttcaattgctgctggaggggaaggacttacggatgtctccccagaaacaaccaccccggagcccccgtcttccgctgcagtttccccgggaacagaggaacctgctggcgacaccaagaaaaaaattggttgtgaattcactccttaaaccaaaaaccaaattcttatgcagaatgaagactgctaagggaaagctaaaggcatagatgttacctttttaagaaacacattttggaacctttttgacattttgctaaaggctgtgggagacactcctattatgaaaacaaagaagtgggcagtagagcgaacacgaaccatccaaggactcattgacttcatcaaaaagtttcttaaacttgtggcctcagaacagttgtttatttatgtgaatcagtcctttgctccttccccagaccaagaagttggaactctctatgagtgttttggcagtgatggtaaactggttttacattactgcaagtctcaggcgtggggatgaaccacaaagaaaatcaacttgctactacatgaaatggattttcacggaagagacagctctgaaaagttttgatgcttgtggcaagagacttaacagatgtgatctatttagtatgtgtctactctatgtttatgcataagaaaacatccatagcatgaatggactcagaaaaatgtgatttgtattaatgcaccagtcatcataaaagatggtcatgata

SEQ ID NO: 110413 - DNA, 4348 bp, Homo sapiens
  Payload ID: 1665
  Gene Symbol: ATG13
  Gene Name: autophagy related 13
  Uniprot ID: O75143
  ENST ID: ENST00000359513
  CDS Start-End: 309-1862
cgccgggaagcgaccggctgctgggcttaaggcgggagtgaccgcttaaccagtgagggaagcactgaagagcgccagtcgacgtgggtgcgacaactcgcggagtcttaggagcaaaacgtctggggcctgcgagccaggacccttctgaagccttaggtgtctatcggcgacgtgtacggtcactgcagctccggagcgcggaaccctcagccaggaggcgcggctggtcggtcccaggtcccggcctccgtaatgagagcccggaaccactctttgtgccgcagcttcgcagattcctataggcaatggaaactgatctcaattcccaggacagaaaggacctggacaagtttattaaattttttgccctcaagactgtccaagtgattgtccaggctcggcttggtgaaaagatttgcactcgttcatcatcttctccaacgggttcagattggttcaacttagcaatcaaagacatcccagaggttacacatgaagcaaagaaggcactggcaggacagctgcctgcagtcgggaggtccatgtgtgtggagatttcacttaagacttctgagggagattccatggagctggaaatatggtgtcttgaaatgaatgaaaagtgtgataaagaaatcaaagtttcctacacggtgtacaacagactgtcattgctgctgaagtcccttcttgctataactagggtgacaccagcctataggctctccaggaaacaagggcatgaatatgtcatattatacaggatatattttggagaagttcagctgagtggcttaggagaaggcttccagacagttcgtgttgggacagtgggcacccctgtgggcaccatcactctttcttgtgcttacagaattaacttggcattcatgtctaccaggcaatttgagaggaccccacctatcatggggattattattgatcactttgtggaccgtccctatcccagctcctctcccatgcacccctgcaattacagaactgctggtgaggacactggagtaatatacccgtctgtagaagactctcaagaagtgtgtaccacctctttttccacctccccaccatcccagctctcaagctctcgcctttcctatcagcctgctgccctgggcgttggatcagctgacctggcttatccagtagtgtttgctgctggcttaaatgctacacaccctcaccagctgatggttcctgggaaggaaggtggggtaccccttgctcccaaccagcctgtccatggtacccaggctgaccaggagagactggcaacctgcaccccttctgacagaacccactgtgctgccacaccctccagtagtgaggatactgaaaccgtatcaaacagcagtgagggacgggcctcccctcacgatgtcttggagaccatctttgtccgaaaagtgggggcttttgtcaacaaacccattaaccaggtgaccctgacgagtttggatataccctttgccatgtttgctcccaagaatttggagctggaggataccgatccaatggtgaatcctccagattccccagagactgaatctcctctccagggcagcctgcactcagatggctccagcgggggcagcagtggcaatacccatgatgactttgttatgatagactttaaaccagctttttctaaagatgacattcttccgatggacctggggaccttctatcgggagtttcagaacccacctcagctgagcagcctctccatagatattggagcacagtccatggctgaagacttggactcattaccagagaagctggctgtgcatgagaagaatgtccgcgagtttgatgcctttgtggaaaccctgcagtaaaagtatccttgagtcccagcagcaccccctttttgtggccccagggcataagcagcctcccatgcatcagctgctcccacccctcatcctgctctgagccaggtggaagggaggctggcttctcccatggggacccagaagtccctactcttggacctcctggagactccgtggcggcagtcaagcccagtgcccagttggagaagactcacgtgctggccttggagatgggaagaaccttcgtacgaaaaagccctcagcagggccatctgtgtgccctgcccatcaccaactgcttcccaagggtgtcatcctgttcctcctgctgccggcctcctgcctgggcctgccttgcagctggccccttccctgcctgctgtcaccatccactgtttgacattccagctggtggccaagagattggtgtggagtcgcagaaagaggaaggagacagtgccaggaggaagaaggaaggagtcccttagctctcttcattgtcccctttacttcctgctatcttcttctcctcttcttctctctcttgcctctatgcctgtatttctggcaatatgacaggcctgcctacccaagatcagaactccaaaaccactcccacccctgaaggtcgggagggtctgagcagccctggtggctgcctgtgctcaggtcctcagctccatgggaaataaaaatggcaccctgaatctctaggattttgtcacttggagtcacagcaaagttctcttcctcttgtccccccgttgctgctccttggttatagaacatggtaaatatttattactttcagagaaaccagatattttatagaggaaatatgtttgaggtgagttgtttttcacttggagaaggcggagggctcttcctgggacggagacctcctcctccggaggttattgagaatccgggctgctgctttgaggatcttcccaccatacagacagcgagatccaagaagagggctggccgggggcaaagtcacctcccagtgtggctgcactggaactgactaaaggctttaccttggatagttgcgtattcctggtgagagccttacatctcccacagtttctgcagagtgactgactccattctggcagcccaggaagtcctgggtgctaaatgtgatggccacatgtagtggttaggggatgttgtgtgtgtcccccaactgcctgggtacttgttcctgatccctggggctgtcctgtggagcttttcctcctgcttgggcctagctaccatctccctctaatcccaggttctctacactgccctggggtttaccagctggattggcttctggttgagaaatcaaagctgggcgtatgattgacttaacccttcaggtattgttacttgaataagtcaagtgcctagcctcacccacctatgatctgtcctttcccagcctcgctggtagtcctggtcaaggagatctaggtctactccattcctcctggcccacctggggcattcactggcagcagctgtgcttcagtggagcaggtggttctcagctgcttgttagtatactgcatgtgacactgttcccacatacaaggctgacttctgaggattggagcaggctctggcggggaccagagctctgcgtgctgctgctgccaccaagaagtgttagcagaagcagtagcagccaactggccctcctgactttggcccagagcacatgcgtggcttgctgaacccaggctcaggtttatccccaaggccccagctttgagaagggggaaggcccctggtaagttattgatgcccccatatttcagctactgctctctttccaaggccttgcatggaaaggcctagccattgtctgaggcagcaatctttggcatctacaggtggcagcagcctttcaccagggctccatctgtgaagagtctcagccatgactttgagctgagcttgggagaagtaaagcaactgttaaggccagcccttgcccctcagacctgccatgaaaggaatgagccctagactgactcctgcagcacccccgggacaggctgggaccagctgtttgtctccaggtgtcagagtccctcctcctcctccaacctctccaacctactttgtttggaaataccgagctacacttcaaaatgtattcaagggatttccaataaatttttttctgtactttacagcctcctgtcctgtaggttgtctgaagacctcgtaaccccttccccacccctgccccagtgcaggtctgggaaaggggagagtggtgcgttgtgaagcgcagaaagacctcaagtgtctgggcaagcctgttttgagtcgggtgtggcctcttaggggctgtataccctggggtttcctgggtcaggaaacttcttagtatttctctttccctggtcccctatcaggggcttgaatttgaatattcagttggagaatgcatttaaaatacacccatagtaaaatctccataaaatgca

SEQ ID NO: 110414 - DNA, 937 bp, Homo sapiens
  Payload ID: 1665
  Gene Symbol: ATG13
  Gene Name: autophagy related 13
  ENST ID: ENST00000395549
  CDS Start-End: 342-937
ggagcgcggaaccctcagccaggaggcgcggctggtcggtcccaggtcccggcctccgtaatgagagcccggaaccactctttgtgccgcagcttcgcaggtgagggtgactgttgactagtgaaaaaagggacccatggttcacgactgtcttcttactggcagtggaacgacctgtggaaacctgtgatccattctcattaaataaatctctggtcattctgctatgatatagaacactggaacttattcctcctatctaactgtggccttgtacctgctgaccaatttctcaccatcaacctacaccctacttccccatcctctgattcctataggcaatggaaactgatctcaattcccaggacagaaaggacctggacaagtttattaaattttttgccctcaagactgtccaagtgattgtccaggctcggcttggtgaaaagatttgcactcgttcatcatcttctccaacgggttcagattggttcaacttagcaatcaaagacatcccagaggttacacatgaagcaaagaaggcactggcaggacagctgcctgcagtcgggaggtccatgtgtgtggagatttcacttaagacttctgagggagattccatggagctggaaatatggtgtcttgaaatgaatgaaaagtgtgataaagaaatcaaagtttcctacacggtgtacaacagactgtcattgctgctgaagtcccttcttgctataactagggtgacaccagcctataggctctccaggaaacaagggcatgaatatgtcatattatacaggatatattttggagaagttcagctgagtggcttaggagaaggcttccagacagttcgtgttgggacagtgggcacccctgtgggcaccatcactctttcttgtgcttacagaattaacttggcattcatgtctaccag

SEQ ID NO: 110415 - DNA, 667 bp, Homo sapiens
  Payload ID: 1665
  Gene Symbol: ATG13
  Gene Name: autophagy related 13
  ENST ID: ENST00000529395
  CDS Start-End: 1-237
ccctccagtagtgaggatactgaaaccgtatcaaacagcagtgagggacgggcctcccctcacgatgtcttggagaccatctttgtccgaaaagtgggggcttttgtcaacaaacccattaaccaggtgaccctgacgagtttggatataccctttgccatgtttgctcccaagaatttggagctggaggataccgatccaatggtgagcccaccgttgactacgagttcccagtagatggtgcgctagtcattgttcttcctgagccagagtcactaatcccccacagactataaaccatggcccctcggcttacgggtttgtagccagcattaagttcttcccagaattttcagattgtttacagtaacttgaatctgggtcacagcatcagccctaatcctgccttgctatgaaacaggtgaatcctccagattccccagagactgaatctcctctccagggcagcctgcactcagatggctccagcgggggcagcagtggcaatacccatgatgactttgttatgatagactttaaaccagctttttctaaagatgacattcttccgatggacctggggaccttctatcgggagtttcagaacccacctcagctgagcagcctctccatagatattggagcacagtccatggctgaagacttg

SEQ ID NO: 110416 - DNA, 4199 bp, Homo sapiens
  Payload ID: 1665
  Gene Symbol: ATG13
  Gene Name: autophagy related 13
  Uniprot ID: O75143
  ENST ID: ENST00000526508
  CDS Start-End: 458-2011
gaagcggatgaaaacaaacactaacgatggcggcgccgggaagcgaccggctgctgggcttaaggcgggagtgaccgcttaaccagtgagggaagcactgaagagcgccagtcgacgtgggtgcgacaactcgcggagtcttaggagcaaaacgtctggggcctgcgagccaggacccttctgaagccttaggtgtctatcggcgacgtgtacggtcactgcagctccggagcgcggaaccctcagccaggaggcgcggctggtcggtcccaggtcccggcctccgtaatgagagcccggaaccactctttgtgccgcagcttcgcaggtgagggtgactgttgactagtgaaaaaagggacccatggttcacgactgtcttcttactggcagtggaacgacctgtggaaacctgtgatccattctcattaaataaatctctggattcctataggcaatggaaactgatctcaattcccaggacagaaaggacctggacaagtttattaaattttttgccctcaagactgtccaagtgattgtccaggctcggcttggtgaaaagatttgcactcgttcatcatcttctccaacgggttcagattggttcaacttagcaatcaaagacatcccagaggttacacatgaagcaaagaaggcactggcaggacagctgcctgcagtcgggaggtccatgtgtgtggagatttcacttaagacttctgagggagattccatggagctggaaatatggtgtcttgaaatgaatgaaaagtgtgataaagaaatcaaagtttcctacacggtgtacaacagactgtcattgctgctgaagtcccttcttgctataactagggtgacaccagcctataggctctccaggaaacaagggcatgaatatgtcatattatacaggatatattttggagaagttcagctgagtggcttaggagaaggcttccagacagttcgtgttgggacagtgggcacccctgtgggcaccatcactctttcttgtgcttacagaattaacttggcattcatgtctaccaggcaatttgagaggaccccacctatcatggggattattattgatcactttgtggaccgtccctatcccagctcctctcccatgcacccctgcaattacagaactgctggtgaggacactggagtaatatacccgtctgtagaagactctcaagaagtgtgtaccacctctttttccacctccccaccatcccagctctcaagctctcgcctttcctatcagcctgctgccctgggcgttggatcagctgacctggcttatccagtagtgtttgctgctggcttaaatgctacacaccctcaccagctgatggttcctgggaaggaaggtggggtaccccttgctcccaaccagcctgtccatggtacccaggctgaccaggagagactggcaacctgcaccccttctgacagaacccactgtgctgccacaccctccagtagtgaggatactgaaaccgtatcaaacagcagtgagggacgggcctcccctcacgatgtcttggagaccatctttgtccgaaaagtgggggcttttgtcaacaaacccattaaccaggtgaccctgacgagtttggatataccctttgccatgtttgctcccaagaatttggagctggaggataccgatccaatggtgaatcctccagattccccagagactgaatctcctctccagggcagcctgcactcagatggctccagcgggggcagcagtggcaatacccatgatgactttgttatgatagactttaaaccagctttttctaaagatgacattcttccgatggacctggggaccttctatcgggagtttcagaacccacctcagctgagcagcctctccatagatattggagcacagtccatggctgaagacttggactcattaccagagaagctggctgtgcatgagaagaatgtccgcgagtttgatgcctttgtggaaaccctgcagtaaaagtatccttgagtcccagcagcaccccctttttgtggccccagggcataagcagcctcccatgcatcagctgctcccacccctcatcctgctctgagccaggtggaagggaggctggcttctcccatggggacccagaagtccctactcttggacctcctggagactccgtggcggcagtcaagcccagtgcccagttggagaagactcacgtgctggccttggagatgggaagaaccttcgtacgaaaaagccctcagcagggccatctgtgtgccctgcccatcaccaactgcttcccaagggtgtcatcctgttcctcctgctgccggcctcctgcctgggcctgccttgcagctggccccttccctgcctgctgtcaccatccactgtttgacattccagctggtggccaagagattggtgtggagtcgcagaaagaggaaggagacagtgccaggaggaagaaggaaggagtcccttagctctcttcattgtcccctttacttcctgctatcttcttctcctcttcttctctctcttgcctctatgcctgtatttctggcaatatgacaggcctgcctacccaagatcagaactccaaaaccactcccacccctgaaggtcgggagggtctgagcagccctggtggctgcctgtgctcaggtcctcagctccatgggaaataaaaatggcaccctgaatctctaggattttgtcacttggagtcacagcaaagttctcttcctcttgtccccccgttgctgctccttggttatagaacatggtaaatatttattactttcagagaaaccagatattttatagaggaaatatgtttgaggtgagttgtttttcacttggagaaggcggagggctcttcctgggacggagacctcctcctccggaggttattgagaatccgggctgctgctttgaggatcttcccaccatacagacagcgagatccaagaagagggctggccgggggcaaagtcacctcccagtgtggctgcactggaactgactaaaggctttaccttggatagttgcgtattcctggtgagagccttacatctcccacagtttctgcagagtgactgactccattctggcagcccaggaagtcctgggtgctaaatgtgatggccacatgtagtggttaggggatgttgtgtgtgtcccccaactgcctgggtacttgttcctgatccctggggctgtcctgtggagcttttcctcctgcttgggcctagctaccatctccctctaatcccaggttctctacactgccctggggtttaccagctggattggcttctggttgagaaatcaaagctgggcgtatgattgacttaacccttcaggtattgttacttgaataagtcaagtgcctagcctcacccacctatgatctgtcctttcccagcctcgctggtagtcctggtcaaggagatctaggtctactccattcctcctggcccacctggggcattcactggcagcagctgtgcttcagtggagcaggtggttctcagctgcttgttagtatactgcatgtgacactgttcccacatacaaggctgacttctgaggattggagcaggctctggcggggaccagagctctgcgtgctgctgctgccaccaagaagtgttagcagaagcagtagcagccaactggccctcctgactttggcccagagcacatgcgtggcttgctgaacccaggctcaggtttatccccaaggccccagctttgagaagggggaaggcccctggtaagttattgatgcccccatatttcagctactgctctctttccaaggccttgcatggaaaggcctagccattgtctgaggcagcaatctttggcatctacaggtggcagcagcctttcaccagggctccatctgtgaagagtctcagccatgactttgagctgagcttgggagaagtaaagcaactgttaaggccagcccttgcccctcagacctgccatgaaaggaatgagccctagactgactcctgcagcacccccgggacaggctgggaccagctgtttgtctccaggtgtcagagtccctcctcctcctccaacctctccaacctactttgtttggaaataccgagctacacttcaaaatgtattcaagggatttccaataaatttttttctgtactttaca

SEQ ID NO: 110417 - DNA, 2351 bp, Homo sapiens
  Payload ID: 1665
  Gene Symbol: ATG13
  Gene Name: autophagy related 13
  Uniprot ID: O75143
  ENST ID: ENST00000528494
  CDS Start-End: 305-1957
gggaagcgaccggctgctgggcttaaggcgggagtgaccgcttaaccagtgagggaagcactgaagagcgccagtcgacgtgggtgcgacaactcgcggagtcttaggagcaaaacgtctggggcctgcgagccaggacccttctgaagccttaggtgtctatcggcgacgtgtacggtcactgcagctccggagcgcggaaccctcagccaggaggcgcggctggtcggtcccaggtcccggcctccgtaatgagagcccggaaccactctttgtgccgcagcttcgcagattcctataggcaatggaaactgatctcaattcccaggacagaaaggacctggacaagtttattaaattttttgccctcaagactgtccaagtgattgtccaggctcggcttggtgaaaagatttgcactcgttcatcatcttctccaacgggttcagattggttcaacttagcaatcaaagacatcccagaggttacacatgaagcaaagaaggcactggcaggacagctgcctgcagtcgggaggtccatgtgtgtggagatttcacttaagacttctgagggagattccatggagctggaaatatggtgtcttgaaatgaatgaaaagtgtgataaagaaatcaaagtttcctacacggtgtacaacagactgtcattgctgctgaagtcccttcttgctataactagggtgacaccagcctataggctctccaggaaacaagggcatgaatatgtcatattatacaggatatattttggagaagttcagctgagtggcttaggagaaggcttccagacagttcgtgttgggacagtgggcacccctgtgggcaccatcactctttcttgtgcttacagaattaacttggcattcatgtctaccaggcaatttgagaggaccccacctatcatggggattattattgatcactttgtggaccgtccctatcccagctcctctcccatgcacccctgcaattacagaactgctggtgaggacactggagtaatatacccgtctgtagaagactctcaagaagtgtgtaccacctctttttccacctccccaccatcccagtgtgtgtttactgtcacaaaggcacattttcagacccctactcctgtggtgacggacaccctgagggtccccatggcaggactggccttttcccatcaactctcaagctctcgcctttcctatcagcctgctgccctgggcgttggatcagctgacctggcttatccagtagtgtttgctgctggcttaaatgctacacaccctcaccagctgatggttcctgggaaggaaggtggggtaccccttgctcccaaccagcctgtccatggtacccaggctgaccaggagagactggcaacctgcaccccttctgacagaacccactgtgctgccacaccctccagtagtgaggatactgaaaccgtatcaaacagcagtgagggacgggcctcccctcacgatgtcttggagaccatctttgtccgaaaagtgggggcttttgtcaacaaacccattaaccaggtgaccctgacgagtttggatataccctttgccatgtttgctcccaagaatttggagctggaggataccgatccaatggtgaatcctccagattccccagagactgaatctcctctccagggcagcctgcactcagatggctccagcgggggcagcagtggcaatacccatgatgactttgttatgatagactttaaaccagctttttctaaagatgacattcttccgatggacctggggaccttctatcgggagtttcagaacccacctcagctgagcagcctctccatagatattggagcacagtccatggctgaagacttggactcattaccagagaagctggctgtgcatgagaagaatgtccgcgagtttgatgcctttgtggaaaccctgcagtaaaagtatccttgagtcccagcagcaccccctttttgtggccccagggcataagcagcctcccatgcatcagctgctcccacccctcatcctgctctgagccaggtggaagggaggctggcttctcccatggggacccagaagtccctactcttggacctcctggagactccgtggcggcagtcaagcccagtgcccagttggagaagactcacgtgctggccttggagatgggaagaaccttcgtacgaaaaagccctcagcagggccatctgtgtgccctgcccatcaccaactgcttcccaagggtgtcatcctgttcctcctgctgccggcctcctgcctgggcctgccttgcagctggccccttccctgcctgctgtcaccatccactgtt

SEQ ID NO: 110418 - DNA, 4014 bp, Homo sapiens
  Payload ID: 1665
  Gene Symbol: ATG13
  Gene Name: autophagy related 13
  Uniprot ID: O75143
  ENST ID: ENST00000524625
  CDS Start-End: 384-1826
caaacactaacgatggcggcgccgggaagcgaccggctgctgggcttaaggcgggagtgaccgcttaaccagtgagggaagcactgaagagcgccagtcgacgtgggtgcgacaactcgcggagtcttaggagcaaaacgtctggggcctgcgagccaggacccttctgaagccttaggtgtctatcggcgacgtgtacggtcactgcagctccggagcgcggaaccctcagccaggaggcgcggctggtcggtcccaggtcccggcctccgtaatgagagcccggaaccactctttgtgccgcagcttcgcagcatcttggactcaagtgattctcctgcctcagcctcctgagtagctgggactacagattcctataggcaatggaaactgatctcaattcccaggacagaaaggacctggacaagtttattaaattttttgccctcaagactgtccaagtgattgtccaggctcggcttggtgaaaagatttgcactcgttcatcatcttctccaacgggttcagattggttcaacttagcaatcaaagacatcccagaggttacacatgaagcaaagaaggcactggcaggacagctgcctgcagtcgggaggtccatgtgtgtggagatttcacttaagacttctgagggagattccatggagctggaaatatggtgtcttgaaatgaatgaaaagtgtgataaagaaatcaaagtttcctacacggtgtacaacagactgtcattgctgctgaagtcccttcttgctataactagggtgacaccagcctataggctctccaggaaacaagggcatgaatatgtcatattatacaggatatattttggagaagttcagctgagtggcttaggagaaggcttccagacagttcgtgttgggacagtgggcacccctgtgggcaccatcactctttcttgtgcttacagaattaacttggcattcatgtctaccaggcaatttgagaggaccccacctatcatggggattattattgatcactttgtggaccgtccctatcccagctcctctcccatgcacccctgcaattacagaactgctggtgaggacactggagtaatatacccgtctgtagaagactctcaagaagtgtgtaccacctctttttccacctccccaccatcccagctgatggttcctgggaaggaaggtggggtaccccttgctcccaaccagcctgtccatggtacccaggctgaccaggagagactggcaacctgcaccccttctgacagaacccactgtgctgccacaccctccagtagtgaggatactgaaaccgtatcaaacagcagtgagggacgggcctcccctcacgatgtcttggagaccatctttgtccgaaaagtgggggcttttgtcaacaaacccattaaccaggtgaccctgacgagtttggatataccctttgccatgtttgctcccaagaatttggagctggaggataccgatccaatggtgaatcctccagattccccagagactgaatctcctctccagggcagcctgcactcagatggctccagcgggggcagcagtggcaatacccatgatgactttgttatgatagactttaaaccagctttttctaaagatgacattcttccgatggacctggggaccttctatcgggagtttcagaacccacctcagctgagcagcctctccatagatattggagcacagtccatggctgaagacttggactcattaccagagaagctggctgtgcatgagaagaatgtccgcgagtttgatgcctttgtggaaaccctgcagtaaaagtatccttgagtcccagcagcaccccctttttgtggccccagggcataagcagcctcccatgcatcagctgctcccacccctcatcctgctctgagccaggtggaagggaggctggcttctcccatggggacccagaagtccctactcttggacctcctggagactccgtggcggcagtcaagcccagtgcccagttggagaagactcacgtgctggccttggagatgggaagaaccttcgtacgaaaaagccctcagcagggccatctgtgtgccctgcccatcaccaactgcttcccaagggtgtcatcctgttcctcctgctgccggcctcctgcctgggcctgccttgcagctggccccttccctgcctgctgtcaccatccactgtttgacattccagctggtggccaagagattggtgtggagtcgcagaaagaggaaggagacagtgccaggaggaagaaggaaggagtcccttagctctcttcattgtcccctttacttcctgctatcttcttctcctcttcttctctctcttgcctctatgcctgtatttctggcaatatgacaggcctgcctacccaagatcagaactccaaaaccactcccacccctgaaggtcgggagggtctgagcagccctggtggctgcctgtgctcaggtcctcagctccatgggaaataaaaatggcaccctgaatctctaggattttgtcacttggagtcacagcaaagttctcttcctcttgtccccccgttgctgctccttggttatagaacatggtaaatatttattactttcagagaaaccagatattttatagaggaaatatgtttgaggtgagttgtttttcacttggagaaggcggagggctcttcctgggacggagacctcctcctccggaggttattgagaatccgggctgctgctttgaggatcttcccaccatacagacagcgagatccaagaagagggctggccgggggcaaagtcacctcccagtgtggctgcactggaactgactaaaggctttaccttggatagttgcgtattcctggtgagagccttacatctcccacagtttctgcagagtgactgactccattctggcagcccaggaagtcctgggtgctaaatgtgatggccacatgtagtggttaggggatgttgtgtgtgtcccccaactgcctgggtacttgttcctgatccctggggctgtcctgtggagcttttcctcctgcttgggcctagctaccatctccctctaatcccaggttctctacactgccctggggtttaccagctggattggcttctggttgagaaatcaaagctgggcgtatgattgacttaacccttcaggtattgttacttgaataagtcaagtgcctagcctcacccacctatgatctgtcctttcccagcctcgctggtagtcctggtcaaggagatctaggtctactccattcctcctggcccacctggggcattcactggcagcagctgtgcttcagtggagcaggtggttctcagctgcttgttagtatactgcatgtgacactgttcccacatacaaggctgacttctgaggattggagcaggctctggcggggaccagagctctgcgtgctgctgctgccaccaagaagtgttagcagaagcagtagcagccaactggccctcctgactttggcccagagcacatgcgtggcttgctgaacccaggctcaggtttatccccaaggccccagctttgagaagggggaaggcccctggtaagttattgatgcccccatatttcagctactgctctctttccaaggccttgcatggaaaggcctagccattgtctgaggcagcaatctttggcatctacaggtggcagcagcctttcaccagggctccatctgtgaagagtctcagccatgactttgagctgagcttgggagaagtaaagcaactgttaaggccagcccttgcccctcagacctgccatgaaaggaatgagccctagactgactcctgcagcacccccgggacaggctgggaccagctgtttgtctccaggtgtcagagtccctcctcctcctccaacctctccaacctactttgtttggaaataccgagctacacttcaaaatgtattcaagggatttccaataaatttttttctgtactttaca

SEQ ID NO: 110419 - DNA, 2566 bp, Homo sapiens
  Payload ID: 1665
  Gene Symbol: ATG13
  Gene Name: autophagy related 13
  Uniprot ID: O75143
  ENST ID: ENST00000529655
  CDS Start-End: 415-1857
ccccccccccccggccattaccgaagcggatgaaaacaaacactaacgatggcggcgccgggaagcgaccggctgctgggcttaaggcgggagtgaccgcttaaccagtgagggaagcactgaagagcgccagtcgacgtgggtgcgacaactcgcggagtcttaggagcaaaacgtctggggcctgcgagccaggacccttctgaagccttaggtgtctatcggcgacgtgtacggtcactgcagctccggagcgcggaaccctcagccaggaggcgcggctggtcggtcccaggtcccggcctccgtaatgagagcccggaaccactctttgtgccgcagcttcgcagtggaacgacctgtggaaacctgtgatccattctcattaaataaatctctggattcctataggcaatggaaactgatctcaattcccaggacagaaaggacctggacaagtttattaaattttttgccctcaagactgtccaagtgattgtccaggctcggcttggtgaaaagatttgcactcgttcatcatcttctccaacgggttcagattggttcaacttagcaatcaaagacatcccagaggttacacatgaagcaaagaaggcactggcaggacagctgcctgcagtcgggaggtccatgtgtgtggagatttcacttaagacttctgagggagattccatggagctggaaatatggtgtcttgaaatgaatgaaaagtgtgataaagaaatcaaagtttcctacacggtgtacaacagactgtcattgctgctgaagtcccttcttgctataactagggtgacaccagcctataggctctccaggaaacaagggcatgaatatgtcatattatacaggatatattttggagaagttcagctgagtggcttaggagaaggcttccagacagttcgtgttgggacagtgggcacccctgtgggcaccatcactctttcttgtgcttacagaattaacttggcattcatgtctaccaggcaatttgagaggaccccacctatcatggggattattattgatcactttgtggaccgtccctatcccagctcctctcccatgcacccctgcaattacagaactgctggtgaggacactggagtaatatacccgtctgtagaagactctcaagaagtgtgtaccacctctttttccacctccccaccatcccagctgatggttcctgggaaggaaggtggggtaccccttgctcccaaccagcctgtccatggtacccaggctgaccaggagagactggcaacctgcaccccttctgacagaacccactgtgctgccacaccctccagtagtgaggatactgaaaccgtatcaaacagcagtgagggacgggcctcccctcacgatgtcttggagaccatctttgtccgaaaagtgggggcttttgtcaacaaacccattaaccaggtgaccctgacgagtttggatataccctttgccatgtttgctcccaagaatttggagctggaggataccgatccaatggtgaatcctccagattccccagagactgaatctcctctccagggcagcctgcactcagatggctccagcgggggcagcagtggcaatacccatgatgactttgttatgatagactttaaaccagctttttctaaagatgacattcttccgatggacctggggaccttctatcgggagtttcagaacccacctcagctgagcagcctctccatagatattggagcacagtccatggctgaagacttggactcattaccagagaagctggctgtgcatgagaagaatgtccgcgagtttgatgcctttgtggaaaccctgcagtaaaagtatccttgagtcccagcagcaccccctttttgtggccccagggcataagcagcctcccatgcatcagctgctcccacccctcatcctgctctgagccaggtggaagggaggctggcttctcccatggggacccagaagtccctactcttggacctcctggagactccgtggcggcagtcaagcccagtgcccagttggagaagactcacgtgctggccttggagatgggaagaaccttcgtacgaaaaagccctcagcagggccatctgtgtgccctgcccatcaccaactgcttcccaagggtgtcatcctgttcctcctgctgccggcctcctgcctgggcctgccttgcagctggccccttccctgcctgctgtcaccatccactgtttgacattccagctggtggccaagagattggtgtggagtcgcagaaagaggaaggagacagtgccaggaggaagaaggaaggagtcccttagctctcttcattgtcccctttacttcctgctatcttcttctcctcttcttctctctcttgcctctatgcctgtatttctggcaatatgacaggcctgcctacccaagatcagaactccaaaaccactcccacccctgaaggtcgggagggtctgagcagccctggtggctgcctgtgctcaggtcctcagctccatgggaaataaaaatggcaccctgaatctct

SEQ ID NO: 110420 - DNA, 583 bp, Homo sapiens
  Payload ID: 1665
  Gene Symbol: ATG13
  Gene Name: autophagy related 13
  ENST ID: ENST00000531933
  CDS Start-End: 1-142
cccgtctgtagaagactctcaagaagtgtgtaccacctctttttccacctccccaccatcccaggactcattaccagagaagctggctgtgcatgagaagaatgtccgcgagtttgatgcctttgtggaaaccctgcagtaaaagtatccttgagtcccagcagcaccccctttttgtggccccagggcataagcagcctcccatgcatcagctgctcccacccctcatcctgctctgagccaggtggaagggaggctggcttctcccatggggacccagaagtccctactcttggacctcctggagactccgtggcggcagtcaagcccagtgcccagttggagaagactcacgtgctggccttggagatgggaagaaccttcgtacgaaaaagccctcagcagggccatctgtgtgccctgcccatcaccaactgcttcccaagggtgtcatcctgttcctcctgctgccggcctcctgcctgggcctgccttgcagctggccccttccctgcctgctgtcaccatccactgtttgacattccagctggtggccaagagattggtgtggagtcgcagaaag

SEQ ID NO: 110421 - DNA, 2030 bp, Homo sapiens
  Payload ID: 1665
  Gene Symbol: ATG13
  Gene Name: autophagy related 13
  Uniprot ID: O75143
  ENST ID: ENST00000530500
  CDS Start-End: 497-1702
gaagcggatgaaaacaaacactaacgatggcggcgccgggaagcgaccggctgctgggcttaaggcgggagtgaccgcttaaccagtgagggaagcactgaagagcgccagtcgacgtgggtgcgacaactcgcggagtcttaggagcaaaacgtctggggcctgcgagccaggacccttctgaagccttaggtgtctatcggcgacgtgtacggtcactgcagctccggagcgcggaaccctcagccaggaggcgcggctggtcggtcccaggtcccggcctccgtaatgagagcccggaaccactctttgtgccgcagcttcgcagactgtccaagtgattgtccaggctcggcttggtgaaaagatttgcactcgttcatcatcttctccaacgggttcagattggttcaacttagcaatcaaagacatcccagaggttacacatgaagcaaagaaggcactggcaggacagctgcctgcagtcgggaggtccatgtgtgtggagatttcacttaagacttctgagggagattccatggagctggaaatatggtgtcttgaaatgaatgaaaagtgtgataaagaaatcaaagtttcctacacggtgtacaacagactgtcattgctgctgaagtcccttcttgctataactagggtgacaccagcctataggctctccaggaaacaagggcatgaatatgtcatattatacaggatatattttggagaagttcagctgagtggcttaggagaaggcttccagacagttcgtgttgggacagtgggcacccctgtgggcaccatcactctttcttgtgcttacagaattaacttggcattcatgtctaccaggcaatttgagaggaccccacctatcatggggattattattgatcactttgtggaccgtccctatcccagctcctctcccatgcacccctgcaattacagaactgctggtgaggacactggagtaatatacccgtctgtagaagactctcaagaagtgtgtaccacctctttttccacctccccaccatcccagctgatggttcctgggaaggaaggtggggtaccccttgctcccaaccagcctgtccatggtacccaggctgaccaggagagactggcaacctgcaccccttctgacagaacccactgtgctgccacaccctccagtagtgaggatactgaaaccgtatcaaacagcagtgagggacgggcctcccctcacgatgtcttggagaccatctttgtccgaaaagtgggggcttttgtcaacaaacccattaaccaggtgaccctgacgagtttggatataccctttgccatgtttgctcccaagaatttggagctggaggataccgatccaatggtgaatcctccagattccccagagactgaatctcctctccagggcagcctgcactcagatggctccagcgggggcagcagtggcaatacccatgatgactttgttatgatagactttaaaccagctttttctaaagatgacattcttccgatggacctggggaccttctatcgggagtttcagaacccacctcagctgagcagcctctccatagatattggagcacagtccatggctgaagacttggactcattaccagagaagctggctgtgcatgagaagaatgtccgcgagtttgatgcctttgtggaaaccctgcagtaaaagtatccttgagtcccagcagcaccccctttttgtggccccagggcataagcagcctcccatgcatcagctgctcccacccctcatcctgctctgagccaggtggaagggaggctggcttctcccatggggacccagaagtccctactcttggacctcctggagactccgtggcggcagtcaagcccagtgcccagttggagaagactcacgtgctggccttggagatgggaagaaccttcgtacgaaaaagccctcagcagggccatctgtgtgccctgcccatcaccaactgcttcccaagggtgtcatcctgttcctcctgctg

SEQ ID NO: 110422 - DNA, 581 bp, Homo sapiens
  Payload ID: 1665
  Gene Symbol: ATG13
  Gene Name: autophagy related 13
  ENST ID: ENST00000525009
  CDS Start-End: 1-581
gtgtttactgtcacaaaggcacattttcagacccctactcctgtggtgacggacaccctgagggtccccatggcaggactggccttttcccatcaactgatggttcctgggaaggaaggtggggtaccccttgctcccaaccagcctgtccatggtacccaggctgaccaggagagactggcaacctgcaccccttctgacagaacccactgtgctgccacaccctccagtagtgaggatactgaaaccgtatcaaacagcagtgagggacgggcctcccctcacgatgtcttggagaccatctttgtccgaaaagtgggggcttttgtcaacaaacccattaaccaggtgaccctgacgagtttggatataccctttgccatgtttgctcccaagaatttggagctggaggataccgatccaatggtgaatcctccagattccccagagactgaatctcctctccagggcagcctgcactcagatggctccagcgggggcagcagtggcaatacccatgatgactttgttatgatagactttaaaccagctttttctaaagatgacattcttccgatgga

SEQ ID NO: 110423 - DNA, 1021 bp, Homo sapiens
  Payload ID: 1665
  Gene Symbol: ATG13
  Gene Name: autophagy related 13
  ENST ID: ENST00000533325
  CDS Start-End: 665-1021
ccccggccattaccgaagcggatgaaaacaaacactaacgatggcggcgccgggaagcgaccggctgctgggcttaaggcgggagtgaccgcttaaccagtgagggaagcactgaagagcgccagtcgacgtgggtgcgacaactcgcggagtcttaggagcaaaacgtctggggcctgcgagccaggacccttctgaagccttaggtgtctatcggcgacgtgtacggtcactgcagctccggagcgcggaaccctcagccaggaggcgcggctggtcggtcccaggtcccggcctccgtaatgagagcccggaaccactctttgtgccgcagcttcgcaggtgagggtgactgttgactagtgaaaaaagggacccatggttcacgactgtcttcttactggcagtggaacgacctgtggaaacctgtgatccattctcattaaataaatctctggcatcttggactcaagtgattctcctgcctcagcctcctgagtagctgggactacaggacagaaaattttaataacaagatagtaagcagctcacatgaacttacatattcagcatattagcaggaaagaggcaagacatttgaagaacttgcagaaaagttgcaaagtaaatgagagactagaatgctcaaagattcctataggcaatggaaactgatctcaattcccaggacagaaaggacctggacaagtttattaaattttttgccctcaagactgtccaagtgattgtccaggctcggcttggtgaaaagatttgcactcgttcatcatcttctccaacgggttcagattggttcaacttagcaatcaaagacatcccagaggttacacatgaagcaaagaaggcactggcaggacagctgcctgcagtcgggaggtccatgtgtgtggagatttcacttaagacttctgagggagattccatggagctggaaatatggtgtcttgaaatgaatgaaaagtgtgataaagaaatcaaagtttcctacacggtgtacaac

SEQ ID NO: 110424 - DNA, 297 bp, Homo sapiens
  Payload ID: 1665
  Gene Symbol: ATG13
  Gene Name: autophagy related 13
  ENST ID: ENST00000532067
  CDS Start-End: 1-127
caaacccattaaccaggtgaccctgacgagtttggatataccctttgccatgtttgctcccaagaatttggagctggaggataccgatccaatggtgagcccaccgttgactacgagttcccagtagatggtgcgctagtcattgttcttcctgagccagagtcactaatcccccacagactataaaccatggcccctcggcttacgggtgaatcctccagattccccagagactgaatctcctctccagggcagcctgcactcagatggctccagcgggggcagcagtggcaatac

SEQ ID NO: 110425 - DNA, 613 bp, Homo sapiens
  Payload ID: 1665
  Gene Symbol: ATG13
  Gene Name: autophagy related 13
  ENST ID: ENST00000577256
  CDS Start-End: 444-613
ggatgaaaacaaacactaacgatggcggcgccgggaagcgaccggctgctgggcttaaggcgggagtgaccgcttaaccagtgagggaagcactgaagagcgccagtcgacgtgggtgcgacaactcgcggagtcttaggagcaaaacgtctggggcctgcgagccaggacccttctgaagccttaggtgtctatcggcgacgtgtacggtcactgcagctccggagcgcggaaccctcagccaggaggcgcggctggtcggtcccaggtcccggcctccgtaatgagagcccggaaccactctttgtgccgcagcttcgcagtggaacgacctgtggaaacctgtgatccattctcattaaataaatctctggcatcttggactcaagtgattctcctgcctcagcctcctgagtagctgggactacagattcctataggcaatggaaactgatctcaattcccaggacagaaaggacctggacaagtttattaaattttttgccctcaagactgtccaagtgattgtccaggctcggcttggtgaaaagatttgcactcgttcatcatcttctccaacgggttcagattggttcaacttagcaatcaaaga

SEQ ID NO: 110426 - DNA, 587 bp, Homo sapiens
  Payload ID: 1665
  Gene Symbol: ATG13
  Gene Name: autophagy related 13
  ENST ID: ENST00000578626
  CDS Start-End: 488-587
ggatgaaaacaaacactaacgatggcggcgccgggaagcgaccggctgctgggcttaaggcgggagtgaccgcttaaccagtgagggaagcactgaagagcgccagtcgacgtgggtgcgacaactcgcggagtcttaggagcaaaacgtctggggcctgcgagccaggacccttctgaagccttaggtgtctatcggcgacgtgtacggtcactgcagctccggagcgcggaaccctcagccaggaggcgcggctggtcggtcccaggtcccggcctccgtaatgagagcccggaaccactctttgtgccgcagcttcgcagcatcttggactcaagtgattctcctgcctcagcctcctgagtagctgggactacagagacagaatctctccatgttgtccaggctggtctcaaactcctgggctcaagagatcatcccaccttggccttccaaagtgttgggattacctatattcctataggcaatggaaactgatctcaattcccaggacagaaaggacctggacaagtttattaaattttttgccctcaagactgtccaagtgattgtccaggctcggcttg

SEQ ID NO: 110427 - DNA, 619 bp, Homo sapiens
  Payload ID: 1665
  Gene Symbol: ATG13
  Gene Name: autophagy related 13
  ENST ID: ENST00000581438
  CDS Start-End: 580-619
attaccgaagcggatgaaaacaaacactaacgatggcggcgccgggaagcgaccggctgctgggcttaaggcgggagtgaccgcttaaccagtgagggaagcactgaagagcgccagtcgacgtgggtgcgacaactcgcggagtcttaggagcaaaacgtctggggcctgcgagccaggacccttctgaagccttaggtgtctatcggcgacgtgtacggtcactgcagctccggagcgcggaaccctcagccaggaggcgcggctggtcggtcccaggtcccggcctccgtaatgagagcccggaaccactctttgtgccgcagcttcgcaggtgagggtgactgttgactagtgaaaaaagggacccatggttcacgactgtcttcttactggcagtggaacgacctgtggaaacctgtgatccattctcattaaataaatctctggtcttgctctgttgcccaggctggagtgtagtggtgtgatcttggctcgctgcaacctctgcctcccaggttcaagcgattctcctgcctcagcctcctgagtaactgggattacagattcctataggcaatggaaactgatctcaattcccaggacagaaaggacctgg

SEQ ID NO: 110428 - DNA, 624 bp, Homo sapiens
  Payload ID: 1665
  Gene Symbol: ATG13
  Gene Name: autophagy related 13
  ENST ID: ENST00000580238
  CDS Start-End: 527-624
gtagccctctttcaccccccccccccggccattaccgaagcggatgaaaacaaacactaacgatggcggcgccgggaagcgaccggctgctgggcttaaggcgggagtgaccgcttaaccagtgagggaagcactgaagagcgccagtcgacgtgggtgcgacaactcgcggagtcttaggagcaaaacgtctggggcctgcgagccaggacccttctgaagccttaggtgtctatcggcgacgtgtacggtcactgcagctccggagcgcggaaccctcagccaggaggcgcggctggtcggtcccaggtcccggcctccgtaatgagagcccggaaccactctttgtgccgcagcttcgcagtggaacgacctgtggaaacctgtgatccattctcattaaataaatctctgggctggagtgtagtggtgtgatcttggctcgctgcaacctctgcctcccaggttcaagcgattctcctgcctcagcctcctgagtaactgggattacagattcctataggcaatggaaactgatctcaattcccaggacagaaaggacctggacaagtttattaaattttttgccctcaagactgtccaagtgattgtccaggctcggct

SEQ ID NO: 110429 - DNA, 544 bp, Homo sapiens
  Payload ID: 1665
  Gene Symbol: ATG13
  Gene Name: autophagy related 13
  ENST ID: ENST00000583249
  CDS Start-End: 464-544
attaccgaagcggatgaaaacaaacactaacgatggcggcgccgggaagcgaccggctgctgggcttaaggcgggagtgaccgcttaaccagtgagggaagcactgaagagcgccagtcgacgtgggtgcgacaactcgcggagtcttaggagcaaaacgtctggggcctgcgagccaggacccttctgaagccttaggtgtctatcggcgacgtgtacggtcactgcagctccggagcgcggaaccctcagccaggaggcgcggctggtcggtcccaggtcccggcctccgtaatgagagcccggaaccactctttgtgccgcagcttcgcagtcttgctctgttgcccaggctggagtgtagtggtgtgatcttggctcgctgcaacctctgcctcccaggttcaagcgattctcctgcctcagcctcctgagtaactgggattacagattcctataggcaatggaaactgatctcaattcccaggacagaaaggacctggacaagtttattaaattttttgccctcaagactgtccaagtg

SEQ ID NO: 110430 - DNA, 600 bp, Homo sapiens
  Payload ID: 1665
  Gene Symbol: ATG13
  Gene Name: autophagy related 13
  ENST ID: ENST00000582547
  CDS Start-End: 487-600
aacgatggcggcgccgggaagcgaccggctgctgggcttaaggcgggagtgaccgcttaaccagtgagggaagcactgaagagcgccagtcgacgtgggtgcgacaactcgcggagtcttaggagcaaaacgtctggggcctgcgagccaggacccttctgaagccttaggtgtctatcggcgacgtgtacggtcactgcagctccggagcgcggaaccctcagccaggaggcgcggctggtcggtcccaggtcccggcctccgtaatgagagcccggaaccactctttgtgccgcagcttcgcagtggaacgacctgtggaaacctgtgatccattctcattaaataaatctctggtcttgctctgttgcccaggctggagtgtagtggtgtgatcttggctcgctgcaacctctgcctcccaggttcaagcgattctcctgcctcagcctcctgagtaactgggattacagattcctataggcaatggaaactgatctcaattcccaggacagaaaggacctggacaagtttattaaattttttgccctcaagactgtccaagtgattgtccaggctcggcttggtgaaaagatttgc

SEQ ID NO: 110431 - DNA, 741 bp, Homo sapiens
  Payload ID: 1665
  Gene Symbol: ATG13
  Gene Name: autophagy related 13
  ENST ID: ENST00000581416
  CDS Start-End: 592-741
tttcaccccccccccccggccattaccgaagcggatgaaaacaaacactaacgatggcggcgccgggaagcgaccggctgctgggcttaaggcgggagtgaccgcttaaccagtgagggaagcactgaagagcgccagtcgacgtgggtgcgacaactcgcggagtcttaggagcaaaacgtctggggcctgcgagccaggacccttctgaagccttaggtgtctatcggcgacgtgtacggtcactgcagctccggagcgcggaaccctcagccaggaggcgcggctggtcggtcccaggtcccggcctccgtaatgagagcccggaaccactctttgtgccgcagcttcgcagtggaacgacctgtggaaacctgtgatccattctcattaaataaatctctggtcttgctctgttgcccaggctggagtgtagtggtgtgatcttggctcgctgcaacctctgcctcccaggttcaagcgattctcctgcctcagcctcctgagtaactgggattacagcatcttggactcaagtgattctcctgcctcagcctcctgagtagctgggactacagattcctataggcaatggaaactgatctcaattcccaggacagaaaggacctggacaagtttattaaattttttgccctcaagactgtccaagtgattgtccaggctcggcttggtgaaaagatttgcactcgttcatcatcttctccaacgggttcagattgg

SEQ ID NO: 110432 - DNA, 4742 bp, Homo sapiens
  Payload ID: 1666
  Gene Symbol: ATG14
  Gene Name: autophagy related 14
  Uniprot ID: Q6ZNE5
  ENST ID: ENST00000247178
  CDS Start-End: 37-1515
aaaatcccacgtgactggctctcctctcaggccatcatggcgtctcccagtgggaagggagcccgggcgctggaggctcctggctgcgggccccggccgctcgcccgggacctggtggactccgtggacgatgcggaggggctgtacgtggctgtggagcgctgcccgctgtgcaacactacccgccggcggctgacctgcgccaaatgcgttcagagcggcgatttcgtctacttcgacggccgcgaccgggagaggtttatcgacaagaaggaaaggttaagccgacttaagagcaagcaagaagaatttcagaaagaagtgttaaaagctatggaaggaaaatggataacagatcagttgagatggaaaataatgtcctgcaagatgaggattgaacagttaaaacaaacaatatgtaaaggaaatgaagaaatggagaaaaattctgaaggccttctcaaaaccaaggaaaagaatcagaagctttacagtcgagcacaacggcaccaagagaaaaaggagaagattcagaggcataatcgcaaacttggtgacctggtagaaaaaaagaccattgacttaagaagtcattatgagcgtctggcaaatcttcgacgatcccatatattagagctcacctctgtcatttttccaatcgaggaagtaaagacgggtgtgagagaccccgcagatgtgtcttcagagagtgacagtgccatgacctccagcactgtgagcaagcttgctgaagcccggaggacaacttacctctcaggacgatgggtctgtgacgatcacaacggagacaccagcattagcattacagggccttggattagcctccctaacaatggggactactctgcctactacagctgggtggaggagaagaaaacaacccaggggcctgacatggagcagagtaaccctgcctacaccatcagtgctgcgctgtgctatgcaactcagctggtcaacattctgtctcatatacttgatgtaaatcttcccaaaaagctctgcaacagtgaattttgtggcgaaaatctaagcaagcagaaatttactcgagcagtgaagaaactgaatgcaaatattctttacctttgtttttctcagcatgtaaatttagatcaattacaaccactgcataccctcaggaatctaatgtacctggtcagtccaagctctgaacacctaggcaggtcagggccctttgaagtacgagcagaccttgaggagtccatggaatttgtggatcccggagttgctggagaatcagatgagagcggagatgagcgcgtcagcgatgaagaaaccgacctgggcacagactgggagaacttgcctagtccccggttttgtgatatcccttcccagtctgtggaagtctcccagagtcagagcacccaggcgtccccacccatcgcgagcagcagtgcaggtgggatgatctcctctgcagcagcctcggtgacctcctggtttaaagcttacactggacaccgttaacgagcatggaccaaaacataccaaatctgcatcaagaaagttcttctcccactacactctagtaaacattttctgtttaagttaagatagtgtctggaacaaagaggttaaagtgttgttttgttttgtctttttaagcagggagacaaacatttctatttgccaagtggcctgtgatggtgaccaacatgcttatgataattaagagaacaggggtcgaaggtctttctacccagaccagtgctggtggaaggaggacctgtgcgtgtggccagttctgccaaggaagcagttgatttgggttccctctgggcccgggccaccgggcccacagatatgggtcagtgtgctggtccttgcggtgctgagactgttcctgacactttaagttttagaggttggttgaatcacaagaggtgattcttgattattaggacatgaaagataaaagctctttaataagagtttttctgccattgttttttgtatgagaaccagcaggcaatttaaaatttctaatttggtcctttgattttgtttgggaggggtgagttacacgtattttattcatgctgctctgtcgtagtttgtcagacattcctgtttttctttcccccacacaccaaagaaaatgaaagtctttttctttaggacccacatccataaatggaagaaatcctggctgcaataatgtctagagagtttttaactattttcttgtattctgaggggaattaagcttattcttacctagttgaattcctgccatccacactatgagcattttgaaattgaacttatattttctgggtgaaaataagtcatgaaggtcattcccttatgtaagctcaatgcctgcctgggcacaggggaaaagccacttagttaagtggcctctggtcattcttgtggtgtccactttctttctatgggattgagtaggtggcaggtgttttcaggggaaaccatcctacttgtttccccgaactctttgttgctctgaggacacagctttgctcagaaatgcagcgcagatccttacggctgatgctactctgctctgttctggggaaagcacaatataaagaaagaatttcccagccaggcgcagtggctcacgcctgtaatcccagcactttaggaggccgaggcaggcggatcacttgaggtcaggagtttgagagcagcctggctaacatggtgaaaccctgtttctactaaaaatacaaaaaattaccgggtgtggtggcgcacgcctgtaatcccagctactcgggaggctgcggcaggagaatcgcttgaaccgggaggcagaggttgcagtgagccgagattgtgccattgcactccagcctgggcaacaagagcgaaactccgtctcaaaaaaaaaaagaatttccctcagcaggagatcattttcagctcacgtgtcttgtcattcttttagtgacaatcttacaagaaaactataatgagagaggcattatgtacaaatatgtaagtagtttatttttaataactgcaaaaaaatcctatgtaacaactaccaaaagaaatcctatgaaagagtcctaacaggcattattaccatatcttatgtgattggcatgatagcacctctgataaatcattcagaggtttgccatgccccagcttcttttctcatcataataattgtagttgatactttgcctccaagtccgaggtgctatatagcttttgctaatggtatatttggtgttttgtatagttttgggtagagttgcagaacggagtttatttctatccggtagtcacaaattccttggctctatgaattttccatgaaaggaggaagtaggcttttctcgttgtgggtggtcttttttttttttggagacggagtctcactcagctgcccaggctggagtgtagtggcaccatctccgctcactgcaaccaccatctcctgggttcaagcaattcttccatctcaacctcccgagtagctgggattataggcacctgccatcatgcccagctaatttttgtattttagtaaagacgggggttttcaccatgttggccaggctggtcttgaactcctgacttcaggtgatccgcttgccttggcctcctaaagtgctaggattacaggcctgagccaccgcgcccggccccttatgggttcttctacactgctgggatctctgttttaagtgctcagcttcatgattgattgctgggcttccattttcccatccagttctggagttcgtagagagtgaagatggtagacttgaacagataaataaacttaacgatcttgtaagagttgtctagctacttaaaaccctcagaagtaagagcttagtctcacgagttgtaagagtgggatttggagcttggtggtggagactgacttcagctgagagatgcacaacagtcatggttttcttaagcctcttatgaaaccatgaatgagagatgaagctaaagaatagaatccagagatcacaaactcatctagagtacttccacaaaatttacaaagatgtgggaactttatggataggatatattttgtttgttgttgttaatatcaactagaggcactttacatagggttaagtgatcgaacccttttgtggttttgaacaccaacatactggcttacactgctgaaatattttgggtttcattattttgcactggatccaccctgtaaatactcttaagtatacatttcaaccactgttttttctactctttttgctgctcattaaaatctttcatgtaggtgccagaaccatatgtaaacagctttttaaaaaattgaagctggtattttgtttaaacaaaaagccatagaacttggtcatgttttccattttaaaatgatttactgaaacaaagtaatactaataaaaacccacaggcaccaaacaggctgcttaaaatggtctgttaaagacattttttggttatggaatataagaaaagttttgcacatctgtaagggggaaaaacagtatatcaccattgggtagagtggacgggactcatgtaaggactcaatttggggaagagcattcagtggcatgctgttagaggactagtgtccgagaatctcctcacagtatcatgttgcaggaattccccattgctctgcaacttccaaaccagtttgagtcatacaaatgttttctaaacttttattgtattactgcaataaatcttttaacagt

SEQ ID NO: 110433 - DNA, 2915 bp, Homo sapiens
  Payload ID: 1667
  Gene Symbol: ATG16L1
  Gene Name: autophagy related 16-like 1
  Uniprot ID: Q676U5
  ENST ID: ENST00000347464
  CDS Start-End: 258-1592
actagcgagcgccctgcgtaggcaccggctcctgagcccgtgcttcgggtgagggggcgggtcttccggccctctcgaaaatcatttccggcatgagccggaagaccgtcccggatggcctcggggactgccagtgtgtggaggtgagctccgggattgccggcattcccgcttctgctggttgcttcatgctgcaggctgcggccgtcagccctcgctcgcattggtggcgctgaggtgccggggcagcaagtgacatgtcgtcgggcctccgcgccgctgacttcccccgctggaagcgccacatctcggagcaactgaggcgccgggaccggctgcagagacaggcgttcgaggagatcatcctgcagtataacaaattgctggaaaagtcagatcttcattcagtgttggcccagaaactacaggctgaaaagcatgacgtaccaaacaggcacgagataaggaggcggcaagcccggctgcagaaagagcttgcagaagcagcaaaggaacctctaccagtcgaacaggatgatgacattgaggtcattgtggatgaaacttctgatcacacagaagagacctctcctgtgcgagccatcagcagagcagccacgagacgctctgtctcttccttcccagtcccccaggacaatgtggatactcatcctggttctggtaaagaagtgagggtaccagctactgccttgtgtgtcttcgatgcacatgatggggaagtcaacgctgtgcagttcagtccaggttcccggttactggccactggaggcatggaccgcagggttaagctttgggaagtatttggagaaaaatgtgagttcaagggttccctatctggcagtaatgcaggaattacaagcattgaatttgatagtgctggatcttacctcttagcagcttcaaatgattttgcaagccgaatctggactgtggatgattatcgattacggcacacactcacgggacacagtgggaaagtgctgtctgctaagttcctgctggacaatgcgcggattgtctcaggaagtcacgaccggactctcaaactctgggatctacgcagcaaagtctgcataaagacagtgtttgcaggatccagttgcaatgatattgtctgcacagagcaatgtgtaatgagtggacattttgacaagaaaattcgtttctgggacattcgatcagagagcatagttcgagagatggagctgttgggaaagattactgccctggacttaaacccagaaaggactgagctcctgagctgctcccgtgatgacttgctaaaagttattgatctccgaacaaatgctatcaagcagacattcagtgcacctgggttcaagtgcggctctgactggaccagagttgtcttcagccctgatggcagttacgtggcggcaggctctgctgagggctctctgtatatctggagtgtgctcacagggaaagtggaaaaggttctttcaaagcagcacagctcatccatcaatgcggtggcgtggtcgccctctggctcgcacgttgtcagtgtggacaaaggatgcaaagctgtgctgtgggcacagtactgacggggctctcagggctgggaggaccccagtgccctcctcagaagaagcacatgggctcctgcagccctgtcctggcaggtgatgtgctgggtatagcatggacctcccagagaagctcaagctatgtggcactgtagctttgccgtgaatgggatttctgaagatttgactgaggtctctcttggcctggaagaataacactgaaaaaacctgacgctgcggtcacttagcagaggctcaggttcttgccttgggaaacactactagctctgaccttccatacctcacttgggggagcacagggccccgctgggcctcctcaccaacggcagtgccaaaatcagcccccacatcaaggtggtgttctctgtgctttctctcgtccttccaaagtcggttctggcctaacgcatgtcccaacaccttgggttcatttgcccggtgaactcactttaagcattggattaacggaaactcccgaactacagacccctccctggtgggttgcatgaatgtgtctcattactgctgaaatgtcctcacatctctttcactgttcttcagagctttctggctctctttcccccacaaaattcgacatatttaaaaatctccgtgtggctttaaaaaatggttttttgtttttttgtttttttgaggtgggagaggatgtgtgaaaatcttttccagggaaatgggttcgctgcagaggtaaggatgtgttcctgtatcgatctgcagacacccagaaggtgggtgcacactgcatgcttgggggtgccaagggattcgagacctccaacatacttgtctgaaggtggtgattctggccatggcccctctgccaagcctgtgtgcgatgcccttggtgctttagtgcaagaagcctaggctcagaagcacagcagcgccatctttccgtttcaggggttgtgatgaaggccaaggaaaaacatttatctttactattttacctacgtataaagttttagttcattgggtgtgcgaaacaccctttttatcacttttaaatttgcactttattttttttcttccatgcttgttctctggacatttggggatgtgagtgttagagctggtgagagaggagtcaggtggccttcccaccgatggtcctggcctccacctgccctctcttccctgcctgatcaccgctttccaatttgcccttcagagaacttaagtcaaggagagttgaaattcacaggccagggcacatcttttatttatttcattatgttggccaacagaacttgattgtaaataataataaagaaatctgttatatacttttcaaactcc

SEQ ID NO: 110434 - DNA, 2767 bp, Homo sapiens
  Payload ID: 1667
  Gene Symbol: ATG16L1
  Gene Name: autophagy related 16-like 1
  Uniprot ID: Q676U5
  ENST ID: ENST00000373525
  CDS Start-End: 157-1443
aagaccgtcccggatggcctcggggactgccagtgtgtggaggtgagctccgggattgccggcattcccgcttctgctggttgcttcatgctgcaggctgcggccgtcagccctcgctcgcattggtggcgctgaggtgccggggcagcaagtgacatgtcgtcgggcctccgcgccgctgacttcccccgctggaagcgccacatctcggagcaactgaggcgccgggaccggctgcagagacaggcgttcgaggagatcatcctgcagtataacaaattgctggaaaagtcagatcttcattcagtgttggcccagaaactacaggctgaaaagcatgacgtaccaaacaggcacgagataaggaggcggcaagcccggctgcagaaagagcttgcagaagcagcaaaggaacctctaccagtcgaacaggatgatgacattgaggtcattgtggatgaaacttctgatcacacagaagagacctctcctgtgcgagccatcagcagagcagccactaagcgactctcgcagcctgctggaggccttctggattctatcactaatatctttgggagacgctctgtctcttccttcccagtcccccaggacaatgtggatactcatcctggttctggtaaagaagtgagggtaccagctactgccttgtgtgtcttcgatgcacatgatggggaagtcaacgctgtgcagttcagtccaggaattacaagcattgaatttgatagtgctggatcttacctcttagcagcttcaaatgattttgcaagccgaatctggactgtggatgattatcgattacggcacacactcacgggacacagtgggaaagtgctgtctgctaagttcctgctggacaatgcgcggattgtctcaggaagtcacgaccggactctcaaactctgggatctacgcagcaaagtctgcataaagacagtgtttgcaggatccagttgcaatgatattgtctgcacagagcaatgtgtaatgagtggacattttgacaagaaaattcgtttctgggacattcgatcagagagcatagttcgagagatggagctgttgggaaagattactgccctggacttaaacccagaaaggactgagctcctgagctgctcccgtgatgacttgctaaaagttattgatctccgaacaaatgctatcaagcagacattcagtgcacctgggttcaagtgcggctctgactggaccagagttgtcttcagccctgatggcagttacgtggcggcaggctctgctgagggctctctgtatatctggagtgtgctcacagggaaagtggaaaaggttctttcaaagcagcacagctcatccatcaatgcggtggcgtggtcgccctctggctcgcacgttgtcagtgtggacaaaggatgcaaagctgtgctgtgggcacagtactgacggggctctcagggctgggaggaccccagtgccctcctcagaagaagcacatgggctcctgcagccctgtcctggcaggtgatgtgctgggtatagcatggacctcccagagaagctcaagctatgtggcactgtagctttgccgtgaatgggatttctgaagatttgactgaggtctctcttggcctggaagaataacactgaaaaaacctgacgctgcggtcacttagcagaggctcaggttcttgccttgggaaacactactagctctgaccttccatacctcacttgggggagcacagggccccgctgggcctcctcaccaacggcagtgccaaaatcagcccccacatcaaggtggtgttctctgtgctttctctcgtccttccaaagtcggttctggcctaacgcatgtcccaacaccttgggttcatttgcccggtgaactcactttaagcattggattaacggaaactcccgaactacagacccctccctggtgggttgcatgaatgtgtctcattactgctgaaatgtcctcacatctctttcactgttcttcagagctttctggctctctttcccccacaaaattcgacatatttaaaaatctccgtgtggctttaaaaaatggttttttgtttttttgtttttttgaggtgggagaggatgtgtgaaaatcttttccagggaaatgggttcgctgcagaggtaaggatgtgttcctgtatcgatctgcagacacccagaaggtgggtgcacactgcatgcttgggggtgccaagggattcgagacctccaacatacttgtctgaaggtggtgattctggccatggcccctctgccaagcctgtgtgcgatgcccttggtgctttagtgcaagaagcctaggctcagaagcacagcagcgccatctttccgtttcaggggttgtgatgaaggccaaggaaaaacatttatctttactattttacctacgtataaagttttagttcattgggtgtgcgaaacaccctttttatcacttttaaatttgcactttattttttttcttccatgcttgttctctggacatttggggatgtgagtgttagagctggtgagagaggagtcaggtggccttcccaccgatggtcctggcctccacctgccctctcttccctgcctgatcaccgctttccaatttgcccttcagagaacttaagtcaaggagagttgaaattcacaggccagggcacatcttttatttatttcattatgttggccaacagaacttgattgtaaataataataaagaaatctgttatatacttttcaaactcca

SEQ ID NO: 110435 - DNA, 3405 bp, Homo sapiens
  Payload ID: 1667
  Gene Symbol: ATG16L1
  Gene Name: autophagy related 16-like 1
  Uniprot ID: Q676U5
  ENST ID: ENST00000392017
  CDS Start-End: 258-2081
actagcgagcgccctgcgtaggcaccggctcctgagcccgtgcttcgggtgagggggcgggtcttccggccctctcgaaaatcatttccggcatgagccggaagaccgtcccggatggcctcggggactgccagtgtgtggaggtgagctccgggattgccggcattcccgcttctgctggttgcttcatgctgcaggctgcggccgtcagccctcgctcgcattggtggcgctgaggtgccggggcagcaagtgacatgtcgtcgggcctccgcgccgctgacttcccccgctggaagcgccacatctcggagcaactgaggcgccgggaccggctgcagagacaggcgttcgaggagatcatcctgcagtataacaaattgctggaaaagtcagatcttcattcagtgttggcccagaaactacaggctgaaaagcatgacgtaccaaacaggcacgagataagtcccggacatgatggcacatggaatgacaatcagctacaagaaatggcccaactgaggattaagcaccaagaggaactgactgaattacacaagaaacgtggggagttagctcaactggtgattgacctgaataaccaaatgcagcggaaggacagggagatgcagatgaatgaagcaaaaattgcagaatgtttgcagactatctctgacctggagacggagtgcctagacctgcgcactaagctttgtgaccttgaaagagccaaccagaccctgaaggatgaatatgatgccctgcagatcacttttactgccttggagggaaaactgaggaaaactacggaagagaaccaggagctggtcaccagatggatggctgagaaagcccaggaagccaatcggcttaatgcagagaatgaaaaagactccaggaggcggcaagcccggctgcagaaagagcttgcagaagcagcaaaggaacctctaccagtcgaacaggatgatgacattgaggtcattgtggatgaaacttctgatcacacagaagagacctctcctgtgcgagccatcagcagagcagccactaagcgactctcgcagcctgctggaggccttctggattctatcactaatatctttgggagacgctctgtctcttccttcccagtcccccaggacaatgtggatactcatcctggttctggtaaagaagtgagggtaccagctactgccttgtgtgtcttcgatgcacatgatggggaagtcaacgctgtgcagttcagtccaggttcccggttactggccactggaggcatggaccgcagggttaagctttgggaagtatttggagaaaaatgtgagttcaagggttccctatctggcagtaatgcaggaattacaagcattgaatttgatagtgctggatcttacctcttagcagcttcaaatgattttgcaagccgaatctggactgtggatgattatcgattacggcacacactcacgggacacagtgggaaagtgctgtctgctaagttcctgctggacaatgcgcggattgtctcaggaagtcacgaccggactctcaaactctgggatctacgcagcaaagtctgcataaagacagtgtttgcaggatccagttgcaatgatattgtctgcacagagcaatgtgtaatgagtggacattttgacaagaaaattcgtttctgggacattcgatcagagagcatagttcgagagatggagctgttgggaaagattactgccctggacttaaacccagaaaggactgagctcctgagctgctcccgtgatgacttgctaaaagttattgatctccgaacaaatgctatcaagcagacattcagtgcacctgggttcaagtgcggctctgactggaccagagttgtcttcagccctgatggcagttacgtggcggcaggctctgctgagggctctctgtatatctggagtgtgctcacagggaaagtggaaaaggttctttcaaagcagcacagctcatccatcaatgcggtggcgtggtcgccctctggctcgcacgttgtcagtgtggacaaaggatgcaaagctgtgctgtgggcacagtactgacggggctctcagggctgggaggaccccagtgccctcctcagaagaagcacatgggctcctgcagccctgtcctggcaggtgatgtgctgggtatagcatggacctcccagagaagctcaagctatgtggcactgtagctttgccgtgaatgggatttctgaagatttgactgaggtctctcttggcctggaagaataacactgaaaaaacctgacgctgcggtcacttagcagaggctcaggttcttgccttgggaaacactactagctctgaccttccatacctcacttgggggagcacagggccccgctgggcctcctcaccaacggcagtgccaaaatcagcccccacatcaaggtggtgttctctgtgctttctctcgtccttccaaagtcggttctggcctaacgcatgtcccaacaccttgggttcatttgcccggtgaactcactttaagcattggattaacggaaactcccgaactacagacccctccctggtgggttgcatgaatgtgtctcattactgctgaaatgtcctcacatctctttcactgttcttcagagctttctggctctctttcccccacaaaattcgacatatttaaaaatctccgtgtggctttaaaaaatggttttttgtttttttgtttttttgaggtgggagaggatgtgtgaaaatcttttccagggaaatgggttcgctgcagaggtaaggatgtgttcctgtatcgatctgcagacacccagaaggtgggtgcacactgcatgcttgggggtgccaagggattcgagacctccaacatacttgtctgaaggtggtgattctggccatggcccctctgccaagcctgtgtgcgatgcccttggtgctttagtgcaagaagcctaggctcagaagcacagcagcgccatctttccgtttcaggggttgtgatgaaggccaaggaaaaacatttatctttactattttacctacgtataaagttttagttcattgggtgtgcgaaacaccctttttatcacttttaaatttgcactttattttttttcttccatgcttgttctctggacatttggggatgtgagtgttagagctggtgagagaggagtcaggtggccttcccaccgatggtcctggcctccacctgccctctcttccctgcctgatcaccgctttccaatttgcccttcagagaacttaagtcaaggagagttgaaattcacaggccagggcacatcttttatttatttcattatgttggccaacagaacttgattgtaaataataataaagaaatctgttatatacttttcaaactcca

SEQ ID NO: 110436 - DNA, 3313 bp, Homo sapiens
  Payload ID: 1667
  Gene Symbol: ATG16L1
  Gene Name: autophagy related 16-like 1
  ENST ID: ENST00000392018
  CDS Start-End: 115-1989
gtgagctccgggattgccggcattcccgcttctgctggttgcttcatgctgcaggctgcggccgtcagccctcgctcgcattggtggcgctgaggtgccggggcagcaagtgacatgtcgtcgggcctccgcgccgctgacttcccccgctggaagcgccacatctcggagcaactgaggcgccgggaccggctgcagagacaggcgttcgaggagatcatcctgcagtataacaaattgctggaaaagtcagatcttcattcagtgttggcccagaaactacaggctgaaaagcatgacgtaccaaacaggcacgagataagtcccggacatgatggcacatggaatgacaatcagctacaagaaatggcccaactgaggattaagcaccaagaggaactgactgaattacacaagaaacgtggggagttagctcaactggtgattgacctgaataaccaaatgcagcggaaggacagggagatgcagatgaatgaagcaaaaattgcagaatgtttgcagactatctctgacctggagacggagtgcctagacctgcgcactaagctttgtgaccttgaaagagccaaccagaccctgaaggatgaatatgatgccctgcagatcacttttactgccttggagggaaaactgaggaaaactacggaagagaaccaggagctggtcaccagatggatggctgagaaagcccaggaagccaatcggcttaatgcagagaatgaaaaagactccaggaggcggcaagcccggctgcagaaagagcttgcagaagcagcaaaggaacctctaccagtcgaacaggatgatgacattgaggtcattgtggatgaaacttctgatcacacagaagagacctctcctgtgcgagccatcagcagagcagccactaagcgactctcgcagcctgctggaggccttctggattctatcactaatatctttggtctgtccgagtctccccttttgggacatcattcttcttctgatgctgccaggagacgctctgtctcttccttcccagtcccccaggacaatgtggatactcatcctggttctggtaaagaagtgagggtaccagctactgccttgtgtgtcttcgatgcacatgatggggaagtcaacgctgtgcagttcagtccaggttcccggttactggccactggaggcatggaccgcagggttaagctttgggaagtatttggagaaaaatgtgagttcaagggttccctatctggcagtaatgcaggaattacaagcattgaatttgatagtgctggatcttacctcttagcagcttcaaatgattttgcaagccgaatctggactgtggatgattatcgattacggcacacactcacgggacacagtgggaaagtgctgtctgctaagttcctgctggacaatgcgcggattgtctcaggaagtcacgaccggactctcaaactctgggatctacgcagcaaagtctgcataaagacagtgtttgcaggatccagttgcaatgatattgtctgcacagagcaatgtgtaatgagtggacattttgacaagaaaattcgtttctgggacattcgatcagagagcatagttcgagagatggagctgttgggaaagattactgccctggacttaaacccagaaaggactgagctcctgagctgctcccgtgatgacttgctaaaagttattgatctccgaacaaatgctatcaagcagacattcagtgcacctgggttcaagtgcggctctgactggaccagagttgtcttcagccctgatggcagttacgtggcggcaggctctgctgagggctctctgtatatctggagtgtgctcacagggaaagtggaaaaggttctttcaaagcagcacagctcatccatcaatgcggtggcgtggtcgccctctggctcgcacgttgtcagtgtggacaaaggatgcaaagctgtgctgtgggcacagtactgacggggctctcagggctgggaggaccccagtgccctcctcagaagaagcacatgggctcctgcagccctgtcctggcaggtgatgtgctgggtatagcatggacctcccagagaagctcaagctatgtggcactgtagctttgccgtgaatgggatttctgaagatttgactgaggtctctcttggcctggaagaataacactgaaaaaacctgacgctgcggtcacttagcagaggctcaggttcttgccttgggaaacactactagctctgaccttccatacctcacttgggggagcacagggccccgctgggcctcctcaccaacggcagtgccaaaatcagcccccacatcaaggtggtgttctctgtgctttctctcgtccttccaaagtcggttctggcctaacgcatgtcccaacaccttgggttcatttgcccggtgaactcactttaagcattggattaacggaaactcccgaactacagacccctccctggtgggttgcatgaatgtgtctcattactgctgaaatgtcctcacatctctttcactgttcttcagagctttctggctctctttcccccacaaaattcgacatatttaaaaatctccgtgtggctttaaaaaatggttttttgtttttttgtttttttgaggtgggagaggatgtgtgaaaatcttttccagggaaatgggttcgctgcagaggtaaggatgtgttcctgtatcgatctgcagacacccagaaggtgggtgcacactgcatgcttgggggtgccaagggattcgagacctccaacatacttgtctgaaggtggtgattctggccatggcccctctgccaagcctgtgtgcgatgcccttggtgctttagtgcaagaagcctaggctcagaagcacagcagcgccatctttccgtttcaggggttgtgatgaaggccaaggaaaaacatttatctttactattttacctacgtataaagttttagttcattgggtgtgcgaaacaccctttttatcacttttaaatttgcactttattttttttcttccatgcttgttctctggacatttggggatgtgagtgttagagctggtgagagaggagtcaggtggccttcccaccgatggtcctggcctccacctgccctctcttccctgcctgatcaccgctttccaatttgcccttcagagaacttaagtcaaggagagttgaaattcacaggccagggcacatcttttatttatttcattatgttggccaacagaacttgattgtaaataataataaagaaatctgttatatacttttcaaactcca

SEQ ID NO: 110437 - DNA, 3213 bp, Homo sapiens
  Payload ID: 1667
  Gene Symbol: ATG16L1
  Gene Name: autophagy related 16-like 1
  Uniprot ID: Q676U5
  ENST ID: ENST00000392020
  CDS Start-End: 123-1889
gtgtggaggtgagctccgggattgccggcattcccgcttctgctggttgcttcatgctgcaggctgcggccgtcagccctcgctcgcattggtggcgctgaggtgccggggcagcaagtgacatgtcgtcgggcctccgcgccgctgacttcccccgctggaagcgccacatctcggagcaactgaggcgccgggaccggctgcagagacaggcgttcgaggagatcatcctgcagtataacaaattgctggaaaagtcagatcttcattcagtgttggcccagaaactacaggctgaaaagcatgacgtaccaaacaggcacgagataagtcccggacatgatggcacatggaatgacaatcagctacaagaaatggcccaactgaggattaagcaccaagaggaactgactgaattacacaagaaacgtggggagttagctcaactggtgattgacctgaataaccaaatgcagcggaaggacagggagatgcagatgaatgaagcaaaaattgcagaatgtttgcagactatctctgacctggagacggagtgcctagacctgcgcactaagctttgtgaccttgaaagagccaaccagaccctgaaggatgaatatgatgccctgcagatcacttttactgccttggagggaaaactgaggaaaactacggaagagaaccaggagctggtcaccagatggatggctgagaaagcccaggaagccaatcggcttaatgcagagaatgaaaaagactccaggaggcggcaagcccggctgcagaaagagcttgcagaagcagcaaaggaacctctaccagtcgaacaggatgatgacattgaggtcattgtggatgaaacttctgatcacacagaagagacctctcctgtgcgagccatcagcagagcagccacgagacgctctgtctcttccttcccagtcccccaggacaatgtggatactcatcctggttctggtaaagaagtgagggtaccagctactgccttgtgtgtcttcgatgcacatgatggggaagtcaacgctgtgcagttcagtccaggttcccggttactggccactggaggcatggaccgcagggttaagctttgggaagtatttggagaaaaatgtgagttcaagggttccctatctggcagtaatgcaggaattacaagcattgaatttgatagtgctggatcttacctcttagcagcttcaaatgattttgcaagccgaatctggactgtggatgattatcgattacggcacacactcacgggacacagtgggaaagtgctgtctgctaagttcctgctggacaatgcgcggattgtctcaggaagtcacgaccggactctcaaactctgggatctacgcagcaaagtctgcataaagacagtgtttgcaggatccagttgcaatgatattgtctgcacagagcaatgtgtaatgagtggacattttgacaagaaaattcgtttctgggacattcgatcagagagcatagttcgagagatggagctgttgggaaagattactgccctggacttaaacccagaaaggactgagctcctgagctgctcccgtgatgacttgctaaaagttattgatctccgaacaaatgctatcaagcagacattcagtgcacctgggttcaagtgcggctctgactggaccagagttgtcttcagccctgatggcagttacgtggcggcaggctctgctgagggctctctgtatatctggagtgtgctcacagggaaagtggaaaaggttctttcaaagcagcacagctcatccatcaatgcggtggcgtggtcgccctctggctcgcacgttgtcagtgtggacaaaggatgcaaagctgtgctgtgggcacagtactgacggggctctcagggctgggaggaccccagtgccctcctcagaagaagcacatgggctcctgcagccctgtcctggcaggtgatgtgctgggtatagcatggacctcccagagaagctcaagctatgtggcactgtagctttgccgtgaatgggatttctgaagatttgactgaggtctctcttggcctggaagaataacactgaaaaaacctgacgctgcggtcacttagcagaggctcaggttcttgccttgggaaacactactagctctgaccttccatacctcacttgggggagcacagggccccgctgggcctcctcaccaacggcagtgccaaaatcagcccccacatcaaggtggtgttctctgtgctttctctcgtccttccaaagtcggttctggcctaacgcatgtcccaacaccttgggttcatttgcccggtgaactcactttaagcattggattaacggaaactcccgaactacagacccctccctggtgggttgcatgaatgtgtctcattactgctgaaatgtcctcacatctctttcactgttcttcagagctttctggctctctttcccccacaaaattcgacatatttaaaaatctccgtgtggctttaaaaaatggttttttgtttttttgtttttttgaggtgggagaggatgtgtgaaaatcttttccagggaaatgggttcgctgcagaggtaaggatgtgttcctgtatcgatctgcagacacccagaaggtgggtgcacactgcatgcttgggggtgccaagggattcgagacctccaacatacttgtctgaaggtggtgattctggccatggcccctctgccaagcctgtgtgcgatgcccttggtgctttagtgcaagaagcctaggctcagaagcacagcagcgccatctttccgtttcaggggttgtgatgaaggccaaggaaaaacatttatctttactattttacctacgtataaagttttagttcattgggtgtgcgaaacaccctttttatcacttttaaatttgcactttattttttttcttccatgcttgttctctggacatttggggatgtgagtgttagagctggtgagagaggagtcaggtggccttcccaccgatggtcctggcctccacctgccctctcttccctgcctgatcaccgctttccaatttgcccttcagagaacttaagtcaaggagagttgaaattcacaggccagggcacatcttttatttatttcattatgttggccaacagaacttgattgtaaataataataaagaaatctgttatatacttttcaaactcca

SEQ ID NO: 110438 - DNA, 3301 bp, Homo sapiens
  Payload ID: 1667
  Gene Symbol: ATG16L1
  Gene Name: autophagy related 16-like 1
  ENST ID: ENST00000392021
  CDS Start-End: 156-272
agaccgtcccggatggcctcggggactgccagtgtgtggaggtgagctccgggattgccggcattcccgcttctgctggttgcttcatgctgcaggctgcggccgtcagccctcgctcgcattggtggcgctgaggtgccggggcagcaagtgacatgtcgtcgggcctccgcgccgctgacttcccccgctggaagcgccacatctcggagcaactgaggcgccgggaccggctgcagagacaggcgttcgaggagatcatcctgcaataacaaattgctggaaaagtcagatcttcattcagtgttggcccagaaactacaggctgaaaagcatgacgtaccaaacaggcacgagataagtcccggacatgatggcacatggaatgacaatcagctacaagaaatggcccaactgaggattaagcaccaagaggaactgactgaattacacaagaaacgtggggagttagctcaactggtgattgacctgaataaccaaatgcagcggaaggacagggagatgcagatgaatgaagcaaaaattgcagaatgtttgcagactatctctgacctggagacggagtgcctagacctgcgcactaagctttgtgaccttgaaagagccaaccagaccctgaaggatgaatatgatgccctgcagatcacttttactgccttggagggaaaactgaggaaaactacggaagagaaccaggagctggtcaccagatggatggctgagaaagcccaggaagccaatcggcttaatgcagagaatgaaaaagactccaggaggcggcaagcccggctgcagaaagagcttgcagaagcagcaaaggaacctctaccagtcgaacaggatgatgacattgaggtcattgtggatgaaacttctgatcacacagaagagacctctcctgtgcgagccatcagcagagcagccactaagcgactctcgcagcctgctggaggccttctggattctatcactaatatctttgggagacgctctgtctcttccttcccagtcccccaggacaatgtggatactcatcctggttctggtaaagaagtgagggtaccagctactgccttgtgtgtcttcgatgcacatgatggggaagtcaacgctgtgcagttcagtccaggttcccggttactggccactggaggcatggaccgcagggttaagctttgggaagtatttggagaaaaatgtgagttcaagggttccctatctggcagtaatgcaggaattacaagcattgaatttgatagtgctggatcttacctcttagcagcttcaaatgattttgcaagccgaatctggactgtggatgattatcgattacggcacacactcacgggacacagtgggaaagtgctgtctgctaagttcctgctggacaatgcgcggattgtctcaggaagtcacgaccggactctcaaactctgggatctacgcagcaaagtctgcataaagacagtgtttgcaggatccagttgcaatgatattgtctgcacagagcaatgtgtaatgagtggacattttgacaagaaaattcgtttctgggacattcgatcagagagcatagttcgagagatggagctgttgggaaagattactgccctggacttaaacccagaaaggactgagctcctgagctgctcccgtgatgacttgctaaaagttattgatctccgaacaaatgctatcaagcagacattcagtgcacctgggttcaagtgcggctctgactggaccagagttgtcttcagccctgatggcagttacgtggcggcaggctctgctgagggctctctgtatatctggagtgtgctcacagggaaagtggaaaaggttctttcaaagcagcacagctcatccatcaatgcggtggcgtggtcgccctctggctcgcacgttgtcagtgtggacaaaggatgcaaagctgtgctgtgggcacagtactgacggggctctcagggctgggaggaccccagtgccctcctcagaagaagcacatgggctcctgcagccctgtcctggcaggtgatgtgctgggtatagcatggacctcccagagaagctcaagctatgtggcactgtagctttgccgtgaatgggatttctgaagatttgactgaggtctctcttggcctggaagaataacactgaaaaaacctgacgctgcggtcacttagcagaggctcaggttcttgccttgggaaacactactagctctgaccttccatacctcacttgggggagcacagggccccgctgggcctcctcaccaacggcagtgccaaaatcagcccccacatcaaggtggtgttctctgtgctttctctcgtccttccaaagtcggttctggcctaacgcatgtcccaacaccttgggttcatttgcccggtgaactcactttaagcattggattaacggaaactcccgaactacagacccctccctggtgggttgcatgaatgtgtctcattactgctgaaatgtcctcacatctctttcactgttcttcagagctttctggctctctttcccccacaaaattcgacatatttaaaaatctccgtgtggctttaaaaaatggttttttgtttttttgtttttttgaggtgggagaggatgtgtgaaaatcttttccagggaaatgggttcgctgcagaggtaaggatgtgttcctgtatcgatctgcagacacccagaaggtgggtgcacactgcatgcttgggggtgccaagggattcgagacctccaacatacttgtctgaaggtggtgattctggccatggcccctctgccaagcctgtgtgcgatgcccttggtgctttagtgcaagaagcctaggctcagaagcacagcagcgccatctttccgtttcaggggttgtgatgaaggccaaggaaaaacatttatctttactattttacctacgtataaagttttagttcattgggtgtgcgaaacaccctttttatcacttttaaatttgcactttattttttttcttccatgcttgttctctggacatttggggatgtgagtgttagagctggtgagagaggagtcaggtggccttcccaccgatggtcctggcctccacctgccctctcttccctgcctgatcaccgctttccaatttgcccttcagagaacttaagtcaaggagagttgaaattcacaggccagggcacatcttttatttatttcattatgttggccaacagaacttgattgtaaataataataaagaaatctgttatatacttttcaaactcca

SEQ ID NO: 110439 - DNA, 589 bp, Homo sapiens
  Payload ID: 1667
  Gene Symbol: ATG16L1
  Gene Name: autophagy related 16-like 1
  ENST ID: ENST00000431917
  CDS Start-End: 424-589
ttttctgacgggctggctggcctgcactggtttcttagcttttctgagcctcaatctcctcatctgtacaatggaaagaaggctacctggtgtggttgtcgaagattcactgagctcatctctgcaaagcccctggctcggcgcctggccctgctgtaggggttcagtgagtgttatcccgttccctcatccttcgagacaaggcagtgagggagggcaccgtgcacagcatcggaaaagaagcaaatagaagagctttggggatgcaggaacgtccaaagcagagataacaaattgctggaaaagtcagatcttcattcagtgttggcccagaaactacaggctgaaaagcatgacgtaccaaacaggcacgagataagtcccggacatgatggcacatggaatgacaatcagctacaagaaatggcccaactgaggattaagcaccaagaggaactgactgaattacacaagaaacgtggggagttagctcaactggtgattgacctgaataaccaaatgcagcggaaggacagggagatgcagatgaatgaagcaaaaattgcagaatgtttgcagactatctctg

SEQ ID NO: 110440 - DNA, 644 bp, Homo sapiens
  Payload ID: 1667
  Gene Symbol: ATG16L1
  Gene Name: autophagy related 16-like 1
  ENST ID: ENST00000419681
  CDS Start-End: 153-644
ccgtcccggatggcctcggggactgccagtgtgtggaggtgagctccgggattgccggcattcccgcttctgctggttgcttcatgctgcaggctgcggccgtcagccctcgctcgcattggtggcgctgaggtgccggggcagcaagtgacatgtcgtcgggcctccgcgccgctgacttcccccgctggaagcgccacatctcggagcaactgaggcgccgggaccggctgcagagacaggcgttcgaggagatcatcctgcagtataacaaattgctggaaaagtcagatcttcattcagtgttggcccagaaactacaggctgaaaagcatgacgtaccaaacaggcacgagataaggaggcggcaagcccggctgcagaaagagcttgcagaagcagcaaaggaacctctaccagtcgaacaggatgatgacattgaggtcattgtggatgaaacttctgatcacacagaagagacctctcctgtgcgagccatcagcagagcagccacgagacgctctgtctcttccttcccagtcccccaggacaatgtggatactcatcctggttctggtaaagaagtgagggtaccagctactgccttgtgtgtcttcgatgcacatgatggggaagtcaacgct

SEQ ID NO: 110441 - DNA, 691 bp, Homo sapiens
  Payload ID: 1667
  Gene Symbol: ATG16L1
  Gene Name: autophagy related 16-like 1
  ENST ID: ENST00000444735
  CDS Start-End: 159-691
ggaagaccgtcccggatggcctcggggactgccagtgtgtggaggtgagctccgggattgccggcattcccgcttctgctggttgcttcatgctgcaggctgcggccgtcagccctcgctcgcattggtggcgctgaggtgccggggcagcaagtgacatgtcgtcgggcctccgcgccgctgacttcccccgctggaagcgccacatctcggagcaactgaggcgccgggaccggctgcagagacaggcgttcgaggagatcatcctgcagtataacaaattgctggaaaagtcagatcttcattcagtgttggcccagaaactacaggctgaaaagcatgacgtaccaaacaggcacgagataaggaggcggcaagcccggctgcagaaagagcttgcagaagcagcaaaggaacctctaccagtcgaacaggatgatgacattgaggtcattgtggatgaaacttctgatcacacagaagagacctctcctgtgcgagccatcagcagagcagccactaagcgactctcgcagcctgctggaggccttctggattctatcactaatatctttggtctgtccgagtctccccttttgggacatcattcttcttctgatgctgccaggagacgctctgtctcttccttcccagtcccccaggacaatgtggatactcatcctggttctgg

SEQ ID NO: 110442 - DNA, 684 bp, Homo sapiens
  Payload ID: 1667
  Gene Symbol: ATG16L1
  Gene Name: autophagy related 16-like 1
  ENST ID: ENST00000417017
  CDS Start-End: 124-684
tgtgtggaggtgagctccgggattgccggcattcccgcttctgctggttgcttcatgctgcaggctgcggccgtcagccctcgctcgcattggtggcgctgaggtgccggggcagcaagtgacatgtcgtcgggcctccgcgccgctgacttcccccgctggaagcgccacatctcggagcaactgaggcgccgggaccggctgcagagacaggcgttcgaggagatcatcctgcagtataacaaattgctggaaaagtcagatcttcattcagtgttggcccagaaactacaggctgaaaagcatgacgtaccaaacaggcacgagataagtcccggacatgatggcacatggaatgacaatcagctacaagaaatggcccaactgaggattaagcaccaagaggaactgactgaattacacaagaaacgtggggagttagctcaactggtgattgacctgaataaccaaatgcagcggaaggacagggagatgcagatgaatgaagcaaagaggcggcaagcccggctgcagaaagagcttgcagaagcagcaaaggaacctctaccagtcgaacaggatgatgacattgaggtcattgtggatgaaacttctgatcacacagaagagacctctcctgtgcgagccatcagcagagcagccactaagcgactctcgcagcct

SEQ ID NO: 110443 - DNA, 3301 bp, Homo sapiens; identical to SEQ ID NO: 110438
  Payload ID: 1667
  Gene Symbol: ATG16L1
  Gene Name: autophagy related 16-like 1
  ENST ID: ENST00000631068
  CDS Start-End: 156-272

SEQ ID NO: 110444 - DNA, 684 bp, Homo sapiens; identical to SEQ ID NO: 110442
  Payload ID: 1667
  Gene Symbol: ATG16L1
  Gene Name: autophagy related 16-like 1
  ENST ID: ENST00000630596
  CDS Start-End: 124-684

SEQ ID NO: 110445 - DNA, 3313 bp, Homo sapiens; identical to SEQ ID NO: 110436
  Payload ID: 1667
  Gene Symbol: ATG16L1
  Gene Name: autophagy related 16-like 1
  ENST ID: ENST00000626639
  CDS Start-End: 115-1989

SEQ ID NO: 110446 - DNA, 691 bp, Homo sapiens; identical to SEQ ID NO: 110441
  Payload ID: 1667
  Gene Symbol: ATG16L1
  Gene Name: autophagy related 16-like 1
  ENST ID: ENST00000627513
  CDS Start-End: 159-691

SEQ ID NO: 110447 - DNA, 589 bp, Homo sapiens; identical to SEQ ID NO: 110439
  Payload ID: 1667
  Gene Symbol: ATG16L1
  Gene Name: autophagy related 16-like 1
  ENST ID: ENST00000629246
  CDS Start-End: 424-589

SEQ ID NO: 110448 - DNA, 2915 bp, Homo sapiens; identical to SEQ ID NO: 110433
  Payload ID: 1667
  Gene Symbol: ATG16L1
  Gene Name: autophagy related 16-like 1
  Uniprot ID: Q676U5
  ENST ID: ENST00000626623
  CDS Start-End: 258-1592

SEQ ID NO: 110449 - DNA, 644 bp, Homo sapiens; identical to SEQ ID NO: 110440
  Payload ID: 1667
  Gene Symbol: ATG16L1
  Gene Name: autophagy related 16-like 1
  ENST ID: ENST00000629673
  CDS Start-End: 153-644

SEQ ID NO: 110450 - DNA, 3213 bp, Homo sapiens; identical to SEQ ID NO: 110437
  Payload ID: 1667
  Gene Symbol: ATG16L1
  Gene Name: autophagy related 16-like 1
  Uniprot ID: Q676U5
  ENST ID: ENST00000630066
  CDS Start-End: 123-1889

SEQ ID NO: 110451 - DNA, 2767 bp, Homo sapiens; identical to SEQ ID NO: 110434
  Payload ID: 1667
  Gene Symbol: ATG16L1
  Gene Name: autophagy related 16-like 1
  Uniprot ID: Q676U5
  ENST ID: ENST00000630204
  CDS Start-End: 157-1443

SEQ ID NO: 110452 - DNA, 3405 bp, Homo sapiens; identical to SEQ ID NO: 110435
  Payload ID: 1667
  Gene Symbol: ATG16L1
  Gene Name: autophagy related 16-like 1
  Uniprot ID: Q676U5
  ENST ID: ENST00000625501
  CDS Start-End: 258-2081

SEQ ID NO: 110453 - DNA, 2243 bp, Homo sapiens
  Payload ID: 1668
  Gene Symbol: ATG16L2
  Gene Name: autophagy related 16-like 2
  Uniprot ID: Q8NAA4
  ENST ID: ENST00000321297
  CDS Start-End: 139-1998
ccaaagccctcttgggacaagccggggattccccgccgccgcccgccccctggcgtcacggagtccccgcgaggccccgccccggcctggcgccgtcctgggcgggaggaacgcgccgctaggcgggagagcgcggccatggcggggccgggcgtccccggtgcccccgcagcgcgctggaaacgccacatcgtgcggcagctgcggcttcgggaccgtacgcaaaaggcgcttttcctggagctggtgccggcctataaccatctcttagagaaggctgagctgctggacaagttctcaaagaagctgcagccggagccaaacagtgtcactcccaccacccaccagggcccctgggaggagtcagagcttgactcagaccaagtcccatcactggtcgcactgagggtgaagtggcaggaggaggaggaggggctccggctggtctgtggtgagatggcctaccaggtggtggagaagggcgcggccctgggcacgctggagtcggagctgcagcagaggcaaagcaggctggcagccctggaggcccgcgtggcgcagctgcgagaggcgcgggcgcagcaggcccagcaggtggaggagtggcgggcgcagaatgcggtgcagcgggcagcctacgaggcgctgcgcgcgcacgtcgggctccgggaggcggcactgcgcaggctccaggaagaggcgcgcgacctgctggagaggctcgtgcagcgcaaggcgcgcgccgcggccgagcgcaacctgcgcaacgagcgccgggagcgggccaagcaggcgcgggtgtcccaggagctgaagaaggctgccaagcggaccgtgagcatcagcgagggcccggacaccctaggcgatgggatgagggagagaagggagactctggctctggcccctgagccagagcccctggagaaggaagcttgtgagaagtggaagaggcccttcaggtctgcctcagccacctccctgacgctgtcccactgtgtggatgtggtgaaggggcttctggattttaagaagaggagaggtcactcaattgggggagcccctgagcagcgataccagatcatccctgtgtgtgtggctgcccgacttcctacccgggctcaggatgtgctggatgcccacctctctgaggtcaatgctgttcgttttggccccaacagcagcctcctggccactggaggggctgaccgcctgatccacctctggaatgttgtgggaagtcgcctggaggccaaccagaccctggagggagctggtggcagcatcaccagtgtggactttgacccctcgggctaccaggttttagcagcaacttacaaccaggctgcccagctctggaaggtgggggaggcacagtccaaggagacactgtctggacacaaggataaggtgacagctgccaaattcaagctaacgaggcaccaggcagtgactgggagccgcgaccggacagtgaaggagtgggacctcggccgtgcctattgctccaggaccatcaatgtcctttcctactgtaatgacgtggtgtgtggggaccatatcatcattagtggccacaatgaccagaagatccggttctgggacagcagggggccccactgcacccaggtcatccctgtgcagggccgggtcacctccctgagcctcagccacgaccaactgcacctgctcagctgttcccgagacaacacactcaaggtcatcgacctgcgtgtcagcaacatccgccaggtgttcagggccgatggcttcaagtgtggttctgactggaccaaagctgtgttcagcccggacagaagctatgcactggcaggctcctgtgatggggccctttacatctgggatgtggacaccgggaaactggagagcagactacagggaccccattgcgctgccgtcaacgccgtggcctggtgctactccgggagccacatggtgagcgtggaccagggcaggaaggttgtgctctggcagtagggccacgacctgcctgcctgggctggagctcttgcccgaagcctgaagcttccttcggcgccatgcaggggttggggttgggactggagctggccttgggatttaatggggaagaaggcctggcaggacctggcctgtttgtttaaaaatgaagtatgggttgggggattacgctagtttttctttgtatttttatctctatctcctcactttttctcccaaagtagaaaaaaatgatatctgaa

SEQ ID NO: 110454 - DNA, 2254 bp, Homo sapiens
  Payload ID: 1668
  Gene Symbol: ATG16L2
  Gene Name: autophagy related 16-like 2
  ENST ID: ENST00000435507
  CDS Start-End: 32-397
ggaacgcgccgctaggcgggagagcgcggccatggcggggccgggcgtccccggtgcccccgcagcgcgctggaaacgccacatcgtgcggcagctgcggcttcgggaccgtacgcaaaaggcgcttttcctggagctggtgccggcctataaccatctcttagagaaggctgagctgctggacaagttctcaaagaagctgcagccggagccaaacagtgtcactcccaccacccaccagggcccctgggaggagtcagagcttgactcagaccaagtcccatcactggtcgcactgagggtgaagtggcaggaggaggaggaggggctccggctggtctgtggtgagcttgcttttcaggaagggggcgggcaggtgagcagccgactcccttagcgccttcggccccggagggactggaggcctggaggggcctcagcgccgccgtgcccacctgtccgcccccagatggcctaccaggtggtggagaagggcgcggccctgggcacgctggagtcggagctgcagcagaggcaaagcaggctggcagccctggaggcccgcgtggcgcagctgcgagaggcgcgggcgcagcaggcccagcaggtggaggagtggcgggcgcagaatgcggtgcagcgggcagcctacgaggcgctgcgcgcgcacgtcgggctccgggaggcggcactgcgcaggctccaggaagaggcgcgcgacctgctggagaggctcgtgcagcgcaaggcgcgcgccgcggccgagcgcaacctgcgcaacgagcgccgggagcgggccaagcaggcgcgggtgtcccaggagctgaagaaggctgccaagcggaccgtgagcatcagcgagggcccggacaccctaggcgatgggatgagggagagaagggagactctggctctggcccctgagccagagcccctggagaaggaagcttgtgagaagtggaagaggcccttcaggtctgcctcagccacctccctgacgctgtcccactgtgtggatgtggtgaaggggcttctggattttaagaagaggagaggtcactcaattgggggagcccctgagcagcgataccagatcatccctgtgtgtgtggctgcccgacttcctacccgggctcaggatgtgctggatgcccacctctctgaggtcaatgctgttcgttttggccccaacagcagcctcctggccactggaggggctgaccgcctgatccacctctggaatgttgtgggaagtcgcctggaggccaaccagaccctggagggagctggtggcagcatcaccagtgtggactttgacccctcgggctaccaggttttagcagcaacttacaaccaggctgcccagctctggaaggtgggggaggcacagtccaaggagacactgtctggacacaaggataaggtgacagctgccaaattcaagctaacgaggcaccaggcagtgactgggagccgcgaccggacagtgaaggagtgggacctcggccgtgcctattgctccaggaccatcaatgtcctttcctactgtaatgacgtggtgtgtggggaccatatcatcattagtggccacaatgaccagaagatccggttctgggacagcagggggccccactgcacccaggtcatccctgtgcagggccgggtcacctccctgagcctcagccacgaccaactgcacctgctcagctgttcccgagacaacacactcaaggtcatcgacctgcgtgtcagcaacatccgccaggtgttcagggccgatggcttcaagtgtggttctgactggaccaaagctgtgttcagcccggacagaagctatgcactggcaggctcctgtgatggggccctttacatctgggatgtggacaccgggaaactggagagcagactacagggaccccattgcgctgccgtcaacgccgtggcctggtgctactccgggagccacatggtgagcgtggaccagggcaggaaggttgtgctctggcagtagggccacgacctgcctgcctgggctggagctcttgcccgaagcctgaagcttccttcggcgccatgcaggggttggggttgggactggagctggccttgggatttaatggggaagaaggcctggcaggacctggcctgtttgtttaaaaatgaagtatgggttgggggattacgctagtttttctttgtatttttatctctatctcctcactttttctcccaaagtagaaaaaaatgatatctg

SEQ ID NO: 110455 - DNA, 1575 bp, Homo sapiens
  Payload ID: 1668
  Gene Symbol: ATG16L2
  Gene Name: autophagy related 16-like 2
  ENST ID: ENST00000541367
  CDS Start-End: 1-1353
gcagggaggagtcgggcctcgccggtgtctggaagggaggggggcagcagccgccccctggaggaagggaccgggtctagccccgcctgcgtgcgaggcgccgcgccagggtctcaggatgctttttacccaacaagggccaagcaggcgcgggtgtcccaggagctgaagaaggctgccaagcggaccgtgagcatcagcgagggcccggacaccctaggcgatgggatgagggagagaagggagactctggctctggcccctgagccagagcccctggagaaggaagcttgtgagaagtggaagaggcccttcaggtctgcctcagccacctccctgacgctgtcccactgtgtggatgtggtgaaggggcttctggattttaagaagaggagaggtcactcaattgggggagcccctgagcagcgataccagatcatccctgtgtgtgtggctgcccgacttcctacccgggctcaggatgtgctggatgcccacctctctgaggtcaatgctgttcgttttggccccaacagcagcctcctggccactggaggggctgaccgcctgatccacctctggaatgttgtgggaagtcgcctggaggccaaccagaccctggagggagctggtggcagcatcaccagtgtggactttgacccctcgggctaccaggttttagcagcaacttacaaccaggctgcccagctctggaaggtgggggaggcacagtccaaggagacactgtctggacacaaggataaggtgacagctgccaaattcaagctaacgaggcaccaggcagtgactgggagccgcgaccggacagtgaaggagtgggacctcggccgtgcctattgctccaggaccatcaatgtcctttcctactgtaatgacgtggtgtgtggggaccatatcatcattagtggccacaatgaccagaagatccggttctgggacagcagggggccccactgcacccaggtcatccctgtgcagggccgggtcacctccctgagcctcagccacgaccaactgcacctgctcagctgttcccgagacaacacactcaaggtcatcgacctgcgtgtcagcaacatccgccaggtgttcagggccgatggcttcaagtgtggttctgactggaccaaagctgtgttcagcccggacagaagctatgcactggcaggctcctgtgatggggccctttacatctgggatgtggacaccgggaaactggagagcagactacagggaccccattgcgctgccgtcaacgccgtggcctggtgctactccgggagccacatggtgagcgtggaccagggcaggaaggttgtgctctggcagtagggccacgacctgcctgcctgggctggagctcttgcccgaagcctgaagcttccttcggcgccatgcaggggttggggttgggactggagctggccttgggatttaatggggaagaaggcctggcaggacctggcctgtttgtttaaaaatgaagtatgggttgggggattacgctagtttttctttgtatttttatctctatctcctcactttttctcccaa

SEQ ID NO: 110456 - DNA, 784 bp, Homo sapiens
  Payload ID: 1668
  Gene Symbol: ATG16L2
  Gene Name: autophagy related 16-like 2
  ENST ID: ENST00000537837
  CDS Start-End: 1-224
gggccaagcaggcgcgggtgtcccaggagctgaagaaggctgccaagcggaccgtgagcatcagcgagggcccggacaccctaggcgatgggatgagggagagaagggagactctggctctggcccctgagccagagcccctggagaaggaagcttgtgagaagtggaagaggcccttcagtctttccttgcaggtccctggtgtccaggccttggggcagtgaagaaaccgtggggaggggcatgagatgccagtccccaaagtccttgggagcccttgtgggccaagtcattgtaggacacaccctctcctgggcattgctgaggtcacccagtgagcctaggctcccccctcctcccatccccagcctgggggaaccttcagcgtctctcctccctgtaggccccggctcagcttcccaggaacttttgttggtctgcctcagccacctccctgacgctgtcccactgtgtggatgtggtgaaggggcttctggattttaagaagaggagaggtcactcaattgggggagcccctgagcagcgataccagatcatccctgtgtgtgtggctgcccgacttcctacccgggctcaggatgtgctggatgcccacctctctgaggtcaatgctgttcgttttggccccaacagcagcctcctggccactggaggggctgaccgcctgatccacctctggaatgttgtgggaagtcgcctggaggccaaccagaccctggagggagctggtggcagcatcaccagtgtggactttgacccctcg

SEQ ID NO: 110457 - DNA, 963 bp, Homo sapiens
  Payload ID: 1668
  Gene Symbol: ATG16L2
  Gene Name: autophagy related 16-like 2
  ENST ID: ENST00000535830
  CDS Start-End: 1-963
gaggaaaggccccgcccctgcagggaggagtcgggcctcgccggtgtctggaagggaggggggcagcagccgccccctggaggaagggaccgggtctagccccgcctgcgtgcgaggcgccgcgccagggtctcaggatgctttttacccaacaagggccaagcaggcgcgggtgtcccaggagctgaagaaggctgccaagcggaccgtgagcatcagcgagggcccggacaccctaggcgatgggatgagggagagaagggagactctggctctggcccctgagccagagcccctggagaaggaagcttgtgagaagtggaagaggcccttcaggtctgcctcagccacctccctgacgctgtcccactgtgtggatgtggtgaaggggcttctggattttaagaagaggagaggtcactcaattgggggagcccctgagcagcgataccagatcatccctgtgtgtgtggctgcccgacttcctacccgggctcaggatgtgctggatgcccacctctctgaggtcaatgctgttcgttttggccccaacagcagcctcctggccactggaggggctgaccgcctgatccacctctggaatgttgtgggaagtcgcctggaggccaaccagaccctggagggagctggtggcagcatcaccagtgtggactttgacccctcgggctaccaggttttagcagcaacttacaaccaggctgcccagctctggaaggtgggggaggcacagtccaaggagacactgtctggacacaaggataaggtgacagctgccaaattcaagctaacgaggcaccaggcagtgactgggagccgcgaccggacagtgaaggagtgggacctcggccgtgcctattgctccaggaccatcaatgtcctttcctactgtaatgacgtggtgtgtggggaccatatcatcattagtggccacaatgaccagaa

SEQ ID NO: 110458 - DNA, 295 bp, Homo sapiens
  Payload ID: 1668
  Gene Symbol: ATG16L2
  Gene Name: autophagy related 16-like 2
  ENST ID: ENST00000541554
  CDS Start-End: 1-295
agcaggcgcgggtgtcccaggagctgaagaaggctgccaagcggaccgtgagcatcagcgagggcccggacaccctaggcgatgggatgagggagagaagggagactctggctctggcccctgagccagagcccctggagaaggaagcttgtgagaagtggaagaggcccttcagggggccccactgcacccaggtcatccctgtgcagggccgggtcacctccctgagcctcagccacgaccaactgcacctgctcagctgttcccgagacaacacactcaaggtcatcgacct

SEQ ID NO: 110459 - DNA, 1614 bp, Homo sapiens
  Payload ID: 1668
  Gene Symbol: ATG16L2
  Gene Name: autophagy related 16-like 2
  ENST ID: ENST00000534905
  CDS Start-End: 41-535
tgggcgggaggaacgcgccgctaggcgggagagcgcggccatggcggggccgggcgtccccggtgcccccgcagcgcgctggaaacgccacatcgtgcggcagctgcggcttcgggaccgtacgcaaaaggcgcttttcctggagctggtgccggcctataaccatctcttagagaaggctgagctgctggacaagttctcaaagaagctgcagccggagccaaacagtgtcactcccaccacccaccagggcccctgggaggagtcagagcttgactcagaccaagtcccatcactggtcgcactgagggtgaagtggcaggaggaggaggaggggctccggctggtctgtggtgagggggccccactgcacccaggtcatccctgtgcagggccgggtcacctccctgagcctcagccacgaccaactgcacctgctcagctgttcccgagacaacacactcaaggtcatcgacctgcgtgtcagcaacatccgccaggtgttcagggccgatggcttcaagtgtggttctgactggaccaaagctgtgttcaggtacctgaatctctctcatccatggagtgtcaccattttctgaggctgaaagttcttccactagcaccgatgggaaaactccaatacgcccattgaattccccttcccagaagccatcatcatcttggttttctttgttcaagatacggattattgctccctcaggaaaagataactcatcatctgtctggccctcataatcataaagtgctttcacaaaacatactagggagcaagagaaaaacaaatctggtaagataattaacagccggttgcttttgcaaccacccctatgctcacatgacaactaaaagagcatcatacagaataggattaaagttgtaatttttttactcactgatgaatgattaactttagggttctactgtgcaggacaaacgtgaccatataaagaaaagcatattataggacaggaggaaagttgtgctttttatcctactgaaggcttactccagggcaatacagtttaggtcaaacgtgaccaaataaagagtgccttgtttcagtctttaccactggcatctccgttgaggctgcctgaaacgagttctgcttccgtggaattgctggacgtgtgtgaccgactgtccaaagcggccagggactgcagcatgctcaggaggctgttcgaggtgggaaactgtaggtacttttctggcacataacccacttggccaactttatttcgagcctgggtaaaagacatgtgacaaaacaagtttacacacacaatttagacagggcacaacaaagaccaaaacaaactcctaaaaatgtcacaagaaagggcgatatgagcaaaggaatatacctttacccagtcttccatatctccatcttcaatcacttctaacacctcatgttcctcaatggtcaactcatctggttgagaagcctgcagtgtaggatggtcatggacaaaattaaaaaggttagataaggagcagatgtgagctgatcatgacaaaaactggggatcaaaatattgaaatgattttgagaaacatgttgaacataaaaatttaaatgctgtaaaa

SEQ ID NO: 110460 - DNA, 1400 bp, Homo sapiens
  Payload ID: 1668
  Gene Symbol: ATG16L2
  Gene Name: autophagy related 16-like 2
  ENST ID: ENST00000540222
  CDS Start-End: 1-1192
cgccgcgccagggtctcaggatgctttttacccaacaagggccaagcaggcgcgggtgtcccaggagctgaagaaggctgccaagcggaccgtgagcatcagcgagggcccggacaccctaggcgatgggatgagggagagaagggagactctggctctggcccctgagccagagcccctggagaaggaagcttgtgagaagtggaagaggcccttcagttttaagaagaggagaggtcactcaattgggggagcccctgagcagcgataccagatcatccctgtgtgtgtggctgcccgacttcctacccgggctcaggatgtgctggatgcccacctctctgaggtcaatgctgttcgttttggccccaacagcagcctcctggccactggaggggctgaccgcctgatccacctctggaatgttgtgggaagtcgcctggaggccaaccagaccctggagggagctggtggcagcatcaccagtgtggactttgacccctcgggctaccaggttttagcagcaacttacaaccaggctgcccagctctggaaggtgggggaggcacagtccaaggagacactgtctggacacaaggataaggtgacagctgccaaattcaagctaacgaggcaccaggcagtgactgggagccgcgaccggacagtgaaggagtgggacctcggccgtgcctattgctccaggaccatcaatgtcctttcctactgtaatgacgtggtgtgtggggaccatatcatcattagtggccacaatgaccagaagatccggttctgggacagcagggggccccactgcacccaggtcatccctgtgcagggccgggtcacctccctgagcctcagccacgaccaactgcacctgctcagctgttcccgagacaacacactcaaggtcatcgacctgcgtgtcagcaacatccgccaggtgttcagggccgatggcttcaagtgtggttctgactggaccaaagctgtgttcagcccggacagaagctatgcactggcaggctcctgtgatggggccctttacatctgggatgtggacaccgggaaactggagagcagactacagggaccccattgcgctgccgtcaacgccgtggcctggtgctactccgggagccacatggtgagcgtggaccagggcaggaaggttgtgctctggcagtagggccacgacctgcctgcctgggctggagctcttgcccgaagcctgaagcttccttcggcgccatgcaggggttggggttgggactggagctggccttgggatttaatggggaagaaggcctggcaggacctggcctgtttgtttaaaaatgaagtatgggttgggggattacgctagtttttctttgtatttttatctctatctcctc

SEQ ID NO: 110461 - DNA, 1456 bp, Homo sapiens
  Payload ID: 1668
  Gene Symbol: ATG16L2
  Gene Name: autophagy related 16-like 2
  ENST ID: ENST00000538973
  CDS Start-End: 1-1251
gcagggaggagtcgggcctcgccggtgtctggaagggaggggggcagcagccgccccctggaggaagggaccgggtctagccccgcctgcgtgcgaggcgccgcgccagggtctcaggatgctttttacccaacaagggccaagcaggcgcgggtgtcccaggagctgaagaaggctgccaagcggaccgtgagcatcagcgagggcccggacaccctaggcgatgggatgagggagagaagggagactctggctctggcccctgagccagagcccctggagaaggaagcttgtgagaagtggaagaggcccttcaggtctgcctcagccacctccctgacgctgtcccactgtgtggatgtggtgaaggggcttctggattttaagaagaggagaggtcactcaattgggggagcccctgagcagcgataccagatcatccctgtgtgtgtggctgcccgacttcctacccgggctcaggatgtgctggatgcccacctctctgaggtcaatgctgttcgttttggccccaacagcagcctcctggccactggaggggctgaccgcctgatccacctctggaatgttgtgggaagtcgcctggaggccaaccagaccctggagggagctggtggcagcatcaccagtgtggactttgacccctcgggctaccaggttttagcagcaacttacaaccaggctgcccagctctggaaggtgggggaggcacagtccaaggagacactgtctggacacaaggataaggtgacagctgccaaattcaagctaacgaggcaccaggcagtgactgggagccgcgaccggacagtgaaggagtgggacctcggccgtgcctattgctccaggaccatcaatgtcctttcctactgtaatgacgtggtgtgtggggaccatatcatcattagtggccacaatgaccagaagatccggttctgggacagcagggggccccactgcacccaggtcatccctgtgcagggccgggtcacctccctgagcctcagccacgaccaactgcacctgctcagctgttcccgagacaacacactcaaggtcatcgacctgcgtgtcagcaacatccgccaggtgttcagggccgatggcttcaagtgtggttctgactggaccaaagctgtgttcagcgctgccgtcaacgccgtggcctggtgctactccgggagccacatggtgagcgtggaccagggcaggaaggttgtgctctggcagtagggccacgacctgcctgcctgggctggagctcttgcccgaagcctgaagcttccttcggcgccatgcaggggttggggttgggactggagctggccttgggatttaatggggaagaaggcctggcaggacctggcctgtttgtttaaaaatgaagtatgggttgggggattacgctagtttttctttgtatttttatctctatctc

SEQ ID NO: 110462 - DNA, 3731 bp, Homo sapiens
  Payload ID: 1668
  Gene Symbol: ATG16L2
  Gene Name: autophagy related 16-like 2
  ENST ID: ENST00000544490
  CDS Start-End: 20-340
taggcgggagagcgcggccatggcggggccgggcgtccccggtgcccccgcagcgcgctggaaacgccacatcgtgcggcagctgcggcttcgggaccgtacgcaaaaggcgcttttcctggagctggtgccggcctataaccatctcttagagaaggctgagctgctggacaagttctcaaagaagctgcagccggagccaaacagtgtcactcccaccacccaccagggcccctgggaggagtcagagcttgactcagaccaagtcccatcactggtcgcactgagggtgaagtggcaggaggaggaggaggggctccggctggtctgtggtgagtgagagtggcagtaccagcctcctggtgtggtgaggatggaaggagcgtgtagcctgctgggaacatcatggcgcccgagggccggatgggcatttggcagcctctgcgcgaggagtcctcgcagtggttatgcatggtgctgggagcggagcgctggcttcccactcttcaggcgaggcagtggagcgggttgctcttgccagagaggttcctagtagggtcgcagagaaacgaagcggcacggcgaggattgggacccagggctgactccagagcccgagggccttccactgctccacaaacagcagcgcgtccctgtgcaaggtcccaaacctgtgtggggctcagcttgcttttcaggaagggggcgggcaggtgagcagccgactcccttagcgccttcggccccggagggactggaggcctggaggggcctcagcgccgccgtgcccacctgtccgcccccagatggcctaccaggtggtggagaagggcgcggccctgggcacgctggagtcggagctgcagcagaggcaaagcaggctggcagccctggaggcccgcgtggcgcagctgcgagaggcgcgggcgcagcaggcccagcaggtggaggagtggcgggcgcagaatgcggtgcagcgggcagcctacgaggcgctgcgcgcgcacgtcgggctccgggaggcggcactgcgcaggctccaggaagaggcgcgcgacctgctggagaggctcgtgcagcgcaaggcgcgcgccgcggccgagcgcaacctgcgcaacgagcgccgggagcgggccaagcaggcgcgggtgtcccaggagctgaagaaggctgccaagcggaccgtgagcatcagcgagtaagagtggggatgggccggtccgacccttgcgttctgcctcccgccccgcctgcctgcggcgacccaggctgccgactgtacttgtgcacagccccgtcctgaggcccccatgtggtcggagcccacgagacacctgcagaggaccgtgtggtcgtaggagcctgcatgcgtgaccgctgcacgtgtacacccacacagaaccctcatcactgggaattcctgtcttcagcgtatcctgtgctggggtcgggaggggctggcttggtcccttggcctttctgaacttcattacctctcctaggggcccggacaccctaggcgatgggatgagggagagaagggagactctggctctggcccctgagccagagcccctggagaaggaagcttgtgagaagtggaagaggcccttcaggtgaggacccaggtgacagtctcagagctctgagctgagccccaccccagaggctgccagggtcttcctcttggaccttggagccagctcttgggttgggagggggcttgaggagaggccagaaagctcagatctcccagggctagtctgacctccattgtctggagccacttggggtcagttccatctcacccccccaacccctaccctcaaccctttccctccttcttgggatcagagctctgggggtggggagtcaggcttctgaatagctgtcaccaggagagaacctgtgggcaaagcccagagcccagtcatgccaggcatgtgtgcgcagccataggtgtgcaagcatgtgcatccgcagggacatgaggccacaggtgtgtacaagcttgactgagcccgtctgtatgtgtgaatatataagcatgtgtagatgtgtgctcacacttgtgggacctgattggggcttcagaccttgggtgcctgtccgcagggtctcctccatccttcttgatttgcctgtcattgaggctgcccgctctgggcgccattccccagcctaacacctcttctcagtctttccttgcaggtccctggtgtccaggccttggggcagtgaagaaaccgtggggaggggcatgagatgccagtccccaaagtccttgggagcccttgtgggccaagtcattgtaggacacaccctctcctgggcattgctgaggtcacccagtgagcctaggctcccccctcctcccatccccagcctgggggaaccttcagcgtctctcctccctgtaggccccggctcagcttcccaggaacttttgttggtctgcctcagccacctccctgacgctgtcccactgtgtggatgtggtgaaggggcttctggattttaagaagaggagaggtcactcaattgggggagcccctgagcagcgataccagatcatccctgtgtgtgtggctgcccgacttcctacccgggctcaggatgtgctggatgcccacctctctgaggtcaatgctgttcgttttggccccaacagcagcctcctggccactggaggggctgaccgcctgatccacctctggaatgttgtgggaagtcgcctggaggccaaccagaccctggagggagctggtggcagcatcaccagtgtggactttgacccctcgggctaccaggttttagcagcaacttacaaccaggctgcccagctctggaaggtgggggaggcacagtccaaggagacactgtctggacacaaggataaggtgacagctgccaaattcaagctaacgaggcaccaggcagtgactgggagccgcgaccggacagtgaaggagtgggacctcggccgtgcctattgctccaggaccatcaatgtcctttcctactgtaatgacgtggtgtgtggggaccatatcatcattagtggccacaatgaccagaagatccggttctgggacagcagggggccccactgcacccaggtcatccctgtgcagggccgggtcacctccctgagcctcagccacgaccaactgcacctgctcagctgttcccgagacaacacactcaaggtcatcgacctgcgtgtcagcaacatccgccaggtgttcagggccgatggcttcaagtgtggttctgactggaccaaagctgtgttcagcccggacagaagctatgcactggcaggctcctgtgatggggccctttacatctgggatgtggacaccgggaaactggagagcagactacagggaccccattgcgctgccgtcaacgccgtggcctggtgctactccgggagccacatggtgagcgtggaccagggcaggaaggttgtgctctggcagtagggccacgacctgcctgcctgggctggagctcttgcccgaagcctgaagcttccttcggcgccatgcaggggttggggttgggactggagctggccttgggatttaatggggaagaaggcctggcaggacctggcctgtttgtttaaaaatgaagtatgggttgggggattacgctagtttttctttgtatttttatctctatctcctcactttttctcccaaagtagaaaaaaatgatatctg

SEQ ID NO: 110463 - DNA, 537 bp, Homo sapiens
  Payload ID: 1668
  Gene Symbol: ATG16L2
  Gene Name: autophagy related 16-like 2
  ENST ID: ENST00000541999
  CDS Start-End: 1-297
ctcgtgcagcgcaaggcgcgcgccgcggccgagcgcaacctgcgcaacgagcgccgggagcgggccaagcaggcgcgggtgtcccaggagctgaagaaggctgccaagcggaccgtgagcatcagcgagggcccggacaccctaggcgatgggatgagggagagaagggagactctggctctggcccctgagccagagcccctggagaaggaagcttgtgagaagtggaagaggcccttcaggccccggctcagcttcccaggaacttttgttggtctgcctcagccacctccctgacgctgtcccactgtgtggatgtggtgaaggggcttctggattttaagaagaggagaggtcactcaattgggggagcccctgagcagcgataccagatcatccctgtgtgtgtggctgcccgacttcctacccgggctcaggatgtgctggatgcccacctctctgaggtcaatgctgttcgttttggccccaacagcagcctcctggccactggaggggctgaccgcctgatccacctct

SEQ ID NO: 110464 - DNA, 1492 bp, Homo sapiens
  Payload ID: 1668
  Gene Symbol: ATG16L2
  Gene Name: autophagy related 16-like 2
  ENST ID: ENST00000540567
  CDS Start-End: 1-353
gggagagcgcggccatggcggggccgggcgtccccggtgcccccgcagcgcgctggaaacgccacatcgtgcggcagctgcggcttcgggaccgtacgcaaaaggcgcttttcctggagctggtgccggcctataaccatctcttagagaaggctgagctgctggacaagttctcaaagaagctgcagccggagccaaacagtgtcactcccaccacccaccagggcccctgggaggagtcagagcttgactcagaccaagtcccatcactggtcgcactgagggtgaagtggcaggaggaggaggaggggctccggctggtctgtggtgaggtaagttgggaaggggtctgaaaatggggtagagagatgtggtccaagggagccagccagtgacgggtactcctgtgtttgctgaattctccaagcccagtgctgcaagcattgagtgagccctagtgtgtgccaggccctgacctgaagctgagcaggggtcagagtgccctgggcagcccaggatgaagtgggctccaacagcagctggagggagttaggtgtgcaagggcctggcagcccatttcccttccacatggtttagcctgctctgctcactactccatggctcacccctcgcccagccatccccaaggcctagcaccagttgatgctcaatatacatttgcagactacagaagttaggttcatttagcgcattggcagagtgtggacgctccacctgacactaccgccttccctgcccctttgcaacagtgtctcttggcttctctttcaccatgctctcctggtttccctctcatttctgtgattgttgcctctgaacttccttcactggctccttcccctcctccctattcctgtcccttcaaatgtgggtgttcttggggttcactgacccccgttttttctgtttgccaactctcagttctgtctctagccgagccttcttttctgagcttgactctcttgctcagctgctttttggagatcacatctaaaatcaggctcaccatctcccccagaatttggcccacaccgttttgagagttgactccttgcaggcatcgggctaaacattgtctcagttaatccttcacaactttatggttgtagaggaggaaactgaggcttggagaggtagagccaggatttgagcccttctcacacaaatcaacttctgtgctctccattcattctctcaacatctgttgacagttgctatatccaaagtacggggagtgcaacaataaacaagacctggccccatggggcttccagtcctctgaaagagactgtgatagcccaggaaatacacatccagtcacagaatggcaagtcacctgcccaacagaaatgcgggcataggtacggactcatttgagaacctttccctagagctgctgttgtaggtccaatttaatatttgtttgagaggtgattctcaaacatctgacccccacaccacccccagcctc

SEQ ID NO: 110465 - DNA, 6357 bp, Homo sapiens
  Payload ID: 1669
  Gene Symbol: ATG2A
  Gene Name: autophagy related 2A
  Uniprot ID: Q2TAZ0
  ENST ID: ENST00000377264
  CDS Start-End: 114-5930
ctggcgcctagagaagcggcggggcgagccgggggctctagtgaacagcggagccggacggggatcgccggcgggcggcaagcggaggcggcccaggcccggcggtctccgagatgtcacgatggctgtggccatggtcaaactgtgtgaaagagcgggtctgccgctacttgctgcaccactacttaggtcacttcttccaagagcacctcagcctggaccagctcagcctcgatctgtacaagggcagcgttgccctgcgagacatccacctggaaatctggtctgtgaacgaggtgctggagtcaatggagtcaccgctggagctggtggaaggcttcgtgggctccatcgaggtggccgtgccctgggctgctctgctcaccgaccactgcacagtgcgcgtgtccggcctccagctcaccttgcagccccgccggggtccagcgccaggggctgccgactcacagagctgggcctcatgcatgaccacaagcctgcagctggcccaggagtgtctgcgggatgggctaccggagccctctgagccaccacagcccctggaggggctggagatgtttgcccagaccattgagactgtgcttcggaggatcaaagtgaccttcctggacactgtcgtgagggtggagcactctccgggtgatggggaacgtggtgtggccgtcgaggtccgtgtgcagagactggagtactgtgatgaggcagtgcgggacccaagccaggcgccgccggtggacgtgcatcagccgcctgccttcctgcacaagctgctgcagctggcaggggtccgcctgcactacgaggagctcccggcacaggaagagcctccagagccccccttgcagatcggcagctgctcagggtacatggagctgatggtgaagttgaagcaaaatgaggccttccctggccccaagttggaggtggcgggacagctgggctccctgcacctgctcctgaccccgaggcagctccagcaacttcaggaactgctcagcgccgtgagccttacagaccacgagggcctggctgacaagctgaacaagagccgcccgctaggtgccgaagacctgtggctgattgagcaggacctgaaccagcagctgcaggcaggggcagtggctgagcccctcagcccagacccccttaccaacccccttctcaacctggataacactgacctcttcttctccatggctggcctcacaagcagtgtggcctcagccctctctgagctctccctctccgatgtagacctggcctcctctgtgcgcagcgacatggcctcccgccggctctctgcccaggcccacccagctggcaagatggcccccaaccccctcctggacaccatgcgccctgactcgctgctgaagatgaccttggggggtgtgaccctgaccttgcttcagacgtctgccccatcttccggaccacctgacctcgccacgcactttttcaccgagtttgatgccaccaaggatgggcccttcggttcccgagacttccatcaccttcgaccacgcttccagagggcctgtccctgtagccatgttcggctaacgggcacagccgtgcagctgtcctgggagctgcggacgggcagtcggggccggcggacaaccagcatggaagtgcacttcgggcagctggaggtgctggagtgtctgtggccccggggcacctctgagcctgagtacacggagatcctgacctttcctggtacgctgggctcccaggcctcagctcggccctgcgcccatctgcgccacacacagatcctgcgccgtgtgcctaagagccgaccccggcgctcagttgcctgccattgccactcagaactggccctggacctggccaacttccaggcggacgtggagctgggggccctggaccggctggccgccctactgcgcctggccaccgtacctgctgagcctccagccggcctgctgacagagcccctgccggcgatggagcagcagacggtatttcggctctctgcaccccgggccacgctgcggctgcgcttccccattgccgacctgcggcctgagccggacccctgggcgggccaggccgtgcgggctgagcagcttcggctggagctgagtgagccccagttccggtcagagcttagcagtgggcctggtcccccagtccccacccacctggaactcacctgctccgacctacatggtatctatgaagatggagggaagccacctgtcccttgcctgcgtgtctccaaagccctggaccccaagagcactgggcgcaagtacttcctgccccaggtagtggtgactgtgaacccccagtccagcagcacacagtgggaggtggccccggagaagggagaggaactggagctgtcagtggagagtccctgtgagctgcgggaacctgagccctcgcccttctcctctaagaggaccatgtatgagacagaggagatggtgatccctggagaccctgaggagatgaggacgttccagagccggaccctggcactgtcccgctgcagcctggaagtgatcctgcccagtgtccacatctttctgcccagcaaggaggtctacgagagcatctacaacaggatcaacaacgacctgctcatgtgggagcctgcagatctgcttcccacccccgaccccgccgcccagccctcgggcttccccggcccctcaggcttctggcacgacagctttaagatgtgcaagtcagccttcaagctggccaactgctttgatctcaccccagactcggactcggatgacgaggatgcccacttcttctcagtgggggcatcaggtggcccacaggccgctgcccctgaggccccaagtcttcacttgcagagcaccttctctacactggtgacagtgctgaaggggcggatcacagccctctgtgagaccaaggatgagggtgggaagcggctggaggctgtgcacggggagctggtgctggacatggagcacggtaccctcttcagcgtctcccagtactgtggccagccaggacttggctacttctgtctggaagctgaaaaggcaacactctaccaccgagcggccgtggatgactacccgctgcccagtcacctggaccttcccagtttcgctcccccggctcagctggccccaaccatctacccatcggaggaaggggtgaccgagcggggagcctcgggccgcaagggccagggccggggaccccacatgttgtccactgctgtgcgcatccacctggacccccacaagaatgtgaaggagttcctggtgacactgcggttgcacaaagccaccttgcgccactacatggccctgcccgagcagagctggcattcccagttgttggagttcctagacgtgctggatgaccctgtgctgggctacctgcccccgacggtcatcaccatcctgcacacacacctgttctcctgctctgtggactataggccactctacctcccagtgcgtgtcctcatcaccgcggagaccttcactctctccagcaacatcatcatggacacctccaccttcctgctcaggttcatcctcgatgactccgccttgtacctgtccgacaagtgtgaggtggagaccctggacctgcggcgagattatgtctgtgttttggatgttgacctcttggaacttgtgattaaaacctggaaagggagcaccgagggcaaactgagccagccactattcgagctgcgctgctccaacaatgtggtacacgtgcacagctgtgccgactcctgtgccctgctggtcaacctgctccagtacgtaatgagcacaggcgatctgcaccccccaccccggccccccagccccacggagatcgccggccagaagctctcggagagtcctgcctctctgccctcgtgccccccagtggagacggccctcatcaaccagcgtgacctggccgacgccctcctggacaccgagcgcagcctacgggagctggcccagccttcaggtggccacctccctcaggcgtcgcccatctccgtctacctattcccaggtgaacggagtggggccccacccccttcaccacctgtcgggggccctgctggcagcttagggtcatgctcagaggagaaggaagatgaaagggaagaggagggcgatggagacaccctggacagtgatgagttctgcatccttgatgctcccggcctgggcatcccgccccgagatggggagcctgtggtgacacagctgcatcccggccccatcgttgtgagggacggttacttctcacggccgatcggcagcacggacttgctgcgggcacctgcccatttcccagtgcccagcactcgggtggtgctacgtgaggtctccctcgtctggcacctctatgggggccgagactttggcccccaccccggccacagggcaagaactggcctctcaggtcccaggagctccccttcccgctgctctggccccaaccggccccagaactcatggcgcacgcaggggggcagcgggcggcagcaccatgtcctcatggagatccagctgagcaaggtaagcttccagcacgaggtgtacccagcggagccagccacaggccctgcggcccccagccaggagctggaggagcgaccgctgtcccgtcaggtgttcatcgtgcaggagctggaggtccgagaccggctcgcctcctcccagatcaacaagttcctgtacctacacacgagtgagcggatgccgcgacgtgcccactctaacatgctcaccatcaaagcgctgcatgtggcccccactaccaacctgggtgggcctgagtgctgtctccgcgtctcgctgatgcccctgcggctcaatgtggaccaggatgccctcttcttcctcaaggacttcttcactagtctggtggccggcatcaaccccgtggtcccaggggagacctccgctgaggctcgccccgagactcgagcccagcccagcagccccctggaagggcaggccgaaggcgtagagaccactggttcgcaggaggccccaggaggtggacacagcccctcccctcctgaccagcagcccatctacttcagagagttccgcttcacgtctgaggtccccatctggctggattaccatggcaagcacgtcacgatggaccaggtgggcacttttgctggcctcctcatcggcctggcccaactcaactgctccgagctgaagctaaagcggctctgttgcaggcacgggctcctgggtgtggacaaggtgctgggctatgccctcaacgagtggctgcaggacatccgcaagaaccagctgcccggcctgctgggaggcgtgggccccatgcactcggttgtccagctcttccaagggttccgggacctgctgtggctgcccattgagcagtacaggaaggatggccgcctcatgcgggggctgcagcgaggggctgcctcctttggctcatccacagcctctgccgccctggaactcagcaaccggttggtacaggctatccaggccacagctgagaccgtgtatgacatcctgtccccggcagcccccgtctcccgctccctgcaggataagcgctctgcgcggaggctgcgcaggggccagcagcctgccgacctgcgggagggtgtggccaaggcctacgacacagtgcgagagggcatcttggatacagctcagaccatctgtgacgtggcatcgcggggccatgagcagaaggggctgacgggcgccgtggggggcgtgatccgccagctgcccccgactgtggtgaagccgctcatcctggccacggaggccacgtccagcctgctcgggggcatgcgcaaccagattgtccccgacgcccacaaggaccacgccctcaagtggcgctcggacagtgcccaagactgagcctggggtgcccggcacccagagggtgctgcccaccatgctcctgagcctcccaagagctgcagcccacgggcccggcccggcctggcccttcaggggatggccactgtgaaggacgccttcccagcctgcccgttgccaatctgctgtgagaggggggcctccctgccttggggccttagccctggctctgcacttttcctccggggagaaaggacactgcccctcccccgacctgggcccacactgctgccttctcccaggacggaggcttttggaccctcggaccccatcccactcagccaagtgtctttctgtgtctggggggaggaggggatgatatccgtgtggttcgatgtattatttttaagctccgtgagtgcgtgggtcagtgtctgcatgaagtggaataaactgcccaccgcca

SEQ ID NO: 110466 - DNA, 1481 bp, Homo sapiens
  Payload ID: 1669
  Gene Symbol: ATG2A
  Gene Name: autophagy related 2A
  Uniprot ID: Q2TAZ0
  ENST ID: ENST00000421419
  CDS Start-End: 85-1080
ctagtgaacagcggagccggacggggatcgccggcgggcggcaagcggaggcggcccaggcccggcggtctccgagatgtcacgatggctgtggccatggtcaaactgtgtgaaagagcgggtctgccgctacttgctgcaccactacttaggtcacttcttccaagagcacctcagcctggaccagctcagcctcgatctgtacaagggcagcgttgccctgcgagacatccacctggaaatctggtctgtgaacgaggtgctggagtcaatggagtcaccgctggagctggtggaaggcttcgtgggctccatcgaggtggccgtgccctgggctgctctgctcaccgaccactgcacagtgcgcgtgtccggcctccagctcaccttgcagccccgccggggtccagcgccaggggctgccgactcacagagctgggctatgccctcaacgagtggctgcaggacatccgcaagaaccagctgcccggcctgctgggaggcgtgggccccatgcactcggttgtccagctcttccaagggttccgggacctgctgtggctgcccattgagcagtacaggaaggatggccgcctcatgcgggggctgcagcgaggggctgcctcctttggctcatccacagcctctgccgccctggaactcagcaaccggttggtacaggctatccaggccacagctgagaccgtgtatgacatcctgtccccggcagcccccgtctcccgctccctgcaggataagcgctctgcgcggaggctgcgcaggggccagcagcctgccgacctgcgggagggtgtggccaaggcctacgacacagtgcgagagggcatcttggatacagctcagaccatctgtgacgtggcatcgcggggccatgagcagaaggggctgacgggcgccgtggggggcgtgatccgccagctgcccccgactgtggtgaagccgctcatcctggccacggaggccacgtccagcctgctcgggggcatgcgcaaccagattgtccccgacgcccacaaggaccacgccctcaagtggcgctcggacagtgcccaagactgagcctggggtgcccggcacccagagggtgctgcccaccatgctcctgagcctcccaagagctgcagcccacgggcccggcccggcctggcccttcaggggatggccactgtgaaggacgccttcccagcctgcccgttgccaatctgctgtgagaggggggcctccctgccttggggccttagccctggctctgcacttttcctccggggagaaaggacactgcccctcccccgacctgggcccacactgctgccttctcccaggacggaggcttttggaccctcggaccccatcccactcagccaagtgtctttctgtgtctggggggaggaggggatgatatccgtgtggttcgatgtattatttttaagctccgtgagtgcgtgggtcagtgtctgcat

SEQ ID NO: 110467 - DNA, 5654 bp, Homo sapiens
  Payload ID: 1669
  Gene Symbol: ATG2A
  Gene Name: autophagy related 2A
  ENST ID: ENST00000418259
  CDS Start-End: 1-5227
gtactgtgatgaggcagtgcgggacccaagccaggcgccgccggtggacgtgcatcagccgcctgccttcctgcacaagctgctgcagctggcaggggtccgcctgcactacgaggagctcccggcacaggaagagcctccagagccccccttgcagatcggcagctgctcagggtacatggagctgatggtgaagttgaagcaaaatgaggccttccctggccccaagttggaggtggcgggacagctgggctccctgcacctgctcctgaccccgaggcagctccagcaacttcaggaactgctcagcgccgtgagccttacagaccacgagggcctggctgacaagctgaacaagagccgcccgctaggtgccgaagacctgtggctgattgagcaggacctgaaccagcagctgcaggcaggggcagtggctgagcccctcagcccagacccccttaccaacccccttctcaacctggataacactgacctcttcttctccatggctggcctcacaagcagtgtggcctcagccctctctgagctctccctctccgatgtagacctggcctcctctgtgcgcagcgacatggcctcccgccggctctctgcccaggcccacccagctggcaagatggcccccaaccccctcctggacaccatgcgccctgactcgctgctgaagatgaccttggggggtgtgaccctgaccttgcttcagacgtctgccccatcttccggaccacctgacctcgccacgcactttttcaccgagtttgatgccaccaaggatgggcccttcggttcccgagacttccatcaccttcgaccacgcttccagagggcctgtccctgtagccatgttcggctaacgggcacagccgtgcagctgtcctgggagctgcggacgggcagtcggggccggcggacaaccagcatggaagtgcacttcgggcagctggaggtgctggagtgtctgtggccccggggcacctctgagcctgagtacacggagatcctgacctttcctggtacgctgggctcccaggcctcagctcggccctgcgcccatctgcgccacacacagatcctgcgccgtgtgcctaagagccgaccccggcgctcagttgcctgccattgccactcagaactggccctggacctggccaacttccaggcggacgtggagctgggggccctggaccggctggccgccctactgcgcctggccaccgtacctgctgagcctccagccggcctgctgacagagcccctgccggcgatggagcagcagacggtatttcggctctctgcaccccgggccacgctgcggctgcgcttccccattgccgacctgcggcctgagccggacccctgggcgggccaggccgtgcgggctgagcagcttcggctggagctgagtgagccccagttccggtcagagcttagcagtgggcctggtcccccagtccccacccacctggaactcacctgctccgacctacatggtatctatgaagatggagggaagccacctgtcccttgcctgcgtgtctccaaagccctggaccccaagagcactgggcgcaagtacttcctgccccaggtagtggtgactgtgaacccccagtccagcagcacacagtgggaggtggccccggagaagggagaggaactggagctgtcagtggagagtccctgtgagctgcgggaacctgagccctcgcccttctcctctaagaggaccatgtatgagacagaggagatggtgatccctggagaccctgaggagatgaggacgttccagagccggaccctggcactgtcccgctgcagcctggaagtgatcctgcccagtgtccacatctttctgcccagcaaggaggtctacgagagcatctacaacaggatcaacaacgacctgctcatgtgggagcctgcagatctgcttcccacccccgaccccgccgcccagccctcgggcttccccggcccctcaggcttctggcacgacagctttaagatgtgcaagtcagccttcaagctggccaactgctttgatctcaccccagactcggactcggatgacgaggatgcccacttcttctcagtgggggcatcaggtggcccacaggccgctgcccctgaggccccaagtcttcacttgcagagcaccttctctacactggtgacagtgctgaaggggcggatcacagccctctgtgagaccaaggatgagggtgggaagcggctggaggctgtgcacggggagctggtgctggacatggagcacggtaccctcttcagcgtctcccagtactgtggccagccaggacttggctacttctgtctggaagctgaaaaggcaacactctaccaccgagcggccgtggatgactacccgctgcccagtcacctggaccttcccagtttcgctcccccggctcagctggccccaaccatctacccatcggaggaaggggtgaccgagcggggagcctcgggccgcaagggccagggccggggaccccacatgttgtccactgctgtgcgcatccacctggacccccacaagaatgtgaaggagttcctggtgacactgcggttgcacaaagccaccttgcgccactacatggccctgcccgagcagagctggcattcccagttgttggagttcctagacgtgctggatgaccctgtgctgggctacctgcccccgacggtcatcaccatcctgcacacacacctgttctcctgctctgtggactataggccactctacctcccagtgcgtgtcctcatcaccgcggagaccttcactctctccagcaacatcatcatggacacctccaccttcctgctcaggttcatcctcgatgactccgccttgtacctgtccgacaagtgtgaggtggagaccctggacctgcggcgagattatgtctgtgttttggatgttgacctcttggaacttgtgattaaaacctggaaagggagcaccgagggcaaactgagccagccactattcgagctgcgctgctccaacaatgtggtacacgtgcacagctgtgccgactcctgtgccctgctggtcaacctgctccagtacgtaatgagcacaggcgatctgcaccccccaccccggccccccagccccacggagatcgccggccagaaggtacagctctcggagagtcctgcctctctgccctcgtgccccccagtggagacggccctcatcaaccagcgtgacctggccgacgccctcctggacaccgagcgcagcctacgggagctggcccagccttcaggtggccacctccctcaggcgtcgcccatctccgtctacctattcccaggtgaacggagtggggccccacccccttcaccacctgtcgggggccctgctggcagcttagggtcatgctcagaggagaaggaagatgaaagggaagaggagggcgatggagacaccctggacagtgatgagttctgcatccttgatgctcccggcctgggcatcccgccccgagatggggagcctgtggtgacacagctgcatcccggccccatcgttgtgagggacggttacttctcacggccgatcggcagcacggacttgctgcgggcacctgcccatttcccagtgcccagcactcgggtggtgctacgtgaggtctccctcgtctggcacctctatgggggccgagactttggcccccaccccggccacagggcaagaactggcctctcaggtcccaggagctccccttcccgctgctctggccccaaccggccccagaactcatggcgcacgcaggggggcagcgggcggcagcaccatgtcctcatggagatccagctgagcaaggtaagcttccagcacgaggtgtacccagcggagccagccacaggccctgcggcccccagccaggagctggaggagcgaccgctgtcccgtcaggtgttcatcgtgcaggagctggaggtccgagaccggctcgcctcctcccagatcaacaagttcctgtacctacacacgagtgagcggatgccgcgacgtgcccactctaacatgctcaccatcaaagcgctgcatgtggcccccactaccaacctgggtgggcctgagtgctgtctccgcgtctcgctgatgcccctgcggctcaatgtggaccaggatgccctcttcttcctcaaggacttcttcactagtctggtggccggcatcaaccccgtggtcccaggggagacctccgctgaggctcgccccgagactcgagcccagcccagcagccccctggaagggcaggccgaaggcgtagagaccactggttcgcaggaggccccaggaggtggacacagcccctcccctcctgaccagcagcccatctacttcagagagttccgcttcacgtctgaggtccccatctggctggattaccatggcaagcacgtcacgatggaccaggtgggcacttttgctggcctcctcatcggcctggcccaactcaactgctccgagctgaagctaaagcggctctgttgcaggcacgggctcctgggtgtggacaaggtgctgggctatgccctcaacgagtggctgcaggacatccgcaagaaccagctgcccggcctgctgggaggcgtgggccccatgcactcggttgtccagctcttccaagggttccgggacctgctgtggctgcccattgagcagtacaggaaggatggccgcctcatgcgggggctgcagcgaggggctgcctcctttggctcatccacagcctctgccgccctggaactcagcaaccggttggtacaggctatccaggccacagctgagaccgtgtatgacatcctgtccccggcagcccccgtctcccgctccctgcaggataagcgctctgcgcggaggctgcgcaggggccagcagcctgccgacctgcgggagggtgtggccaaggcctacgacacagtgcgagagggcatcttggatacagctcagaccatctgtgacgtggcatcgcggggccatgagcagaaggggctgacgggcgccgtggggggcgtgatccgccagctgcccccgactgtggtgaagccgctcatcctggccacggaggccacgtccagcctgctcgggggcatgcgcaaccagattgtccccgacgcccacaaggaccacgccctcaagtggcgctcggacagtgcccaagactgagcctggggtgcccggcacccagagggtgctgcccaccatgctcctgagcctcccaagagctgcagcccacgggcccggcccggcctggcccttcaggggatggccactgtgaaggacgccttcccagcctgcccgttgccaatctgctgtgagaggggggcctccctgccttggggccttagccctggctctgcacttttcctccggggagaaaggacactgcccctcccccgacctgggcccacactgctgccttctcccaggacggaggcttttggaccctcggaccccatcccactcagccaagtgtctttctgtgtctggggggaggaggggatgatatccgtgtggttcgatgtattatttttaagctccgtgagtgcgtgggtcagtgtctgcatgaagtggaataaactgcccaccgcca

SEQ ID NO: 110468 - DNA, 13684 bp, Homo sapiens
  Payload ID: 1670
  Gene Symbol: ATG2B
  Gene Name: autophagy related 2B
  Uniprot ID: Q96BY7
  ENST ID: ENST00000359933
  CDS Start-End: 895-7131
ggtgcgggcggggatgctcgagaagggctccagtcctcccagcggagacggcggagccccaagtgtgcgtttccggggcgccgaggtctgaggggagccgggagagccaggccggccagaccggcccccagacccctcttaacacgggcgcggggcccctgcagcctgccgcccctctcggcccagccagctgcatggcgtcgcgtccccatccggaaggcctgacggcccgccggcgccccgagcccctagcccttctcgggggccgcccctcgcccgcagccaccccggctgccgctcacctgcgcgcccggcgtcctcttcttccttcctccggaggcgactggagccgaccggcggtgccgccccctccctccccgccttcttccgccccgccccctcggagccggaactgctccagcccccgcccttctgcccgccttccgcggccccagtgtggcgtcacttccgccagcgcccggcggcgcgccgggagtctgggtctcgtgaacgcgccaggagcgtccctacagccgggaacgcgcctcgcggatgacaacaaattcgtcgcgcggcggcagtggcggtggctgcctcagcccctgccgcctcctctcgcgctctcttgcactctctccgagccggttgggaccctcctcggaagtcccctggcctggggccaggaggacccctctgcgtcttgcctccgccaggcccagcgcgagcggtgcggcgccggcgatggggtctccctgagggactcccggcaccaaatagggatggaggggccgccccaggcttaggccccgccgcggcctggagccggagtcgctaccccgaggccggagccgtcgcaacccgcagccgcagtcagcccagctgccagcagtcactatgccttggccgttttcggagtccatcaagaagagggcctgccggtacctcctgcagaggtacctgggccactttctgcaggagaagctgagcctggagcagctcagcctggacctgtaccaaggcaccgggtccctcgcccaggtccccttggacaaatggtgtctcaatgagatcttggagtcagcagatgcacccttagaagtcactgaaggattcattcagtcaatttccctgtcagttccatggggctctttactgcaggataattgtgcactggaagtgagaggattagaaatggtcttccggcctagacctcgcccagcaactggttctgagcctatgtattggtcaagttttatgaccagcagtatgcaattggcaaaagaatgtcttagccagaaactaacagatgaacaaggagaaggatcccagccttttgaaggacttgaaaagtttgctgaaaccattgaaacagtactaagaagagtaaaagtcacttttatagatactgttttgagaattgaacatgtgccagaaaattccaaaactggaactgcacttgaaattcgaatagaaagaactgtgtactgtgatgaaactgctgacgaatcctcaggaattaatgtgcatcaacccactgcttttgctcacaagttacttcagctctctggagtgtctctcttctgggatgagttttctgcatcagccaaatcttccccagtgtgttcaactgcaccagtggaaactgagccaaagctctcacctagctggaaccccaaaattatttatgagccacacccacagctaactagaaatttaccagagatagcaccttctgacccagtgcagattggacggttaattggtaggttggagttgagtctcacgttgaaacagaatgaagtgcttcctggagctaagttggatgttgatggacagatagactctattcatctactcctgtcaccaagacaggtgcacttgcttttggatatgttggcagctattgctggaccagaaaattctagcaaaatagggttagctaataaagataggaaaaatcgacccatgcagcaggaagacgagtatcgaattcagatggaattaaaccggtattatttgagaaaagattccctctctgtgggtgtatcttcagagcaaagcttttatgagacagaaacagctcgtacaccttctagccgtgaagaagaagtattcttctccatggctgatatggacatgtctcatagtctctcttctcttccaccccttggggaccccccaaacatggaccttgagttatcattaactagtacatatacaaataccccagcaggatctccattaagtgctactgtgcttcagcccacttggggagagttccttgatcatcataaagaacagccagtaagagggtcaacatttccatccaacctagttcacccaacacctttacagaagacatctctcccatctagatctgtttcagtggatgaatcaaggcctgaacttatttttagactagctgtgggaactttttcaatctctgtgcttcacattgatcctttatctccacctgaaacgtcacagaaccttaatccattgacacctatggcagtagctttctttacttgtatagaaaagattgatccagcaagattttcaacagaagattttaagtctttccgagcagtgtttgcagaagcttgctcacacgatcaccttagatttataggtactggcattaaagtatcctatgaacaaagacaaagatcagcttcccgatattttagtactgatatgtccattgggcaaatggaatttttggagtgcctatttccaactgattttcattctgttcctcctcactatacagagcttttaacgttccattccaaagaagaaactggttcccattcccctgtgtgtcttcagcttcattataagcattctgagaatagagggccccagggtaatcaagcaagacttagttcagttcctcacaaggcagaattgcaaattaaattaaatccagtgtgttgtgagctggatatcagtattgtggacaggttaaattccttgcttcaaccacagaaacttgccacagtagagatgatggcatcccacatgtatacttcatataataaacatattagtctgcacaaggctttcactgaagtgtttctagatgattcacatagtcctgcaaattgtcggatatcagtacaagttgccacaccagcattaaacctttctgttcgcttcccaatacctgatcttcgatctgatcaagaaagaggaccatggtttaagaagtcacttcagaaggagatcctttatttagccttcacagatctagaatttaagactgaatttataggaggatcaaccccagaacaaattaaattggaacttacctttagagaactaattggatcgttccaggaagagaaaggagatccatctattaagtttttccatgtgtctagtggagtagatggagatacaacatcgtcagatgactttgactggccacgaattgtactgaaaataaatccaccagccatgcattccattttggagagaattgcagctgaagaagaagaggagaatgatggtcactaccaggaggaagaggaaggaggtgctcattccttgaaagatgtttgtgatctaagaagaccagccccatctcctttttcttctcgtagagtaatgtttgaaaatgaacagatggtgatgccaggagaccctgtagaaatgacagaatttcaggataaagcaatcagcaattctcactatgtgctggaacttacgttaccaaatatttatgtaacactacctaataagagcttttatgagaagctttataataggatctttaatgacttgctactgtgggaaccaacagctccttcaccagtggagacattcgagaatatttcctatggcattgggctttcagtagccagtcagctcattaatactttcaacaaagatagttttagtgcatttaaatctgcagttcactatgatgaggaaagtggatctgaggaggagactttgcagtatttttccactgttgatcccaactatcgttctcgcaggaaaaaaaaattagactctcagaacaagaactctcagagttttctctcagttcttctgaatattaatcatggattaatagcagtgttcacagatgtgaagcaagataatggagatctgttggaaaacaagcatggtgaattctggttagagttcaatagtggttcattattttgtgtgacaaaatatgaaggttttgatgacaagcactacatttgccttcattctagcagtttcagtctgtaccataaaggcatagtgaatggagtgattctcccgacagaaacacgacttcccagctcaacccgcccacactggttggaacctactatttattcctctgaagaagatggcctcagtaaaacttcttcagatggagttggaggagacagtttgaatatgctgtctgttgccgttaaaatattgtctgataaatcagagtccaatacaaaggaatttctcattgccgtaggactgaaaggagccactctccagcatagaatgcttccttctgggcttagctggcatgagcagattttatacttcttgaatattgctgatgaacctgttttgggatataatcctccaacttcatttacaacttttcatgttcatctttggagctgtgcacttgattatagacccctttatttgccaatccgatctcttcttaccgtggaaacattcagtgtttccagtagcgttgcattggataaatcttcctctactctcagaataatcttggatgaagctgctttacatctatctgacaaatgcaatactgtcactataaatctgagtagagattatgttcgtgtgatggatatggggcttttggagttaaccataactgcagtgaagtctgattctgatggagagcaaactgagccccgctttgagttacactgttccagcgatgttgtccatatcagaacgtgctcagactcttgtgctgcgttaatgaatctcattcagtacattgcaagctatggtgacttgcagacacctaacaaggcagatatgaagcctggagcctttcaaagaaggtctaaggtagattccagtggtcgatcatcctcacgtggtccagtacttcctgaagcagatcaacaaatgttacgagatctgatgagtgatgctatggaggagatcgacatgcaacaaggcacctcgtcagtaaaaccacaggctaatggtgttttggatgaaaaatctcaaattcaggagccatgttgttcagacctcttcctgtttcctgacgagagtgggaatgtatcccaggagtccggccccacctatgcctcattctctcaccatttcatcagtgatgcaatgacaggtgtgcccactgagaatgatgacttttgcattctttttgcaccaaaagcagccatgcaggagaaggaagaagaaccagttataaaaatcatggttgatgatgcaattgtgataagagacaattatttcagtctgcccgttaataagaccgatacgagcaaagcccccttacactttcccattcctgtgattcgctatgtggtgaaggaggtctctcttgtctggcatctttatggaggaaaggattttggaatagtccctcccacttctccggctaaaagttatattagtccccacagttcgccttctcacacacccacgagacatggacgtaatacagtatgtgggggaaaaggaaggaaccatgactttttaatggaaatacagctaagcaaggtgaagtttcagcatgaagtctacccgccatgcaaacctgattgtgattccagcctctcagaacacccagtctcccggcaggtgttcattgttcaggatcttgagattcgagatcgtttggcaacatcacaaatgaataaatttttatacctgtattgcagtaaagaaatgcctcgaaaagctcactccaacatgttgacagtgaaagccttacacgtgtgtccagaatctggcaggtccccacaggagtgctgcttgagagtgtcgctgatgccgctccgcctcaatattgaccaggatgctttgttcttcctgaaggatttcttcacaagtctttctgcagaagtagagcttcaaatgactccagatccagaagttaaaaagtctcctggagctgatgtcacctgcagtttgccaaggcatttgagtacctcaaaggagccaaatctggttatttctttctctgggccaaaacagccttcccaaaatgatagtgccaattcagtggaagtggttaatggcatggaagagaagaacttctctgctgaagaagcatcttttagggatcagcctgtgttttttagagaatttagattcacgtcagaagttcccattcgacttgattatcatggcaaacatgtatcaatggatcagggtacgctagctgggattttgattggtctggctcagttaaactgctctgaactaaagctcaagaggctttcctatcgacatggtttactaggcgttgacaaattattctcatatgcaatcactgagtggcttaatgacattaagaagaaccagctaccaggaatcctgggaggtgttggacctatgcattcactagtacaattagtacaaggcctaaaggacttggtctggctcccaatagagcagtaccggaaggatggccgcattgtcagagggtttcagagaggcgctgcttcctttggtacctcgacagcgatggctgctctagaactcacaaacagaatggttcaaaccatacaggcagctgcagagactgcttatgatatggtgtctcctggtaccctttctatcgagcccaagaagaccaaaaggtttcctcatcaccggttagcccaccagccagtagacctgagggaaggtgtggccaaggcctacagtgttgtgaaagagggaatcacagacacggctcagaccatttatgaaactgcggctcgagaacacgagagcagaggggtgactggtgccgtgggcgaggttctgcgccagattcctccggcagtggtgaaacctctgattgttgccacagaagcaacgtcaaacgtgctgggtggcatgagaaaccaaattaggccagatgtccggcaagacgagtcacagaaatggcgccacggggatgactgatggcttggaactgacagtgtgaagataaggagagtggaaccaggagctcagagtcctgacagcagcttcagaggaagctcgtttaattttattgtgctcatctcaggaacaaaagcattttttagttaaataatttaacatcaaaacaacatgcaaccaaaaacttctgacatttatagttgatacttgcctatagaaatgtttggtggctggtgtcaaaggtccttaaagcatttgctgccaagttagtggaaggctcacttttgttaagatgactgtaattctccttgttaccgacgagagatcattggaagctgccttctaacactttgtgtagctctgtggagttggattttcttaaggtttaaaaagaatcacagcttcggaacttttaactgaaaatgagagacagaagccacaggggaagcaaagcaaataggattttcaatataaatatcagtgtggaaaaataacctattctgttgaatttagtgttcatgcacttgagaacaacattatttccatttactccgaaaatccttctgtgggggtttgagaaagtgaatgttgcagacatgttctgttgtgttgcactttatcctgtgtttatgtgtatgtgtttttagattaattcaagttgtgtgctatatttcttgtataatttacaaagttacacaaaatataaagagcagtaaacttgtctgaaagtttttggcaaaggaaggtaacttcaatgtaatagcttcctttaagagtacaggaaaatgcattctgtaatgaagtggggcccatgtaattgtttatattttcagttttaagcaggtatagtgcaggcttgttaggaatgtgtggaagggaagattggaagtgatttttcctcttttaaaagtaaacaaaattcttcaaatatgccctagttaactatttcagcataccatttttacttggttaacagtgtacattttgataacctatcaggaatgaataaagtatttttatttaaaggtgatattgttttatgcttccatgaatattttgcttttcttagagcatattcatagatgcagtactgtgatttaccacaagataattgggaacactttctcaaaatcgattttggttaatatcaggtaaatcattacctaggagtaagagggaaattgttgtcaattcctgactttagattgatccagcagaaagaaaaggtggaactttgtatatatccactgttgaaagttgcatgacctgacttcctgttttctaaagttgggggaatattattgaacttcaatttcagaactgcatttcaatttggggcttggaaaatgtagttaaatcaatttcgttctctaaattttctaagcaggaaagcaatgtaaaccaaaaatcaaaatgtttagaatttataaaaatggggttatatagcttttaattttagtttcctttttactgccaaaaaacttaaaaagacaacagcgtaaccacctgtttaagcaccgtgggaccatctcttattcgggtagagcctggtcctggcgacacactaacaggaaggcgtgctgtgttaccgggaaggcgcctctggctgtggggtgcgttctgaccaccccgctcagatgccagcattttccatttgcccttaaggaaacttgctatgtgtgttaacccagttatgattagtcaaactggaaaacacttgatcaaacttaaaattgtaaaatctgtctaacttttaaatatactttccacagttgtacttaagttcaattaactacagtatagagaaaaataattattctcttctttgcacccggagttgcaaacaaattaagtttacaaatctcatttaaacatatatctttgtaatgtaatctccgcggttctttctttgttctaccctcctgcacctgttgtcgatgtaatcattttgggaacagaaacgttgtgtctcaaaaagattcgttgtcagttcagccaagatgttctttacctgagattctggaaagatgtttatctatatcggaacacttctacattattaaatgtccttaagctttttcttttttacaagtgtcttttcagactttggtgttgtgatgacacagtagaaagagcgtggctagaatccgtggtttgccacatctgcagcttaccaaacggatgacttgtccaggacatctgatccctgtaagcctcagcatccctcctggtaaatggagggttttttacgacaaagcccaaagggaggttttggatgattaggctgtgtgtgcgtgtgagaatgatcacatgtggcgtcatgctttgtacagagcctcagaccactgggcctcgtccagtgagagtcctctctggcgacatcacacgcggagcagccaggggccaccttagatctcagatctctcagagcaatacttttctgaactgccactgtgcctgggtggttgggttggtgtcatgcttctgactagagtagatcgcgcatgtccaccagtgatacgttgagtccttacagttccccccatggagtcccataagcagctccatcgagatctgtcagcaagttgcaggaccccacaatgttctgacatgttaagacccccttacatgacgagtagagaggcagctgaggccacaaccgtgtcttcctcttgaatggagctaactcggaaccccccgttttctcttcctttctgcccaccactgaacattgccttttagataactcagtgtttcttctagatgtcatagcaatagactttcactttcatgaagtttgggtacgatttggattctcgcttaagtacatatatttatcaatatttttataaggcaaagttcacttaaaaaatctttccaagtagcagtgtgcctaagatggcaaaatactaaaaactggtgtttcctgctcctgttgtgtgtcacttttcaagccgattgaaatatttctggcttttagggcattactttttaactatctcctttaaaaacgatgttctgtaggtttagtgtctttgttcatttccaaaagagtccagacaactgtgtctgcccctgcagaggctgtttgtccaaaggcagcatgccgcttccaccggaatgcagacagcaggggagcggaattctaaagcagcgacttaaaatgaggaatccccaattgcactaaatggtttcaggattgactaatcattgtcttaacattaactcagattttcaatgtgtaaagagctgtgtgacttggcgtctgagagatccctctgctttgctttgcttcagagtcctcgcacccgcatcctcagaactgtggggcatggtgggctctaacgagcactccccttctgttttccttcattacttttgacctccttaagacttcagagagaatgtccgtcaagttcttttctccatcaagttctttaagttccttgaaaggaagggactgtgcaaacacaaagcaatattcttttgtatctgcaaatgcatcagctggacataccaattggtatcaaatagaataaaatcaaatataaatgtttgagtcttaggttaaaaaggaaggttatttgtatagtttatagataatgaaggaaaaatttctttttcattgcaggaaatcttgtttactggaagatagagtcactcttttcatataagacaaatagtgctttaatgccaacttctttttatctcaacatttcaggatcatgctaggcacactgcccccttgaatagacattatatgcacagttgcaagtcagccaatgtttttattcagaagtatttccccccattatagtgcctgcatatcagagatacaaaaagcatccaacacactaccgtaataggcttctttggggatgagaaatttgagtctcaacaactcagagtttgagatgtcagcttttttggtaaacgtaggtgttagaggtatattttgctttcctacaacaattgttggcccttgatttcaagcatgttgcttcataggaagcaccagagtgccatctgctgcatttcaagagattgtaaatgtcatctcagctggctcagttatatctctaatgtcccgggtagcagcacctccctctaaaaatatgtttacttcactgtttcacttgtattttgtgtatacgaaatggcagcttccgatttctagttggatttgtcttgcattgtttgtataacttgctggtcacccagggctatttgctttttcattgagaaatttggtaggggtgtctagttcagcttttatgttgatccatcctgacttattttagacattgaatttatctcaccacaagtaaaagaacatgtgtattgactgtctttgctaagtttcctaatttttcctaattatggcaattatggatgtgaataagaatactgatgctgtacaaatatttttgtggaaatgtaccttgttaatgtgactatttaaataatatgaaaataagaatactcttgaagaaaaaattaaaatatttactctttggattttgctttaaacacttgtctttcaccaagaagtgttcccaaaacttgtgtaaaatacttattggggtggggtgtacatctgcctcagaccttgttattgggaaatgatgttccagtgcccctgatgcttctgatagcagatcttgggtctgtctgctactgattgctgagctgtatggagttttaacagttcttccctccctgctttggattttagtccctctattagttatcctatccctgcaataaggacttgcagcaaacacacctcctagtttgatatcacgaaactgataactatttggaggagtatttttacttatgaagggaatatttaaaagacatacttatttttattttatttatttattttttcagacggagctttgctcttgttgcccaggctggagtacaatggagcaatcttagctcactgcagcctccacctcctgggttcaagcgattctcttgcctcagcctcctgagtagttgggattacaggcacctgccaccacgccccacaaattttttgtttttttagtagagacgaggtttcaccgtgttggccaggttaacctcagcctggtctcgaactcttgacctcagcctccaaaaatgctgggattacaggcatgagccaccgtgcctggccagacatacttatttttaagggcaatttactttaaaagattttgttgtgacagatgtgactatataacatccactttgaacaattagggaaaaaatgacaagtcacacttcacccatggctcttgttgaaaaaagggatggggacaattgtgagatgcttactgtgtgccaagtatcctactgtctttttataatttcacagcccccactcagaggcagttactagagtccctgttttccagatgaggagacaggttcagagaggtcaagaaacttgctcaccgtcacatggtttgacttccagacctcatgctcttcccaggacttcatttaagaaaagcttggagcagttacctaacttagcaaaaagtcttcactaattgggaaaccacagaattttgctagaagattgagattaaaggctcttagaatatttgagcaagaaaatgtgcttgatctcttcctggcgtctccagcccctctcccctcttctggctgtgcttagccaccccagcggttcagttctgcatgcccgtgagtaggggttagcaccacctggaagatttctttctataaatgctgcaccacaggccacagtcaacactgattaaagcaaaatctcagaatggggctaaagtcgggtttctccacctcagcagttgacatttgggaccagcctgtgcattgtaggatgcaggggatgttgccaccctcccaccccccgctggcctctggccactggatgccagtaacaaactcccctcccccagttgtgacagccaaagacgtctccagacatggccaaatatgccaaatatgacaaaaatcccctgttaaaaatcactgggctaagagctctcctggggaaaatcatgcacagcctggggcaagaacgcgctatggccgccccaactcggatgctctgtcgggatctctggctgctcctgctgtctcagcccggaggctccacttcaggcagcctggccaccctcccttcctctctgtttcccactatagcatgctttccttttttttgtttgttaaactttgcggcactccccgcatactgtagatccacgtctgtttccctgtttgacttccttcaggagggcaagggacttagggacccggtgcctagcacagtgccttgcccagagtcagggatcagcaaatggtgaatgagtgaatgaatgaatgaatgagtgagtgaacccgagtggtcatctagtcctgtctgcaggtgaggaaatcgaagcccggagaggggaaattctttgcccaagatcacatgattactacttacagatgtcctttattcaatgtaagctcacgttttcttgattttagcaatacttgtaataatttttaaaatataaatatatatgaaataaaagttcatcattga

SEQ ID NO: 110469 - DNA, 1570 bp, Homo sapiens
  Payload ID: 1671
  Gene Symbol: ATG3
  Gene Name: autophagy related 3
  Uniprot ID: Q9NT62
  ENST ID: ENST00000283290
  CDS Start-End: 436-1380
tagtgtcacgtgaggccccggtggcggcgcagctacggcaagagagtgagaaggaagggaagccggaaggggcgcgagtgaagcaaagcgaggacagacagctcgcagagggcgaggggtgcgtgtgcgtccgcttctcacctcaggtctcccttcggccccgctgccctccctcgcggctgggtgacagctgggtccggtccgtcgcgggctgcctggggtgcgaggatcgcgcaccccgtcttcgcgcgctgtgcctgccgccccgccccctcgtcccgcccgtcccgtcgcgtcgcgtcccgtcccctcgggtgctgccagccgggtgctgatgcgagtcggtggcagcgaggacattttctgactccctggcccctgacacggctgcactttccatcccgtcgcggggccggccgctactccggccccaggatgcagaatgtgattaatactgtgaagggaaaggcactggaagtggctgagtacctgaccccggtcctcaaggaatcaaagtttaaggaaacaggtgtaattaccccagaagagtttgtggcagctggagatcacctagtccaccactgtccaacatggcaatgggctacaggggaagaattgaaagtgaaggcatacctaccaacaggcaaacaatttttggtaaccaaaaatgtgccgtgctataagcggtgcaaacagatggaatattcagatgaattggaagctatcattgaagaagatgatggtgatggcggatgggtagatacatatcacaacacaggtattacaggaataacggaagccgttaaagagatcacactggaaaataaggacaatataaggcttcaagattgctcagcactatgtgaagaggaagaagatgaagatgaaggagaagctgcagatatggaagaatatgaagagagtggattgttggaaacagatgaggctaccctagatacaaggaaaatagtagaagcttgtaaagccaaaactgatgctggcggtgaagatgctattttgcaaaccagaacttatgacctttacatcacttatgataaatattaccagactccacgattatggttgtttggctatgatgagcaacggcagcctttaacagttgagcacatgtatgaagacatcagtcaggatcatgtgaagaaaacagtgaccattgaaaatcaccctcatctgccaccacctcccatgtgttcagttcacccatgcaggcatgctgaggtgatgaagaaaatcattgagactgttgcagaaggagggggagaacttggagttcatatgtatcttcttattttcttgaaatttgtacaagctgtcattccaacaatagaatatgactacacaagacacttcacaatgtaatgaagagagcataaaatctatcctaattattggttctgatttttaaagaattaacccatagatgtgaccattgaccatattcatcaatatatacagtttctctaataagggacttatatgtttatgcattaaataaaaatatgttccactaccagccttacttgtttaataaaaatcagtgcaaagagag

SEQ ID NO: 110470 - DNA, 3010 bp, Homo sapiens
  Payload ID: 1671
  Gene Symbol: ATG3
  Gene Name: autophagy related 3
  Uniprot ID: Q9NT62
  ENST ID: ENST00000402314
  CDS Start-End: 389-1324
gagaaggaagggaagccggaaggggcgcgagtgaagcaaagcgaggacagacagctcgcagagggcgaggggtgcgtgtgcgtccgcttctcacctcaggtctcccttcggccccgctgccctccctcgcggctgggtgacagctgggtccggtccgtcgcgggctgcctggggtgcgaggatcgcgcaccccgtcttcgcgcgctgtgcctgccgccccgccccctcgtcccgcccgtcccgtcgcgtcgcgtcccgtcccctcgggtgctgccagccgggtgctgatgcgagtcggtggcagcgaggacattttctgactccctggcccctgacacggctgcactttccatcccgtcgcggggccggccgctactccggccccaggatgcagaatgtgattaatactgtgaagggaaaggcactggaagtggctgagtacctgaccccggtcctcaaggaatcaaagtttaaggaaacaggtgtaattaccccagaagagtttgtggcagctggagatcacctagtccaccactgtccaacatggcaatgggctacaggggaagaattgaaagtgaaggcatacctaccaacaggcaaacaatttttggtaaccaaaaatgtgccgtgctataagcggtgcaaacagatggaatattcagatgaattggaagctatcattgaagaagatgatggtgatggcggatgggtagatacatatcacaacacaggtattacaggaataacggaagccgttaaagagatcacactggaaaataaggacaatataaggcttcaagattgctcagcactatgtgaagaggaagaagatgaagatgaaggagaagctgcagatatggaagaatatgaagagagtggattgttggaaacagatgaggctaccctagatacaaggaaaatagtagaagcttgtaaagccaaaactgatgctggcggtgaagatgctattttgcaaaccagaacttatgacctttacatcacttatgataaatattaccagactccacgattatggttgtttggctatgatgagcaacggcagcctttaacagttgagcacatgtatgaagacatcagtcaggatcatgtgaagaaaacagtgaccattgaaaatcaccctcatctgccaccacctcccatgtgttcagttcacccatgcaggcatgctgaggtgatgaagaaaatcattgagactgttgcagaaggagggggagaacttggagttcatatgtatccttccctgtatgtaagattagtggcaaaatggctgttaacgattttttttttgagaaatttagtgtaaccttaatgatacagtagctataacttgttttaacttctcatctgaaaatcctagtagaagtctttcatttatttagaaaatgttatattgtgatagttatgccttgcttagttgattagaacatgtccccatgtgtagcagtagctcacccttgttacagaggtaactactaatttagaataataatatgagtatctttttcttatgtacatttccagtttaacatgttaccaaaaatgtactttcccatcaggtaaaagtaaaattaggttgtgtcaatctgaggtgtctctgaagcaaataattcagcttaaacaaatacgttaattaaaagtaatgtactacgtgaagtgctttagatattcttaaaatatagtacgttcatttttctcaagacagtagcacctttcttgtatcttactatagttttcctactcagttttcttggattgacaaaagtaatacattcaagttaatgcccaagcaaactgttggatcctaaagtacatgtactcatagcatagatttatcaaaaacagtcaaaatcaatgatttacatgccagatagcttgaattagtttgatgctaggttaatacttgacttggtggtggtttcggctactatgtgttagattagatgtggagactaagatgccacgtctaatcagactgtggggcattgctaataaagtgtgtccctaagaagaactttgaactgatttgatattgaaacaaaccaaaaacttccagtccaaaccatatttactcctgaagtcctattatgcctaactggcacatctctgctggatgctaggtagcaacttggaagactgtctatatataattcataatagtaattggtttcccccaatgaaaagtaagctcctaatgtttttaagtgcaatgaacataaaaaaatttcagaatttaattaaagacagtccagtagagctcagtctttggcaaatacatacactaacctagaatcagtctactatacaggatttttatttaatttttttctcttttgctatagtacttcattatagtctattctgcctcattttctgacataactctagcaaacttaaaggagtctagtaaatgagtacattttgtactcatttaaacatgtatagctttgtcctttttatgtcaaagtaattgtgcttatatgaacacctactcattaagaagtttcaaattcaataatcgaatgagtggtcaggtagtcttaaagagcctcatgttaaatagacacaaatttgcatagttgaattctttaatagacttaatttaagattttgtggggtttttttgagaaattaatggcttaataaaatggataattacaacatgggcttaaaacatagaactatttacaaatcttattttccttagctaaaaacctttaggtatcttcttattttcttgaaatttgtacaagctgtcattccaacaatagaatatgactacacaagacacttcacaatgtaatgaagagagcataaaatctatcctaattattggttctgatttttaaagaattaacccatagatgtgaccattgaccatattcatcaatatatacagtttctctaataagggacttatatgtttatgcattaaataaaaatatgttccactaccagccttacttgtttaataaaaatcagtgcaaagaga

SEQ ID NO: 110471 - DNA, 737 bp, Homo sapiens
  Payload ID: 1671
  Gene Symbol: ATG3
  Gene Name: autophagy related 3
  ENST ID: ENST00000496423
  CDS Start-End: 125-349
cgggtgctgccagccgggtgctgatgcgagtcggtggcagcgaggacattttctgactccctggcccctgacacggctgcactttccatcccgtcgcggggccggccgctactccggccccaggatgcagaatgtgattaatactgtgaagggaaaggcactggaagtggctgagtacctgaccccggtcctcaaggaatcaaagtttaaggaaacaggtgtaattaccccagaagagtttgtggcagctggagatcacctagtccaccactgtccaacatggcaatgggctacaggggaagaattgaaagtgaaggcatacctaccaacagatggaatattcagatgaattggaagctatcattgaagaagatgatggtgatggcggatgggtagatacatatcacaacacaggtattacaggaataacggaagccgttaaagagatcacactggaaaataaggacaatataaggcttcaagattgctcagcactatgtgaagaggaagaagatgaagatgaaggagaagctgcagatatggaagaatatgaagagagtggattgttggaaacagatgaggctaccctagatacaaggaaaatagtagaagcttgtaaagccaaaactgatgctggcggtgaagatgctattttgcaaaccagaacttatgacctttacatcacttatgataaatattaccagactccacgattatggttgtttggctatgatgag

SEQ ID NO: 110472 - DNA, 639 bp, Homo sapiens
  Payload ID: 1671
  Gene Symbol: ATG3
  Gene Name: autophagy related 3
  ENST ID: ENST00000492886
  CDS Start-End: 391-639
gtgttacgcttccggaaggaggggagaagcggcttatcccgccccagcccggcccctttctcacgtcacgtgccgggagagtctagtgtcacgtgaggccccggtggcggcgcagctacggcaagagagtgagaaggaagggaagccggaaggggcgcgagtgaagcaaagcgaggacagacagctcgcagagggcgaggggaatcaaagtttaaggaaacaggtgtaattaccccagaagagtttgtggcagctggagatcacctagtccaccactgtccaacatggcaatgggctacaggggaagaattgaaagtgaaggcatacctaccaacaggcaaacaatttttggtaaccaaaaatgtgccgtgctataagcggtgcaaacagatggaatattcagatgaattggaagctatcattgaagaagatgatggtgatggcggatgggtagatacatatcacaacacaggtattacaggaataacggaagccgttaaagagatcacactggaaaataaggacaatataaggcttcaagattgctcagcactatgtgaagaggaagaagatgaagatgaaggagaagctgcagatatggaagaatatgaagagagtggattgttggaaacagatgag

SEQ ID NO: 110473 - DNA, 2129 bp, Homo sapiens
  Payload ID: 1672
  Gene Symbol: ATG4A
  Gene Name: autophagy related 4A, cysteine peptidase
  Uniprot ID: Q8WYN0
  ENST ID: ENST00000345734
  CDS Start-End: 160-1170
ggagttgcagtttgagagcagttccgggcagggaggcgcctttgctgccctcacagacttggcccctagcagtgcagaactacaagtcccagggatcctagcgaccgtccgtccgtagtcaagttgccggtggaattggcccaggatgacagctggagaatggagtcagttttatccaagtatgaagatcagattactattttcactgactacctagaagaatatccagatacagatgagctggtatggatcttagggaagcagcatctccttaaaacagaaaaatctaagctgttgtctgatataagtgctcgtctatggtttacatacagaaggaaattttcaccaattggtggaacgggcccttcatcagatgctggttggggatgtatgctacgctgtggacagatgatgctggctcaagcccttatctgtagacacttgggaagggactggagctgggagaaacaaaaagaacaacccaaagaataccaacgcatcctacagtgcttcttagatagaaaagattgttgctactctatccatcaaatggcacaaatgggtgtaggagaagggaaatcaattggagaatggtttggaccaaatacagttgcacaggtgttaaaaaaacttgctttatttgacgaatggaattccttggctgtttatgtttcaatggataacacagtggtcattgaagatatcaaaaaaatgtgccgtgtccttcccttgagtgctgacacagctggtgacaggcctcccgattctttaactgcttcaaaccagagtgacgagctcatcttcttggaccctcatacaacccagacctttgttgacactgaagagaatggaacggttaatgaccagactttccattgcctgcagtccccacagcgaatgaacatcctaaacctggatccttcagttgcattgggatttttctgcaaagaagaaaaagactttgataactggtgtagccttgttcagaaggaaattctaaaggagaatttaaggatgtttgaattagttcagaaacatccatcacactggcctccctttgtacctccagccaagccagaagtgacaaccactggggcagaattcattgactctactgagcaactggaggagtttgatctggaggaagattttgagattctgagtgtgtagaatcctgggaactcaacttgaaggtctgtcttccatctggcaccataaaaacatgaacttattgcataaaacttttctagtcagcaagtgcctgatatgccaatagcatacaaactcaatagcaatcatgactgagccaatcactgtttctcagaaaaacaaaacaaaacaaaacaaatgacagtaacccttccccggaaagaaatagaacaatcatggagcctaggagcagagagatgaggaggagttcattgcttcccagcttgtgttatatggctacagcaagtcttcagctgctgcaatgaggaaatgggcatctggaagacaaacagcaactctcagcttgcttcaagaaccagcagataagagatggttaagctgttcttcaccctttcagatgtgacctcttttggactaagcagcaatctgttctcttgctcaaataataaagtgactgaatcagggaggaaaaggttcttgttaaattatttgattgtgtagttgaagtaattataatttatatcaaaacgtttgtcaaagaaacgatgtcaaatatacacttcttgatctcccttctgtttgcggggatcttactatttgatgggtcactgtccccattcttactgatacttttgtcagatatcaccctgtccttaaatcatgatcacttaaatcaggggtcagcaaactttttctgtaaagggccagacgggaaatattttgggctttgcaggccatgcggcctctgtcacatctactcaactctgctgttgacatgcaaaagcagcaatagacaatatgcgtgtaaatgagtgtggctgtaatccaagaaaactttatttacaaaagcaggtggagggctgggtttggcctgcaggctgtagcttgccaatcagtgacttaaattgttgatttttgtttgataaattaaaaataaattgtgtttgaagtatacccta

SEQ ID NO: 110474 - DNA, 1941 bp, Homo sapiens
  Payload ID: 1672
  Gene Symbol: ATG4A
  Gene Name: autophagy related 4A, cysteine peptidase
  ENST ID: ENST00000343524
  CDS Start-End: 18-713
aggatgacagctggagaatggagtcagttttatccaagtatgaagatcagattactattttcactgactacctagaagaatatccagatacagatgagctggtatggatcttagggaagcagcatctccttaaaacagaaaaatctaagctgttgtctgatataagtgctcgtctatggtttacatacagaaggaaattttcaccaattggtggaacgggcccttcatcagatgctggttggggatgtatgctacgctgtggacagatgatgctggctcaagcccttatctgtagacacttgggaagggactggagctgggagaaacaaaaagaacaacccaaagaataccaacgcatcctacagtgcttcttagatagaaaagattgttgctactctatccatcaaatggaaaaaatgtgccgtgtccttcccttgagtgctgacacagctggtgacaggcctcccgattctttaactgcttcaaaccagagtaagggcacctctgcctactgctcagcctggaaacccctgctgctcattgtgccccttcgcctgggcataaaccaaatcaatcctgtctatgttgatgcattcaaagtgacgagctcatcttcttggaccctcatacaacccagacctttgttgacactgaagagaatggaacggttaatgaccagactttccattgcctgcagtccccacagcgaatgaacatcctaaacctggatccttcagttgcattgggatttttctgcaaagaagaaaaagactttgataactggtgtagccttgttcagaaggaaattctaaaggagaatttaaggatgtttgaattagttcagaaacatccatcacactggcctccctttgtacctccagccaagccagaagtgacaaccactggggcagaattcattgactctactgagcaactggaggagtttgatctggaggaagattttgagattctgagtgtgtagaatcctgggaactcaacttgaaggtctgtcttccatctggcaccataaaaacatgaacttattgcataaaacttttctagtcagcaagtgcctgatatgccaatagcatacaaactcaatagcaatcatgactgagccaatcactgtttctcagaaaaacaaaacaaaacaaaacaaatgacagtaacccttccccggaaagaaatagaacaatcatggagcctaggagcagagagatgaggaggagttcattgcttcccagcttgtgttatatggctacagcaagtcttcagctgctgcaatgaggaaatgggcatctggaagacaaacagcaactctcagcttgcttcaagaaccagcagataagagatggttaagctgttcttcaccctttcagatgtgacctcttttggactaagcagcaatctgttctcttgctcaaataataaagtgactgaatcagggaggaaaaggttcttgttaaattatttgattgtgtagttgaagtaattataatttatatcaaaacgtttgtcaaagaaacgatgtcaaatatacacttcttgatctcccttctgtttgcggggatcttactatttgatgggtcactgtccccattcttactgatacttttgtcagatatcaccctgtccttaaatcatgatcacttaaatcaggggtcagcaaactttttctgtaaagggccagacgggaaatattttgggctttgcaggccatgcggcctctgtcacatctactcaactctgctgttgacatgcaaaagcagcaatagacaatatgcgtgtaaatgagtgtggctgtaatccaagaaaactttatttacaaaagcaggtggagggctgggtttggcctgcaggctgtagcttgccaatcagtgacttaaattgttgatttttgtttgataaattaaaaataaattgtgtttgaagtatacccta

SEQ ID NO: 110475 - DNA, 2315 bp, Homo sapiens
  Payload ID: 1672
  Gene Symbol: ATG4A
  Gene Name: autophagy related 4A, cysteine peptidase
  Uniprot ID: Q8WYN0
  ENST ID: ENST00000372232
  CDS Start-End: 160-1356
ggagttgcagtttgagagcagttccgggcagggaggcgcctttgctgccctcacagacttggcccctagcagtgcagaactacaagtcccagggatcctagcgaccgtccgtccgtagtcaagttgccggtggaattggcccaggatgacagctggagaatggagtcagttttatccaagtatgaagatcagattactattttcactgactacctagaagaatatccagatacagatgagctggtatggatcttagggaagcagcatctccttaaaacagaaaaatctaagctgttgtctgatataagtgctcgtctatggtttacatacagaaggaaattttcaccaattggtggaacgggcccttcatcagatgctggttggggatgtatgctacgctgtggacagatgatgctggctcaagcccttatctgtagacacttgggaagggactggagctgggagaaacaaaaagaacaacccaaagaataccaacgcatcctacagtgcttcttagatagaaaagattgttgctactctatccatcaaatggcacaaatgggtgtaggagaagggaaatcaattggagaatggtttggaccaaatacagttgcacaggtgttaaaaaaacttgctttatttgacgaatggaattccttggctgtttatgtttcaatggataacacagtggtcattgaagatatcaaaaaaatgtgccgtgtccttcccttgagtgctgacacagctggtgacaggcctcccgattctttaactgcttcaaaccagagtaagggcacctctgcctactgctcagcctggaaacccctgctgctcattgtgccccttcgcctgggcataaaccaaatcaatcctgtctatgttgatgcattcaaagagtgttttaagatgccacagtctttaggggcattaggaggaaaaccaaataacgcgtattatttcataggattcttaggtgacgagctcatcttcttggaccctcatacaacccagacctttgttgacactgaagagaatggaacggttaatgaccagactttccattgcctgcagtccccacagcgaatgaacatcctaaacctggatccttcagttgcattgggatttttctgcaaagaagaaaaagactttgataactggtgtagccttgttcagaaggaaattctaaaggagaatttaaggatgtttgaattagttcagaaacatccatcacactggcctccctttgtacctccagccaagccagaagtgacaaccactggggcagaattcattgactctactgagcaactggaggagtttgatctggaggaagattttgagattctgagtgtgtagaatcctgggaactcaacttgaaggtctgtcttccatctggcaccataaaaacatgaacttattgcataaaacttttctagtcagcaagtgcctgatatgccaatagcatacaaactcaatagcaatcatgactgagccaatcactgtttctcagaaaaacaaaacaaaacaaaacaaatgacagtaacccttccccggaaagaaatagaacaatcatggagcctaggagcagagagatgaggaggagttcattgcttcccagcttgtgttatatggctacagcaagtcttcagctgctgcaatgaggaaatgggcatctggaagacaaacagcaactctcagcttgcttcaagaaccagcagataagagatggttaagctgttcttcaccctttcagatgtgacctcttttggactaagcagcaatctgttctcttgctcaaataataaagtgactgaatcagggaggaaaaggttcttgttaaattatttgattgtgtagttgaagtaattataatttatatcaaaacgtttgtcaaagaaacgatgtcaaatatacacttcttgatctcccttctgtttgcggggatcttactatttgatgggtcactgtccccattcttactgatacttttgtcagatatcaccctgtccttaaatcatgatcacttaaatcaggggtcagcaaactttttctgtaaagggccagacgggaaatattttgggctttgcaggccatgcggcctctgtcacatctactcaactctgctgttgacatgcaaaagcagcaatagacaatatgcgtgtaaatgagtgtggctgtaatccaagaaaactttatttacaaaagcaggtggagggctgggtttggcctgcaggctgtagcttgccaatcagtgacttaaattgttgatttttgtttgataaattaaaaataaattgtgtttgaagtatacccta

SEQ ID NO: 110476 - DNA, 2501 bp, Homo sapiens
  Payload ID: 1672
  Gene Symbol: ATG4A
  Gene Name: autophagy related 4A, cysteine peptidase
  ENST ID: ENST00000372246
  CDS Start-End: 44-187
agtcaagttgccggtggaattggcccaggatgacagctggagaatggagtcagttttatccaagtatgaagatcagattactattttcactgactacctagaagaatatccagatacagatgagctggtatggatcttagggaagcagcatctccttaaaacagattgggaaagaaagaccttttaacctgaaactgctaacagcccagcacccagataaagccagagcttggaaagaggcagctctgagatttgtgtctttctgaggagacatcctcttcagaggccctcacttagcgtggaggaaggaacaggaagaggctgatgaaaaggcaggagaggaagttaggcattgtggagctcctcctgagcctggcttcattattttgattggagaattctgaacagtggaaagcctggagctagcaattaggagaccttttgtattcagactcttctaactcagaaaaatctaagctgttgtctgatataagtgctcgtctatggtttacatacagaaggaaattttcaccaattggtggaacgggcccttcatcagatgctggttggggatgtatgctacgctgtggacagatgatgctggctcaagcccttatctgtagacacttgggaagggactggagctgggagaaacaaaaagaacaacccaaagaataccaacgcatcctacagtgcttcttagatagaaaagattgttgctactctatccatcaaatggcacaaatgggtgtaggagaagggaaatcaattggagaatggtttggaccaaatacagttgcacaggtgttaaaaaaacttgctttatttgacgaatggaattccttggctgtttatgtttcaatggataacacagtggtcattgaagatatcaaaaaaatgtgccgtgtccttcccttgagtgctgacacagctggtgacaggcctcccgattctttaactgcttcaaaccagagtaagggcacctctgcctactgctcagcctggaaacccctgctgctcattgtgccccttcgcctgggcataaaccaaatcaatcctgtctatgttgatgcattcaaagagtgttttaagatgccacagtctttaggggcattaggaggaaaaccaaataacgcgtattatttcataggattcttaggtgacgagctcatcttcttggaccctcatacaacccagacctttgttgacactgaagagaatggaacggttaatgaccagactttccattgcctgcagtccccacagcgaatgaacatcctaaacctggatccttcagttgcattgggatttttctgcaaagaagaaaaagactttgataactggtgtagccttgttcagaaggaaattctaaaggagaatttaaggatgtttgaattagttcagaaacatccatcacactggcctccctttgtacctccagccaagccagaagtgacaaccactggggcagaattcattgactctactgagcaactggaggagtttgatctggaggaagattttgagattctgagtgtgtagaatcctgggaactcaacttgaaggtctgtcttccatctggcaccataaaaacatgaacttattgcataaaacttttctagtcagcaagtgcctgatatgccaatagcatacaaactcaatagcaatcatgactgagccaatcactgtttctcagaaaaacaaaacaaaacaaaacaaatgacagtaacccttccccggaaagaaatagaacaatcatggagcctaggagcagagagatgaggaggagttcattgcttcccagcttgtgttatatggctacagcaagtcttcagctgctgcaatgaggaaatgggcatctggaagacaaacagcaactctcagcttgcttcaagaaccagcagataagagatggttaagctgttcttcaccctttcagatgtgacctcttttggactaagcagcaatctgttctcttgctcaaataataaagtgactgaatcagggaggaaaaggttcttgttaaattatttgattgtgtagttgaagtaattataatttatatcaaaacgtttgtcaaagaaacgatgtcaaatatacacttcttgatctcccttctgtttgcggggatcttactatttgatgggtcactgtccccattcttactgatacttttgtcagatatcaccctgtccttaaatcatgatcacttaaatcaggggtcagcaaactttttctgtaaagggccagacgggaaatattttgggctttgcaggccatgcggcctctgtcacatctactcaactctgctgttgacatgcaaaagcagcaatagacaatatgcgtgtaaatgagtgtggctgtaatccaagaaaactttatttacaaaagcaggtggagggctgggtttggcctgcaggctgtagcttgccaatcagtgacttaaattgttgatttttgtttgataaattaaaaataaattgtgtttgaagtatacccta

SEQ ID NO: 110477 - DNA, 935 bp, Homo sapiens
  Payload ID: 1672
  Gene Symbol: ATG4A
  Gene Name: autophagy related 4A, cysteine peptidase
  ENST ID: ENST00000394892
  CDS Start-End: 1-935
ttttatccaagtatgaagatcagattactattttcactgactacctagaagaatatccagatacagatgagctggtatggatcttagggaagcagcatctccttaaaacaggtggaacgggcccttcatcagatgctggttggggatgtatgctacgctgtggacagatgatgctggctcaagcccttatctgtagacacttgggaagggactggagctgggagaaacaaaaagaacaacccaaagaataccaacgcatcctacagtgcttcttagatagaaaagattgttgctactctatccatcaaatggcacaaatgggtgtaggagaagggaaatcaattggagaatggtttggaccaaatacagttgcacaggtgttaaaaaaacttgctttatttgacgaatggaattccttggctgtttatgtttcaatggataacacagtggtcattgaagatatcaaaaaaatgtgccgtgtccttcccttgagtgctgacacagctggtgacaggcctcccgattctttaactgcttcaaaccagagtaagggcacctctgcctactgctcagcctggaaacccctgctgctcattgtgccccttcgcctgggcataaaccaaatcaatcctgtctatgttgatgcattcaaagagtgttttaagatgccacagtctttaggggcattaggaggaaaaccaaataacgcgtattatttcataggattcttaggtgacgagctcatcttcttggaccctcatacaacccagacctttgttgacactgaagagaatggaacggttaatgaccagactttccattgcctgcagtccccacagcgaatgaacatcctaaacctggatccttcagttgcattgggatttttctgcaaagaagaaaaagactttgataactggtgtagccttgttcagaag

SEQ ID NO: 110478 - DNA, 939 bp, Homo sapiens
  Payload ID: 1672
  Gene Symbol: ATG4A
  Gene Name: autophagy related 4A, cysteine peptidase
  ENST ID: ENST00000457035
  CDS Start-End: 333-939
cgaccgtccgtccgtagtcaagttgccggtggaattggcccaggatgacagctggagaatggagtcaggtacggggagcggctttgagtggaaccgtgtgaaagagccgggttttatccaagtatgaagatcagattactattttcactgactacctagaagaatatccagatacagatgagctggtatggatcttagggaagcagcatctccttaaaacagaaaaatctaagctgttgtctgatataagtgctcgtctatggtttacatacagaaggaaattttcaccaattggtggaacgggcccttcatcagatgctggttggggatgtatgctacgctgtggacagatgatgctggctcaagcccttatctgtagacacttgggaagggactggagctgggagaaacaaaaagaacaacccaaagaataccaacgcatcctacagtgcttcttagatagaaaagattgttgctactctatccatcaaatggcacaaatgggtgtaggagaagggaaatcaattggagaatggtttggaccaaatacagttgcacaggtgttaaaaaaacttgctttatttgacgaatggaattccttggctgtttatgtttcaatggataacacagtggtcattgaagatatcaaaaaaatgtgccgtgtccttcccttgagtgctgacacagctggtgacaggcctcccgattctttaactgcttcaaaccagagtaagggcacctctgcctactgctcagcctggaaacccctgctgctcattgtgccccttcgcctgggcataaaccaaatcaatcctgtctatgttgatgcattcaaagagtgttttaagatgccacagtctttaggggcattaggaggaaaaccaaataacgcgtattatttcataggattcttaggtgacgagctcatcttcttggacc

SEQ ID NO: 110479 - DNA, 1566 bp, Homo sapiens
  Payload ID: 1673
  Gene Symbol: ATG4B
  Gene Name: autophagy related 4B, cysteine peptidase
  ENST ID: ENST00000344376
  CDS Start-End: 1-230
cagctactctgacctacgacactctccggtttgctgagtttgaagattttcctgagacctcagagcccgtttggatactgggtagaaaatacagcattttcacagaaaaggacgagatcttgtctgatgtggcatctagactttggtttacatacaggaaaaactttccagccattggaggttgtcgggacatttcactctccagtaaatgtggcccttggcgttactgagtcctaagaggggggacaggccccacctcggacacaggctggggctgcatgctgcggtgtggacagatgatctttgcccaagccctggtgtgccggcacctaggccgagattggaggtggacacaaaggaagaggcagccagacagctacttcagcgtcctcaacgcattcatcgacaggaaggacagttactactccattcaccagatagcgcaaatgggagttggcgaaggcaagtccataggccagtggtacgggcccaacactgtcgcccaggtcctgaagaagcttgctgtcttcgatacgtggagctccttggcggtccacattgcaatggacaacactgttgtgatggaggaaatcagaaggttgtgcaggaccagcgttccctgtgcaggcgccactgcgtttcctgcagattccgaccggcactgcaacggattccctgccggagctgaggtcaccaacaggccgtcgccatggagacccctggtacttctcattcccctgcgcctggggctcacggacatcaacgaggcctacgtggagacgctgaagcactgcttcatgatgccccagtccctgggcgtcatcggagggaagcccaacagcgcccactacttcatcggctacgttggtgaggagctcatctacctggacccccacaccacgcagccagccgtggagcccactgatggctgcttcatcccggacgagagcttccactgccagcacccgccgtgccgcatgagcatcgcggagcttgacccgtccatcgctgtggggtttttctgtaagactgaagatgacttcaatgattggtgccagcaagtcaaaaagctgtctctgcttggaggtgccctgcccatgtttgagctggtggagctgcagccttcacatctggcctgccccgacgtcctgaacctgtccctagattcttctgatgtagagcgactggaaagattcttcgactcagaagatgaagactttgaaatcctgtccctttgaaaatcctggggtcgggggtggcacctgtgagagcctggggctcctggtgccgctgcgtttcatccatcccgcccgctcgcctgccgagggctgcgccccgtgctgcctccccccagagggccacccgctgtgctcgtggactgaggctgcgctgcccgggaggccttactgcttggtgtcagactgcccagctcagagtgcccgtcagggcctgtgcatccgcacgcggagccgtctgttaggagcttccagagtgttctctcgacactgccagccccgtgttagcacctgggcctcagtcccacttgctcccaggcgccggttctgt

SEQ ID NO: 110480 - DNA, 663 bp, Homo sapiens
  Payload ID: 1673
  Gene Symbol: ATG4B
  Gene Name: autophagy related 4B, cysteine peptidase
  ENST ID: ENST00000400771
  CDS Start-End: 6-663
ggaagatggacgcagctactctgacctacgacactctccggtttgctgagtttgaagattttcctgagacctcagagcccgtttggatactgggtagaaaatacagcattttcacagaaaaggacgagatcttgtctgatgtggcatctagactttggtttacatacaggaaaaactttccagccattggggggacaggccccacctcggacacaggctggggctgcatgctgcggtgtggacagatgatctttgcccaagccctggtgtgccggcacctaggccgagattggaggtggacacaaaggaagaggcagccagacagctacttcagcgtcctcaacgcattcatcgacaggaaggacagttactactccattcaccagataggaaggttgtgcaggaccagcgttccctgtgcaggcgccactgcgtttcctgcagattccgaccggcactgcaacggattccctgccggagctgaggtcaccaacaggccgtcgccatggagacccctggtacttctcattcccctgcgcctggggctcacggacatcaacgaggcctacgtggagacgctgaagcactgcttcatgatgccccagtccctgggcgtcatcggagggaagcccaacagcgcccactacttcatcggctacgttg

SEQ ID NO: 110481 - DNA, 625 bp, Homo sapiens
  Payload ID: 1673
  Gene Symbol: ATG4B
  Gene Name: autophagy related 4B, cysteine peptidase
  ENST ID: ENST00000400772
  CDS Start-End: 90-356
attggcccccgcggcgtcccgtcgccgcgtcgcgttgctggcccgtcggagcgacgccgctcgggtcagtcggcggccggactgggaagatggacgcagctactctgacctacgacactctccggtttgctgagtttgaagattttcctgagacctcagagcccgtttggatactgggtagaaaatacagcattttcacagaaaaggacgagatcttgtctgatgtggcatctagactttggtttacatacaggaaaaactttccagccattgccattcatcattgttgtataccctggagctggaaggagatggggactggttctcagccttgcctctcaccggcggagaactgaggccggaggggggacaggccccacctcggacacaggctggggctgcatgctgcggtgtggacagatgatctttgcccaagccctggtgtgccggcacctaggccgagattggaggtggacacaaaggaagaggcagccagacagctacttcagcgtcctcaacgcattcatcgacaggaaggacagttactactccattcaccagatagcgcaaatgggagttggcgaaggcaagtccataggccagtggtacgggcccaacactgtcg

SEQ ID NO: 110482 - DNA, 3294 bp, Homo sapiens
  Payload ID: 1673
  Gene Symbol: ATG4B
  Gene Name: autophagy related 4B, cysteine peptidase
  Uniprot ID: Q9Y4P1
  ENST ID: ENST00000405546
  CDS Start-End: 503-1645
ctcgccagccgcgggttcgggcgtcttcggaccagcggggcgccgcaggcccctcgcagcgtccgtcggcaggcgggcagacgggcgggggagtcgccccggcggggcaagtccgtaccgcgacatgggcgcgccgagcacgtccgtaccgcaagatggctgctcggacggggacagagctcgcctctgccgcctcgacaactgctcctgggtcctctaagaggaggaagcgccacccatggcacacagtgtcccgtcggacagcagaaccagccgtcgtcccacgacacgaccccatgccgcccgcagggcgccccggggctcgcgtcggcccggccgtacgccaaaatggcggctcccgcgtatttccgctcgcgcgccgtatcgtcttcgccgcctgcgccggcacacctattggcccccgcggcgtcccgtcgccgcgtcgcgttgctggcccgtcggagcgacgccgctcgggtcagtcggcggccggactgggaagatggacgcagctactctgacctacgacactctccggtttgctgagtttgaagattttcctgagacctcagagcccgtttggatactgggtagaaaatacagcattttcacagaaaaggacgagatcttgtctgatgtggcatctagactttggtttacatacaggaaaaactttccagccattggggggacaggccccacctcggacacaggctggggctgcatgctgcggtgtggacagatgatctttgcccaagccctggtgtgccggcacctaggccgagattggaggtggacacaaaggaagaggcagccagacagctacttcagcgtcctcaacgcattcatcgacaggaaggacagttactactccattcaccagatagcgcaaatgggagttggcgaaggcaagtccataggccagtggtacgggcccaacactgtcgcccaggtcctgaagaagcttgctgtcttcgatacgtggagctccttggcggtccacattgcaatggacaacactgttgtgatggaggaaatcagaaggttgtgcaggaccagcgttccctgtgcaggcgccactgcgtttcctgcagattccgaccggcactgcaacggattccctgccggagctgaggtcaccaacaggccgtcgccatggagacccctggtacttctcattcccctgcgcctggggctcacggacatcaacgaggcctacgtggagacgctgaagcactgcttcatgatgccccagtccctgggcgtcatcggagggaagcccaacagcgcccactacttcatcggctacgttggtgaggagctcatctacctggacccccacaccacgcagccagccgtggagcccactgatggctgcttcatcccggacgagagcttccactgccagcacccgccgtgccgcatgagcatcgcggagcttgacccgtccatcgctgtggggtttttctgtaagactgaagatgacttcaatgattggtgccagcaagtcaaaaagctgtctctgcttggaggtgccctgcccatgtttgagctggtggagctgcagccttcacatctggcctgccccgacgtcctgaacctgtccctaggtgagagctgccaagtccagattcttctgatgtagagcgactggaaagattcttcgactcagaagatgaagactttgaaatcctgtccctttgaaaatcctggggtcgggggtggcacctgtgagagcctggggctcctggtgccgctgcgtttcatccatcccgcccgctcgcctgccgagggctgcgccccgtgctgcctccccccagagggccacccgctgtgctcgtggactgaggctgcgctgcccgggaggccttactgcttggtgtcagactgcccagctcagagtgcccgtcagggcctgtgcatccgcacgcggagccgtctgttaggagcttccagagtgttctctcgacactgccagccccgtgttagcacctgggcctcagtcccacttgctcccaggcgccggttctgtggttggtttggaattaaagtcctgtttgaagttgtcagacacagacatgaatttctgggcgctccctgagtcagagtctcagaagacctgtgcaggctggcgtgagaggagcggcagccacactgcggccccacgcccaaggactgggctgctctcgaggggggcgcgcccaccgctgtgtcctctctgcccagcctggcttaccaagggctacctcagtgggagatgaggttggaggaacgaaggcgaggttcctccttgctttggggagaaaagtattcaggaagtgggtgtgtgggaaacctgaagatggcgtgcacaggacacagcgtgggcggcctgggcagaagggcggctggctgtcctggagctgctgctggagcctgccctcagagtgtccctttccagtgctgtggcattctgtggcagcttccccaggtgtggtgacggggggggggcggggcctccacctgtgacagccaggcttgagggtggacggcgtgcctctcccaggagccttccccatgtccttgccttgctgagaattgccctcccatgccgctgaggtgttaggtggtttagggccaaaaggggaaaaccacttgagtcttgtggtgtgtggtgggcagacaccacagggtggcatcacctggtggcatttccagaacctcagccccgattccagcacccaccaccgcctgaccctgtgtaacctgctgtcccgggtcccagagtgcactctgccccgctgctctgctgcctgtcctgggaaagtatctttgccccactaggaaatgtaaacaggagggcttggggagcgtgggcacttttctcatgagcagctactgcggcgttggcaggactcgctgctgctgctgctgcttgtgtaggtcggggagccagagatccccgaggacgcgcgccggacagtcggcactgaccggcccacctggtagcagaggacacccccagccccccaagcattgaagacatagtgtatttcctcgtatcctttctcccttgggtgtagttggggtggggaagcagggaaggctggtgcgatctccattccttgggctccacgtccgagttcatggtgcgccgctgtgctgggagctgcagtggtaatgtgtgggacaccttgaccaaaggggagctttgtctcgtgtgttttgaaaaaggcttaatgaagagaatgttgttcattcttagtagtatagtttgcaattcttaatggcaaataataagtttcagtagaaaac

SEQ ID NO: 110483 - DNA, 2878 bp, Homo sapiens
  Payload ID: 1673
  Gene Symbol: ATG4B
  Gene Name: autophagy related 4B, cysteine peptidase
  Uniprot ID: Q9Y4P1
  ENST ID: ENST00000404914
  CDS Start-End: 104-1285
gcgccggcacacctattggcccccgcggcgtcccgtcgccgcgtcgcgttgctggcccgtcggagcgacgccgctcgggtcagtcggcggccggactgggaagatggacgcagctactctgacctacgacactctccggtttgctgagtttgaagattttcctgagacctcagagcccgtttggatactgggtagaaaatacagcattttcacagaaaaggacgagatcttgtctgatgtggcatctagactttggtttacatacaggaaaaactttccagccattggggggacaggccccacctcggacacaggctggggctgcatgctgcggtgtggacagatgatctttgcccaagccctggtgtgccggcacctaggccgagattggaggtggacacaaaggaagaggcagccagacagctacttcagcgtcctcaacgcattcatcgacaggaaggacagttactactccattcaccagatagcgcaaatgggagttggcgaaggcaagtccataggccagtggtacgggcccaacactgtcgcccaggtcctgaagaagcttgctgtcttcgatacgtggagctccttggcggtccacattgcaatggacaacactgttgtgatggaggaaatcagaaggttgtgcaggaccagcgttccctgtgcaggcgccactgcgtttcctgcagattccgaccggcactgcaacggattccctgccggagctgaggtcaccaacaggccgtcgccatggagacccctggtacttctcattcccctgcgcctggggctcacggacatcaacgaggcctacgtggagacgctgaagcactgcttcatgatgccccagtccctgggcgtcatcggagggaagcccaacagcgcccactacttcatcggctacgttggtgaggagctcatctacctggacccccacaccacgcagccagccgtggagcccactgatggctgcttcatcccggacgagagcttccactgccagcacccgccgtgccgcatgagcatcgcggagcttgacccgtccatcgctgtggggtttttctgtaagactgaagatgacttcaatgattggtgccagcaagtcaaaaagctgtctctgcttggaggtgccctgcccatgtttgagctggtggagctgcagccttcacatctggcctgccccgacgtcctgaacctgtccctagattcttctgatgtagagcgactggaaagattcttcgactcagaagatgaagactttgaaatcctgtccctttgaaaatcctggggtcgggggtggcacctgtgagagcctggggctcctggtgccgctgcgtttcatccatcccgcccgctcgcctgccgagggctgcgccccgtgctgcctccccccagagggccacccgctgtgctcgtggactgaggctgcgctgcccgggaggccttactgcttggtgtcagactgcccagctcagagtgcccgtcagggcctgtgcatccgcacgcggagccgtctgttaggagcttccagagtgttctctcgacactgccagccccgtgttagcacctgggcctcagtcccacttgctcccaggcgccggttctgtggttggtttggaattaaagtcctgtttgaagttgtcagacacagacatgaatttctgggcgctccctgagtcagagtctcagaagacctgtgcaggctggcgtgagaggagcggcagccacactgcggccccacgcccaaggactgggctgctctcgaggggggcgcgcccaccgctgtgtcctctctgcccagcctggcttaccaagggctacctcagtgggagatgaggttggaggaacgaaggcgaggttcctccttgctttggggagaaaagtattcaggaagtgggtgtgtgggaaacctgaagatggcgtgcacaggacacagcgtgggcggcctgggcagaagggcggctggctgtcctggagctgctgctggagcctgccctcagagtgtccctttccagtgctgtggcattctgtggcagcttccccaggtgtggtgacggggggggggcggggcctccacctgtgacagccaggcttgagggtggacggcgtgcctctcccaggagccttccccatgtccttgccttgctgagaattgccctcccatgccgctgaggtgttaggtggtttagggccaaaaggggaaaaccacttgagtcttgtggtgtgtggtgggcagacaccacagggtggcatcacctggtggcatttccagaacctcagccccgattccagcacccaccaccgcctgaccctgtgtaacctgctgtcccgggtcccagagtgcactctgccccgctgctctgctgcctgtcctgggaaagtatctttgccccactaggaaatgtaaacaggagggcttggggagcgtgggcacttttctcatgagcagctactgcggcgttggcaggactcgctgctgctgctgctgcttgtgtaggtcggggagccagagatccccgaggacgcgcgccggacagtcggcactgaccggcccacctggtagcagaggacacccccagccccccaagcattgaagacatagtgtatttcctcgtatcctttctcccttgggtgtagttggggtggggaagcagggaaggctggtgcgatctccattccttgggctccacgtccgagttcatggtgcgccgctgtgctgggagctgcagtggtaatgtgtgggacaccttgaccaaaggggagctttgtctcgtgtgttttgaaaaaggcttaatgaagagaatgttgttcattcttagtagtatagtttgcaattcttaatggcaaataataagtttcagtagaaaacaaa

SEQ ID NO: 110484 - DNA, 1685 bp, Homo sapiens
  Payload ID: 1673
  Gene Symbol: ATG4B
  Gene Name: autophagy related 4B, cysteine peptidase
  Uniprot ID: Q9Y4P1
  ENST ID: ENST00000402096
  CDS Start-End: 326-1321
gcgccggcacacctattggcccccgcggcgtcccgtcgccgcgtcgcgttgctggcccgtcggagcgacgccgctcgggtcagtcggcggccggactgggaagatggacgcagctactctgacctacgacactctccggtttgctgagtttgaagattttcctgagacctcagagcccgtttggatactgggtagaaaatacagcattttcacagaaaaggacgagatcttgtctgatgtggcatctagactttggtttacatacaggaaaaactttccagccattggggggacaggccccacctcggacacaggctggggctgcatgctgcggtgtggacagatgatctttgcccaagccctggtgtgccggcacctaggccgagattggaggtggacacaaaggaagaggcagccagacagctacttcagcgtcctcaacgcattcatcgacaggaaggacagttactactccattcaccagatagcgcaaatgggagttggcgaaggcaagtccataggccagtggtacgggcccaacactgtcgcccaggtcctgaagaagcttgctgtcttcgatacgtggagctccttggcggtccacattgcaatggacaacactgttgtgatggaggaaatcagaaggttgtgcaggaccagcgttccctgtgcaggcgccactgcgtttcctgcagattccgaccggcactgcaacggattccctgccggagctgaggtcaccaacaggccgtcgccatggagacccctggtacttctcattcccctgcgcctggggctcacggacatcaacgaggcctacgtggagacgctgaagcactgcttcatgatgccccagtccctgggcgtcatcggagggaagcccaacagcgcccactacttcatcggctacgttggtgaggagctcatctacctggacccccacaccacgcagccagccgtggagcccactgatggctgcttcatcccggacgagagcttccactgccagcacccgccgtgccgcatgagcatcgcggagcttgacccgtccatcgctgtggggtttttctgtaagactgaagatgacttcaatgattggtgccagcaagtcaaaaagctgtctctgcttggaggtgccctgcccatgtttgagctggtggagctgcagccttcacatctggcctgccccgacgtcctgaacctgtccctaggtgagagctgccaagtccaggtggggtccctcggagattcttctgatgtagagcgactggaaagattcttcgactcagaagatgaagactttgaaatcctgtccctttgaaaatcctggggtcgggggtggcacctgtgagagcctggggctcctggtgccgctgcgtttcatccatcccgcccgctcgcctgccgagggctgcgccccgtgctgcctccccccagagggccacccgctgtgctcgtggactgaggctgcgctgcccgggaggccttactgcttggtgtcagactgcccagctcagagtgcccgtcagggcctgtgcatccgcacgcggagccgtctgttaggagcttccagagtgttctctcgacactgccagccccgtgttagcacctgggcctcagtcccacttgctcccaggcgccggttctgtggttggtttggaattaaagtcctgtttgaagttgtc

SEQ ID NO: 110485 - DNA, 356 bp, Homo sapiens
  Payload ID: 1673
  Gene Symbol: ATG4B
  Gene Name: autophagy related 4B, cysteine peptidase
  ENST ID: ENST00000415107
  CDS Start-End: 6-272
ggaagatggacgcagctactctgacctacgacactctccggtttgctgagtttgaagattttcctgagacctcagagcccgtttggatactgggtagaaaatacagcattttcacagaaaaggacgagatcttgtctgatgtggcatctagactttggtttacatacaggaaaaactttccagccattgccattcatcattgttgtataccctggagctggaaggagatggggactggttctcagccttgcctctcaccggcggagaactgaggccggaggaggttgtcgggacatttcactctccagtaaatgtggcccttggcgttactgagtcctaagaggggggacaggccc

SEQ ID NO: 110486 - DNA, 553 bp, Homo sapiens
  Payload ID: 1673
  Gene Symbol: ATG4B
  Gene Name: autophagy related 4B, cysteine peptidase
  ENST ID: ENST00000419606
  CDS Start-End: 355-553
agtcggcggccggactgggaagatggacgcagtaaccagtagattctccaagctgcttttccgtgacgagaaagagaaacagtgaatttgtatcatcgggtcttagtttcttggggtcctaagagagagagaaagagaaggactactctgacctacgacactctccggtttgctgagtttgaagattttcctgagacctcagagcccgtttggatactgggtagaaaatacagcattttcacagaaaaggacgagatcttgtctgatgtggcatctagactttggtttacatacaggaaaaactttccagccattggggggacaggccccacctcggacacaggctggggctgcatgctgcggtgtggacagatgatctttgcccaagccctggtgtgccggcacctaggccgagattggaggtggacacaaaggaagaggcagccagacagctacttcagcgtcctcaacgcattcatcgacaggaaggacagttactactccattcaccagatagcgcaaatgggagttggcgaaggcaagtccataggcc

SEQ ID NO: 110487 - DNA, 580 bp, Homo sapiens
  Payload ID: 1673
  Gene Symbol: ATG4B
  Gene Name: autophagy related 4B, cysteine peptidase
  ENST ID: ENST00000428861
  CDS Start-End: 1-580
acttttgcacaggtctgcttggttagtgaaagcatgtctccctttctaggaaggttgtgcaggaccagcgttccctgtgcaggcgccactgcgtttcctgcagattccgaccggcactgcaacggattccctgccggagctgaggtcaccaacaggccgtcgccatggagacccctggtacttctcattcccctgcgcctggggctcacggacatcaacgaggcctacgtggagacgctgaagcactgcttcatgatgccccagtccctgggcgtcatcggagggaagcccaacagcgcccactacttcatcggctacgttggtgaggagctcatctacctggacccccacaccacgcagccagccgtggagcccactgatggctgcttcatcccggacgagagcttccactgccagcacccgccgtgccgcatgagcatcgcggagcttgacccgtccatcgctgtggggtttttctgtaagactgaagatgacttcaatgattggtgccagcaagtcaaaaagctgtctctgcttggaggtgccctgcccatgtttgagctggtggagctgcagcctt

SEQ ID NO: 110488 - DNA, 623 bp, Homo sapiens
  Payload ID: 1673
  Gene Symbol: ATG4B
  Gene Name: autophagy related 4B, cysteine peptidase
  ENST ID: ENST00000430617
  CDS Start-End: 308-623
ggagttgccgggggtcggtctttccgcaggagctactctgacctacgacactctccggtttgctgagtttgaagattttcctgagacctcagagcccgtttggatactgggtagaaaatacagcattttcacagaaaaggacgagatcttgtctgatgtggcatctagactttggtttacatacaggaaaaactttccagccattggaggttgtcgggacatttcactctccagtaaatgtggcccttggcgttactgagtcctaagaggggggacaggccccacctcggacacaggctggggctgcatgctgcggtgtggacagatgatctttgcccaagccctggtgtgccggcacctaggccgagattggaggtggacacaaaggaagaggcagccagacagctacttcagcgtcctcaacgcattcatcgacaggaaggacagttactactccattcaccagatagcgcaaatgggagttggcgaaggcaagtccataggccagtggtacgggcccaacactgtcgcccaggtcctgaagaagcttgctgtcttcgatacgtggagctccttggcggtccacattgcaatggacaacactgttgtgatggaggaaatca

SEQ ID NO: 110489 - DNA, 807 bp, Homo sapiens
  Payload ID: 1673
  Gene Symbol: ATG4B
  Gene Name: autophagy related 4B, cysteine peptidase
  ENST ID: ENST00000425239
  CDS Start-End: 9-807
ctgggaagatggacgcagctactctgacctacgacactctccggtttgctgagtttgaagattttcctgagacctcagagcccgtttggatactgggtagaaaatacagcattttcacagaaaaggacgagatcttgtctgatgtggcatctagactttggtttacatacaggaaaaactttccagccattggggggacaggccccacctcggacacaggctggggctgcatgctgcggtgtggacagatgatctttgcccaagccctggtgtgccggcacctaggccgagattggaggtggacacaaaggaagaggcagccagacagctacttcagcgtcctcaacgcattcatcgacaggaaggacagttactactccattcaccagatagcgcaaatgggagttggcgaaggcaagtccataggccagtggtacgggcccaacactgtcgcccaggtcctgaagaagcttgctgtcttcgatacgtggagctccttggcggtccacattgcaatggacaacactgttgtgatggaggaaatcagtaagtggctcagagtttccatggacaagaaagttgaaatcacgggcaacatacacacttcctcgcctgagtccccacgggagcctcggcgagtgttgtcagtcgccccatgccgtgcaggtgctccgtggggcctgtgcgccaagccagatgcacggtggcctcgctctcctatcccggcggtcataccaagagaggagagcccaggctgtctggaggccgcgacttggtatctcacgtcgtgttttgtgtcttggttac

SEQ ID NO: 110490 - DNA, 524 bp, Homo sapiens
  Payload ID: 1673
  Gene Symbol: ATG4B
  Gene Name: autophagy related 4B, cysteine peptidase
  ENST ID: ENST00000429899
  CDS Start-End: 84-524
gggccatctggccatgagcacttctctctctgtctgccacgacaggggggacaggccccacctcggacacaggctggggctgcatgctgcggtgtggacagatgatctttgcccaagccctggtgtgccggcacctaggccgagattggaggtggacacaaaggaagaggcagccagacagctacttcagcgtcctcaacgcattcatcgacaggaaggacagttactactccattcaccagatagcgcaaatgggagttggcgaaggcaagtccataggccagtggtacgggcccaacactgtcgcccaggtcctgaagaagcttgctgtcttcgatacgtggagctccttggcggtccacattgcaatggacaacactgttgtgatggaggaaatcagaaggttgtgcaggaccagcgttccctgtgcaggcgccactgcgtttcctgcagattccgaccggcactgcaacggattccctgccggagctgaggtcaccaacaggccgtcgccatggagaccc

SEQ ID NO: 110491 - DNA, 370 bp, Homo sapiens
  Payload ID: 1673
  Gene Symbol: ATG4B
  Gene Name: autophagy related 4B, cysteine peptidase
  ENST ID: ENST00000625810
  CDS Start-End: 104-370
gcgccggcacacctattggcccccgcggcgtcccgtcgccgcgtcgcgttgctggcccgtcggagcgacgccgctcgggtcagtcggcggccggactgggaagatggacgcagctactctgacctacgacactctccggtttgctgagtttgaagattttcctgagacctcagagcccgtttggatactgggtagaaaatacagcattttcacagaaaaggacgagatcttgtctgatgtggcatctagactttggtttacatacaggaaaaactttccagccattgccattcatcattgttgtataccctggagctggaaggagatggggactggttctcagccttgcctctcaccggcggagaactga

SEQ ID NO: 110492 - DNA, 2938 bp, Homo sapiens
  Payload ID: 1674
  Gene Symbol: ATG4C
  Gene Name: autophagy related 4C, cysteine peptidase
  Uniprot ID: Q96DT6
  ENST ID: ENST00000317868
  CDS Start-End: 208-1584
gtacctgtagctgcggcgctgaggtcggaacgtctgcgtgtgtgcgggctggttttgtggcggctgctgctagagctggagcatttgccgggttggtggctcctgcacatttttacagttctccagtccttctctttcgtcagtataaaagattaaactctacagaagaatgcaatcaagtgatggcttttcctttagaatttgaatatggaggctacaggaacagatgaagttgacaagctaaaaaccaaatttatatctgcttggaacaacatgaaatatagttgggtgttgaaaacaaagacgtattttagtagaaattctcctgtattattgcttggaaaatgttaccattttaaatatgaagatgaagataaaacgttacctgcagagtcgggatgtacaatagaggatcacgtaattgcaggaaatgtagaagaatttcgtaaagatttcatttctagaatatggctgacctacagggaagaattccctcaaatagaaggctcagctttgacaacagactgtgggtggggctgcacattgagaactggccagatgctcttggctcaaggactcatactacactttcttggtagagcttggacctggcctgatgctttgaatattgaaaattcagactctgaatcatggacttcccacactgtcaaaaaatttactgcatcatttgaagcatcactttcaggggaaagagaattcaaaaccccaacaatttctctgaaggaaacaattgggaaatattctgatgatcatgaaatgcgaaatgaagtttatcataggaaaatcatctcttggtttggtgattcccccttggctctttttggcttacatcaactaatagaatatggaaagaagtctgggaaaaaagcaggagattggtatggaccagctgtggttgctcacattttaagaaaagcagttgaagaagcaaggcatcctgatttacaaggaataactatttatgttgcacaagattgtacagtttacaattctgatgtaattgataaacagagtgcttccatgacttctgataatgcagatgacaaagctgttattattctagttcctgttagacttggtggagaaagaaccaacaccgactacttagaatttgtgaagggtattttaagcctggaatattgtgtgggtattattggtggcaaacctaaacagtcatattactttgctggatttcaagatgacagtttgatttacatggatcctcattactgccaatcttttgtagatgtcagcataaaggatttccctcttgagacattccactgcccttctcccaaaaagatgtcttttcgaaaaatggatcccagctgtacaataggattttactgtcgaaatgttcaggacttcaaacgagcttctgaagaaatcaccaagatgctgaaattttcttctaaggagaaatatcccttatttacttttgtaaatggtcattccagagactatgattttacatctactacaaccaatgaagaagaccttttttcagaggatgaaaagaaacaattaaaaagatttagcacggaagagtttgtcttgctttaaagattagcacatttgtgcttgataagaagaattccattgaaaggggaaaaatgaagagaaacaagtatatctgaaatgtttattttcacaaatatcttaattttatatgttctttaaaaaagaacatttgaaaatataacagttaaagatatttttctaaaagagaaatgatttaatgaatcttgctttctaataaataaattgagtgattctggttgcattcctatttccctaagatctactagtgataattctaccttaactgtaagccttttagtcttcaaagtcttccacctgagcccattgttctcatggaggttttgtgatattaaccctcccccaaagactgggatcaccaaatagtttcaaaattctcagtttgtactgaagaccagaagatcagagaaggaaactttaatgctgtctagcctcctgctattaatgcaatcaaagaatacttttgcatatgtcttgataattaaatagtatttgttaactgtgatatgcatacacttatataagcagaattatgagttaaagtaatacttagcaatatgattttataatggctcctcattatgcttgctgttgaaccttttatgaggagtgaatataaagtattggttttccctcacaaatttaaagattatgttattaatactattataactgcatcaatcaagtcagataaaggcaactataaaatagtagtagtgtttgtttcctatctcaagggcgaaattttatgggaactcaatttattatgcagtttttaagtttaaaataccaagaaagatgtcactagattctcttctatgtgatttttgttttttatataaagcagtgtagtggtgtttagaagctgaggccacctgtaaggcaaatctgccttaagtgtattatgtgttacttaaaggcaaatttgtgatctaaaagtacaagagtgatttttgagctaggattataaaatacataataaagatgtgagaagataaaatgcttttgttttggttttaatgttgggattattttaatcctttcatttgaaaaatcagtgtctcaaatgaattctgttcatttataataaatgcatatattgctctgaaaacaatattaatttttttaagtggagctttcatgtttcagtgtagaaacgtgacttataaagacataaaattgtgtatcatctaaagtcattgatctcttccatcagaaaacctgtttgtttagagttgcatgtaaagctgaaagagagggtgggcggattgttttagtatacctgatgagaaaaatcaggtttgacatttctcagtgaagattacttactgagttgaaataaatagtctgaaatcta

SEQ ID NO: 110493 - DNA, 665 bp, Homo sapiens
  Payload ID: 1674
  Gene Symbol: ATG4C
  Gene Name: autophagy related 4C, cysteine peptidase
  ENST ID: ENST00000371118
  CDS Start-End: 97-665
cccagagggagtggaaaggctttgaaagtcagtataaaagattaaactctacagaagaatgcaatcaagtgatggcttttcctttagaatttgaatatggaggctacaggaacagatgaagttgacaagctaaaaaccaaatttatatctgcttggaacaacatgaaatatagttgggtgttgaaaacaaagacgtattttagtagaaattctcctgtattattgcttggaaaatgttaccattttaaatatgaagatgaagataaaacgttacctgcagagtcgggatgtacaatagaggatcacgtaattgcaggaaatgtagaagaatttcgtaaagatttcatttctagaatatggctgacctacagggaagaattccctcaaatagaaggctcagctttgacaacagactgtgggtggggctgcacattgagaactggccagatgctcttggctcaaggactcatactacactttcttggtagagcttggacctggcctgatgctttgaatattgaaaattcagactctgaatcatggacttcccacactgtcaaaaaatttactgcatcatttgaagcatcactttcaggggaaagagaattcaaaaccccaacaatttctctgaaggaaacaattgggaaatattctgatgatcatga

SEQ ID NO: 110494 - DNA, 2890 bp, Homo sapiens
  Payload ID: 1674
  Gene Symbol: ATG4C
  Gene Name: autophagy related 4C, cysteine peptidase
  Uniprot ID: Q96DT6
  ENST ID: ENST00000371120
  CDS Start-End: 160-1536
gtacctgtagctgcggcgctgaggtcggaacgtctgcgtgtgtgcgggctggttttgtggcggctgctgctagagctggagcatttgccggtcagtataaaagattaaactctacagaagaatgcaatcaagtgatggcttttcctttagaatttgaatatggaggctacaggaacagatgaagttgacaagctaaaaaccaaatttatatctgcttggaacaacatgaaatatagttgggtgttgaaaacaaagacgtattttagtagaaattctcctgtattattgcttggaaaatgttaccattttaaatatgaagatgaagataaaacgttacctgcagagtcgggatgtacaatagaggatcacgtaattgcaggaaatgtagaagaatttcgtaaagatttcatttctagaatatggctgacctacagggaagaattccctcaaatagaaggctcagctttgacaacagactgtgggtggggctgcacattgagaactggccagatgctcttggctcaaggactcatactacactttcttggtagagcttggacctggcctgatgctttgaatattgaaaattcagactctgaatcatggacttcccacactgtcaaaaaatttactgcatcatttgaagcatcactttcaggggaaagagaattcaaaaccccaacaatttctctgaaggaaacaattgggaaatattctgatgatcatgaaatgcgaaatgaagtttatcataggaaaatcatctcttggtttggtgattcccccttggctctttttggcttacatcaactaatagaatatggaaagaagtctgggaaaaaagcaggagattggtatggaccagctgtggttgctcacattttaagaaaagcagttgaagaagcaaggcatcctgatttacaaggaataactatttatgttgcacaagattgtacagtttacaattctgatgtaattgataaacagagtgcttccatgacttctgataatgcagatgacaaagctgttattattctagttcctgttagacttggtggagaaagaaccaacaccgactacttagaatttgtgaagggtattttaagcctggaatattgtgtgggtattattggtggcaaacctaaacagtcatattactttgctggatttcaagatgacagtttgatttacatggatcctcattactgccaatcttttgtagatgtcagcataaaggatttccctcttgagacattccactgcccttctcccaaaaagatgtcttttcgaaaaatggatcccagctgtacaataggattttactgtcgaaatgttcaggacttcaaacgagcttctgaagaaatcaccaagatgctgaaattttcttctaaggagaaatatcccttatttacttttgtaaatggtcattccagagactatgattttacatctactacaaccaatgaagaagaccttttttcagaggatgaaaagaaacaattaaaaagatttagcacggaagagtttgtcttgctttaaagattagcacatttgtgcttgataagaagaattccattgaaaggggaaaaatgaagagaaacaagtatatctgaaatgtttattttcacaaatatcttaattttatatgttctttaaaaaagaacatttgaaaatataacagttaaagatatttttctaaaagagaaatgatttaatgaatcttgctttctaataaataaattgagtgattctggttgcattcctatttccctaagatctactagtgataattctaccttaactgtaagccttttagtcttcaaagtcttccacctgagcccattgttctcatggaggttttgtgatattaaccctcccccaaagactgggatcaccaaatagtttcaaaattctcagtttgtactgaagaccagaagatcagagaaggaaactttaatgctgtctagcctcctgctattaatgcaatcaaagaatacttttgcatatgtcttgataattaaatagtatttgttaactgtgatatgcatacacttatataagcagaattatgagttaaagtaatacttagcaatatgattttataatggctcctcattatgcttgctgttgaaccttttatgaggagtgaatataaagtattggttttccctcacaaatttaaagattatgttattaatactattataactgcatcaatcaagtcagataaaggcaactataaaatagtagtagtgtttgtttcctatctcaagggcgaaattttatgggaactcaatttattatgcagtttttaagtttaaaataccaagaaagatgtcactagattctcttctatgtgatttttgttttttatataaagcagtgtagtggtgtttagaagctgaggccacctgtaaggcaaatctgccttaagtgtattatgtgttacttaaaggcaaatttgtgatctaaaagtacaagagtgatttttgagctaggattataaaatacataataaagatgtgagaagataaaatgcttttgttttggttttaatgttgggattattttaatcctttcatttgaaaaatcagtgtctcaaatgaattctgttcatttataataaatgcatatattgctctgaaaacaatattaatttttttaagtggagctttcatgtttcagtgtagaaacgtgacttataaagacataaaattgtgtatcatctaaagtcattgatctcttccatcagaaaacctgtttgtttagagttgcatgtaaagctgaaagagagggtgggcggattgttttagtatacctgatgagaaaaatcaggtttgacatttctcagtgaagattacttactgagttgaaataaatagtctgaaatcta

SEQ ID NO: 110495 - DNA, 464 bp, Homo sapiens
  Payload ID: 1674
  Gene Symbol: ATG4C
  Gene Name: autophagy related 4C, cysteine peptidase
  ENST ID: ENST00000414558
  CDS Start-End: 1-332
ctatttatgttgcacaagattgtacagtttacaattctgatgtaattgataaacagagtgcttccatgacttctgataatgcagatgacaaagctgttattattctagttcctgttagacttggtggagaaagaaccaacaccgactacttagaatttgtgaagggtattttaagcctggaatattgtgtgggtattattggtggcaaacctaaacagtcatattactttgctggatttcaagatgacagtttgatttacatggatcctcattactgccaatcttttgtagatgtcagcataaaggatttccctcttgaggtcattttgtgatccagtattttaattcagaaaaatttgagaatacataaatgaaacatgtaattattacatggttttgattgttttcccagttggtgcttttacagactaaagtaattttacagaataaaataacttaaatca

SEQ ID NO: 110496 - DNA, 603 bp, Homo sapiens
  Payload ID: 1674
  Gene Symbol: ATG4C
  Gene Name: autophagy related 4C, cysteine peptidase
  ENST ID: ENST00000443289
  CDS Start-End: 149-603
gtacctgtagctgcggcgctgaggtcggaacgtctgcgtgtgtgcgggctggttttgtggcggctgctgctagagctggagcatttgccgggttggtggctcctgcacatttttacagttctccagtccttctctttcgaatttgaatatggaggctacaggaacagatgaagttgacaagctaaaaaccaaatttatatctgcttggaacaacatgaaatatagttgggtgttgaaaacaaagacgtattttagtagaaattctcctgtattattgcttggaaaatgttaccattttaaatatgaagatgaagataaaacgttacctgcagagtcgggatgtacaatagaggatcacgtaattgcaggaaatgtagaagaatttcgtaaagatttcatttctagaatatggctgacctacagggaagaattccctcaaatagaaggctcagctttgacaacagactgtgggtggggctgcacattgagaactggccagatgctcttggctcaaggactcatactacactttcttggtagagcttggacctggcctgatgctttgaatattgaaaattcagactctgaatcatggacttccca

SEQ ID NO: 110497 - DNA, 1949 bp, Homo sapiens
  Payload ID: 1675
  Gene Symbol: ATG4D
  Gene Name: autophagy related 4D, cysteine peptidase
  Uniprot ID: Q86TL0
  ENST ID: ENST00000309469
  CDS Start-End: 174-1598
agatggcgatggctgcggtagcagcggcggcggctgttgcctggcccggtaccctggggacgggggccgagtagcgccttccccgggccccgtgaaccggctgcgggtcgcccttggggggcagcggccgcagccccccacctgggccctcggtccgccctcccggcgcgtccatgaactcagtgtcgccggccgccgcgcagtaccggagcagcagcccggaggacgcgcgccgccggcccgaggcccgcaggccgcggggtcccagaggcccagaccccaacggcctggggccttccggagccagcggccccgctcttggctctcccggggctggcccgagtgagccggacgaagtggacaagttcaaggccaagttcctgacagcctggaacaacgtcaagtacggttgggtggttaaaagccggaccagctttagcaagatctccagcatccacctctgtggccgccgctaccgtttcgagggcgagggtgacatacagcgtttccagcgggactttgtgtcccgcctgtggctcacataccgccgggacttcccgccccttcctgggggctgcctgacctcggactgtggctgggggtgcatgttacgcagcggccagatgatgctggcacagggccttctgctgcatttcctgcccagagactggacatgggccgagggcatgggcctgggcccccctgagctgtcagggtcagcctctcccagccggtaccatgggcctgcccgctggatgcccccacgctgggcccagggtgcccctgagctggagcaggaacgccggcaccggcagattgtgtcctggttcgccgaccacccccgggccccctttggcctacaccggctggtggagcttgggcagagctcaggcaagaaggcaggtgactggtatgggccatcgctagtggcacacatcctcaggaaagccgtggagagctgctccgacgtcacccgcctggtggtgtacgtttctcaggactgcacagtgtacaaggcggatgtggcacgcctggtggccaggccagaccccacagccgagtggaagtctgtggtcatcctggtgcccgtgcgactgggtggcgagactctcaaccccgtgtatgtgccctgcgtgaaggaactcctgcgttgcgagctgtgcctgggcatcatgggtgggaaaccgcgacactcactgtacttcattggctaccaagatgacttcctgctgtacctggaccctcactactgccagcccactgtggatgtcagccaggccgacttccccctggagtccttccactgcacctcgccccgcaagatggcctttgccaagatggacccaagctgtaccgtgggcttctatgctggagacaggaaggagtttgagacactctgctcagagctgaccagggtcctcagctcctcctcagccacagagcggtaccccatgttcaccctggccgagggccatgctcaggaccacagcctggacgacctctgctcccagctcgcccagcccacactccggctccctcgcacagggcggctcctcagggccaaacgccccagctctgaggactttgtgtttttataaagggaggggatgaggggaaagatacaacactatttatttttttatttatgtcatgtcgggtgtgggatcttgagctctggcagtgatgatggtacttcctgttgtcagcccctcaagcccagctgcaaccagtctggggccattcagccagggacagagcccacagagcccatacacctgtctcccaccagcggggccctcctggcagggtagggaaggaggaccccgggcacccccctcagggcctgactcacgtactgtagtttgcactggacgcccgggccctccctgtcccaaagcccccttgggggaactgtggctgctgggggccaataaagctgtgtaacttga

SEQ ID NO: 110498 - DNA, 529 bp, Homo sapiens
  Payload ID: 1675
  Gene Symbol: ATG4D
  Gene Name: autophagy related 4D, cysteine peptidase
  ENST ID: ENST00000586863
  CDS Start-End: 1-529
gaacaacgtcaagtacggttgggtggttaaaagccggaccagctttagcaagatctccagcatccacctctgtggccgccgctaccgtttcgagggcgagggtgacatacagcgtttccagcgggactttgtgtcccgcctgtggctcacataccgccgggacttcccgccccttcctgggggctgcctgacctcggactgtggctgggggtgcatgttacgcagcggccagatgatgctggcacagggccttctgctgcatttcctgcccagagtgtacaaggcggatgtggcacgcctggtggccaggccagaccccacagccgagtggaagtctgtggtcatcctggtgcccgtgcgactgggtggcgagactctcaaccccgtgtatgtgccctgcgtgaaggaactcctgcgttgcgagctgtgcctgggcatcatgggtgggaaaccgcgacactcactgtacttcattggctaccaaggtaggcccaccccctcctcactcctcccaccccccaccgcaccc

SEQ ID NO: 110499 - DNA, 729 bp, Homo sapiens
  Payload ID: 1675
  Gene Symbol: ATG4D
  Gene Name: autophagy related 4D, cysteine peptidase
  ENST ID: ENST00000585752
  CDS Start-End: 174-536
agatggcgatggctgcggtagcagcggcggcggctgttgcctggcccggtaccctggggacgggggccgagtagcgccttccccgggccccgtgaaccggctgcgggtcgcccttggggggcagcggccgcagccccccacctgggccctcggtccgccctcccggcgcgtccatgaactcagtgtcgccggccgccgcgcagtaccggagcagcagcccggaggacgcgcgccgccggcccgaggcccgcaggccgcggggtcccagaggcccagaccccaacggcctggggccttccggagccagcggccccgctcttggctctcccggggctggcccgagtgagccggacgaagtggacaagttcaaggccaagttcctgacagcctggaacaacgtcaagtacggttgggtggttaaaagccggaccagctttagcaagatctccagcatccacctctgtggccgccgctaccgtttcgagggcgagggtgacatacagcgtttccagcgggactttgtgtcccgcctatgacttcctgctgtacctggaccctcactactgccagcccactgtggatgtcagccaggccgacttccccctggagtccttccactgcacctcgccccgcaagatggcctttgccaagatggacccaagctgtaccgtgggcttctatgctggagacaggaaggagtttgagacactctgctcagagctgaccagg

SEQ ID NO: 110500 - DNA, 931 bp, Homo sapiens
  Payload ID: 1675
  Gene Symbol: ATG4D
  Gene Name: autophagy related 4D, cysteine peptidase
  ENST ID: ENST00000589753
  CDS Start-End: 1-204
cgccgggacttcccgccccttcctgggggctgcctgacctcggactgtggctgggggtgcatgttacgcagcggccagatgatgctggcacagggccttctgctgcatttcctgcccagaggaactcctgcgttgcgagctgtgcctgggcatcatgggtgggaaaccgcgacactcactgtacttcattggctaccaagatgacttcctgctgtacctggaccctcactactgccagcccactgtggatgtcagccaggccgacttccccctggagtccttccactgcacctcgccccgcaagatggcctttgccaagatggacccaagctgtaccgtgggcttctatgctggagacaggaaggagtttgagacactctgctcagagctgaccagggtcctcagctcctcctcagccacagagcggtaccccatgttcaccctggccgagggccatgctcaggaccacagcctggacgacctctgctcccagctcgcccagcccacactccggctccctcgcacagggcggctcctcagggccaaacgccccagctctgaggactttgtgtttttataaagggaggggatgaggggaaagatacaacactatttatttttttatttatgtcatgtcgggtgtgggatcttgagctctggcagtgatgatggtacttcctgttgtcagcccctcaagcccagctgcaaccagtctggggccattcagccagggacagagcccacagagcccatacacctgtctcccaccagcggggccctcctggcagggtagggaaggaggaccccgggcacccccctcagggcctgactcacgtactgtagtttgcactggacgcccgggccctccctgtcccaaagcccccttgggggaactgtggctgctgggggccaataaagctgtgtaacttga

SEQ ID NO: 110501 - DNA, 632 bp, Homo sapiens
  Payload ID: 1675
  Gene Symbol: ATG4D
  Gene Name: autophagy related 4D, cysteine peptidase
  ENST ID: ENST00000588972
  CDS Start-End: 1-534
gtgaaggaactcctgcgttgcgagctgtgcctgggcatcatgggtgggaaaccgcgacactcactgtacttcattggctaccaaggtaggcccaccccctcctcactcctcccaccccccaccgcacccccactcacacctgcaccccctgcagatgacttcctgctgtacctggaccctcactactgccagcccactgtggatgtcagccaggccgacttccccctggagtccttccactgcacctcgccccgcaagatggcctttgccaagatggacccaagctgtaccgtgggcttctatgctggagacaggaaggagtttgagacactctgctcagagctgaccagggtcctcagctcctcctcagccacagagcggtaccccatgttcaccctggccgagggccatgctcaggaccacagcctggacgacctctgctcccagctcgcccagcccacactccggctccctcgcacagggcggctcctcagggccaaacgccccagctctgaggactttgtgtttttataaagggaggggatgaggggaaagatacaacactatttatttttttatttatgtcatgtcgggtgtgggatcttgagctctggcagtgatgatggtacttc

SEQ ID NO: 110502 - DNA, 628 bp, Homo sapiens
  Payload ID: 1675
  Gene Symbol: ATG4D
  Gene Name: autophagy related 4D, cysteine peptidase
  ENST ID: ENST00000586477
  CDS Start-End: 1-628
ttcaaggccaagttcctgacagcctggaacaacgtcaagtacggttgggtggttaaaagccggaccagctttagcaagatctccagcatccacctctgtggccgccgctaccgtttcgagggcgagggtgagctggtggttgggaccagggctgggggaggcctctccacgcccgccggagtgtccctggtggcagctgacagacccgctcttgtaggtgacatacagcgtttccagcgggactttgtgtcccgcctgtggctcacataccgccgggacttcccgccccttcctgggggctgcctgacctcggactgtggctgggggtgcatgttacgcagcggccagatgatgctggcacagggccttctgctgcatttcctgcccagagactggacatgggccgagggcatgggcctgggcccccctgagctgtcagggtcagcctctcccagccggtaccatgggcctgcccgctggatgcccccacgctgggcccagggtgcccctgagctggagcaggaacgccggcaccggcagattgtgtcctggttcgccgaccacccccgggccccctttggcctacaccggctggtggagcttgggcagagctcaggcaagaaggcag

SEQ ID NO: 110503 - DNA, 1619 bp, Homo sapiens
  Payload ID: 1675
  Gene Symbol: ATG4D
  Gene Name: autophagy related 4D, cysteine peptidase
  ENST ID: ENST00000588667
  CDS Start-End: 121-807
ctggggacgggggccgagtagcgccttccccgggccccgtgaaccggctgcgggtcgcccttggggggcagcggccgcagccccccacctgggccctcggtccgccctcccggcgcgtccatgaactcagtgtcgccggccgccgcgcagtaccggagcagcagcccggaggacgcgcgccgccggcccgaggcccgcaggccgcggggtcccagaggcccagaccccaacggcctggggccttccggagccagcggccccgctcttggctctcccggggctggcccgagtgagccggacgaagtggacaagttcaaggccaagttcctgacagcctggaacaacgtcaagtacggttgggtggttaaaagccggaccagctttagcaagatctccagcatccacctctgtggccgccgctaccgtttcgagggcgagggtgacatacagcgtttccagcgggactttgtgtcccgcctgtggctcacataccgccgggacttcccgccccttcctgggggctgcctgacctcggactgtggctgggggtgcatgttacgcagcggccagatgatgctggcacagggccttctgctgcatttcctgcccagaggaaagccgtggagagctgctccgacgtcacccgcctggtggtgtacgtttctcaggactgcacagtgtacaaggcggatgtggcacgcctggtggccaggccagaccccacagccgagtggaagtctgtggtcatcctggtgcccgtgcgactgggtggcgagactctcaaccccgtgtatgtgccctgcgtgaaggaactcctgcgttgcgagctgtgcctgggcatcatgggtgggaaaccgcgacactcactgtacttcattggctaccaagatgacttcctgctgtacctggaccctcactactgccagcccactgtggatgtcagccaggccgacttccccctggagtccttccactgcacctcgccccgcaagatggcctttgccaagatggacccaagctgtaccgtgggcttctatgctggagacaggaaggagtttgagacactctgctcagagctgaccagggtcctcagctcctcctcagccacagagcggtaccccatgttcaccctggccgagggccatgctcaggaccacagcctggacgacctctgctcccagctcgcccagcccacactccggctccctcgcacagggcggctcctcagggccaaacgccccagctctgaggactttgtgtttttataaagggaggggatgaggggaaagatacaacactatttatttttttatttatgtcatgtcgggtgtgggatcttgagctctggcagtgatgatggtacttcctgttgtcagcccctcaagcccagctgcaaccagtctggggccattcagccagggacagagcccacagagcccatacacctgtctcccaccagcggggccctcctggcagggtagggaaggaggaccccgggcacccccctcagggcctgactcacgtactgtagtttgcactggacgcccgggccctccctgtcccaaagcccccttgggggaactgtggctgctgggggccaataaagctgtgtaacttga

SEQ ID NO: 110504 - DNA, 377 bp, Homo sapiens
  Payload ID: 1675
  Gene Symbol: ATG4D
  Gene Name: autophagy related 4D, cysteine peptidase
  ENST ID: ENST00000585437
  CDS Start-End: 1-300
gggaaaccgcgacactcactgtacttcattggctaccaagatgacttcctgctgtacctggaccctcactactgccagcccactgtggatgtcagccaggccgacttccccctggaggtcctcagctcctcctcagccacagagcggtaccccatgttcaccctggccgagggccatgctcaggaccacagcctggacgacctctgctcccagctcgcccagcccacactccggctccctcgcacagggcggctcctcagggccaaacgccccagctctgaggactttgtgtttttataaagggaggggatgaggggaaagatacaacactatttatttttttatttatgtcatgtcgggtgtgggatcttgagctc

SEQ ID NO: 110505 - DNA, 1752 bp, Homo sapiens
  Payload ID: 1675
  Gene Symbol: ATG4D
  Gene Name: autophagy related 4D, cysteine peptidase
  ENST ID: ENST00000586417
  CDS Start-End: 197-679
tcatccggggtcctggcccgctaagatggcgatggctgcggtagcagcggcggcggctgttgcctggcccggtaccctggggacgggggccgagtagcgccttccccgggccccgtgaaccggctgcgggtcgcccttggggggcagcggccgcagccccccacctgggccctcggtccgccctcccggcgcgtccatgaactcagtgtcgccggccgccgcgcagtaccggagcagcagcccggaggacgcgcgccgccggcccgaggcccgcaggccgcggggtcccagaggcccagaccccaacggcctggggccttccggagccagcggccccgctcttggctctcccggggctggcccgagtgagccggacgaagtggacaagttcaaggccaagttcctgacagcctggaacaacgtcaagtacgatgggggaatggaagcgctgttgctgtcatgcaagtgcttcatctcgctgggcgctgcccctacgtctccccaggttgggtggttaaaagccggaccagctttagcaagatctccagcatccacctctgtggccgccgctaccgtttcgagggcgagggtgacatacagcgtttccagcgggactttgtgtcccgcctgtggctcacataccgccgggacttcccgccccttcctgggggctgcctgacctcggactgtggctgggggtgcatgttacgcagcggccagatgatgctggcacagggccttctgctgcatttcctgcccagagactggacatgggccgagggcatgggcctgggcccccctgagctgtcagggtcagcctctcccagccggtaccatgggcctgcccgctggatgcccccacgctgggcccagggtgcccctgagctggagcaggaacgccggcaccggcagattgtgtcctggttcgccgaccacccccgggccccctttggcctacaccggctggtggagcttgggcagagctcaggcaagaaggcaggtgactggtatgggccatcgctagtggcacacatcctcaggaaagccgtggagagctgctccgacgtcacccgcctggtggtgtacgtttctcaggactgcacagtgtacaaggcggatgtggcacgcctggtggccaggccagaccccacagccgagtggaagtctgtggtcatcctggtgcccgtgcgactgggtggcgagactctcaaccccgtgtatgtgccctgcgtgaaggaactcctgcgttgcgagctgtgcctgggcatcatgggtgggaaaccgcgacactcactgtacttcattggctaccaagatgacttcctgctgtacctggaccctcactactgccagcccactgtggatgtcagccaggccgacttccccctggagtccttccactgcacctcgccccgcaagatggcctttgccaagatggacccaagctgtaccgtgggcttctatgctggagacaggaaggagtttgagacactctgctcagagctgaccagggtcctcagctcctcctcagccacagagcggtaccccatgttcaccctggccgagggccatgctcaggaccacagcctggacgacctctgctcccagctcgcccagcccacactccggctccctcgcacagggcggctcctcagggccaaacgccccagctctgaggactttgtgtttttataaagggaggggatgaggggaaagatacaacactatttatttttttatttatgtcatgtc

SEQ ID NO: 110506 - DNA, 1555 bp, Homo sapiens
  Payload ID: 1675
  Gene Symbol: ATG4D
  Gene Name: autophagy related 4D, cysteine peptidase
  ENST ID: ENST00000588857
  CDS Start-End: 175-1179
aagatggcgatggctgcggtagcagcggcggcggctgttgcctggcccggtaccctggggacgggggccgagtagcgccttccccgggccccgtgaaccggctgcgggtcgcccttggggggcagcggccgcagccccccacctgggccctcggtccgccctcccggcgcgtccatgaactcagtgtcgccggccgccgcgcagtaccggagcagcagcccggaggacgcgcgccgccggcccgaggcccgcaggccgcggggtcccagaggcccagaccccaacggcctggggccttccggagccagcggccccgctcttggctctcccggggctggcccgagtgagccggacgaagtggacaagttcaaggccaagttcctgacagcctggaacaacgtcaagtacggttgggtggttaaaagccggaccagctttagcaagatctccagcatccacctctgtggccgccgctaccgtttcgagggcgagggtgacatacagcgtttccagcgggactttgtgtcccgcctgtggctcacataccgccgggacttcccgccccttcctgggggctgcctgacctcggactgtggctgggggtgcatgttacgcagcggccagatgatgctggcacagggccttctgctgcatttcctgcccagagactggacatgggccgagggcatgggcctgggcccccctgagctgtcagggtcagcctctcccagccggtaccatgggcctgcccgctggatgcccccacgctgggcccagggtgcccctgagctggagcaggaacgccggcaccggcagattgtgtcctggttcgccgaccacccccgggccccctttggcctacaccggctggtggagcttgggcagagctcaggcaagaaggaaagccgtggagagctgctccgacgtcacccgcctggtggtgtacgtttctcaggactgcacagtgtacaaggcggatgtggcacgcctggtggccaggccagaccccacagccgagtggaagtctgtggtcatcctggtgcccgtgcgactgggtggcgagactctcaaccccgtgtatgtgccctgcgtgaaggaactcctgcgttgcgagctgtgcctgggcatcatgggtgggaaaccgcgacactcactgtacttcattggctaccaagatgacttcctgctgtacctggaccctcactactgccagcccactgtggatgtcagccaggccgacttccccctggagtccttccactgcacctcgccccgcaagatggcctttgccaagatggacccaagctgtaccgtgggcttctatgctggagacaggaaggagtttgagacactctgctcagagctgaccagggtcctcagctcctcctcagccacagagcggtaccccatgttcaccctggccgagggccatgctcaggaccacagcctggacgacctctgctcccagctcgcccagcccacactccggctccctcgcacagggcggctcctcagggccaaacgccccagctctgaggactttgtgtttttataa

SEQ ID NO: 110507 - DNA, 607 bp, Homo sapiens
  Payload ID: 1675
  Gene Symbol: ATG4D
  Gene Name: autophagy related 4D, cysteine peptidase
  ENST ID: ENST00000587256
  CDS Start-End: 1-607
cctgcccagagactggacatgggccgagggcatgggcctgggcccccctgagctgtcagggtcagcctctcccagccggtaccatgggcctgcccgctggatgcccccacgctgggcccagggtgcccctgagctggagcaggaacgccggcaccggcagattgtgtcctggttcgccgaccacccccgggccccctttggcctacaccggctggtggagcttgggcagagctcaggcaagaaggcaggtgactggaaagccgtggagagctgctccgacgtcacccgcctggtggtgtacgtttctcaggactgcacagtgtacaaggcggatgtggcacgcctggtggccaggccagaccccacagccgagtggaagtctgtggtcatcctggtgcccgtgcgactgggtggcgagactctcaaccccgtgtatgtgccctgcgtgaaggaactcctgcgttgcgagctgtgcctgggcatcatgggtgggaaaccgcgacactcactgtacttcattggctaccaagatgacttcctgctgtacctggaccctcactactgccagcccactgtggatgtcagccaggccgacttccccctggag

SEQ ID NO: 110508 - DNA, 3092 bp, Homo sapiens
  Payload ID: 1676
  Gene Symbol: ATG5
  Gene Name: autophagy related 5
  Uniprot ID: Q9H1Y0
  ENST ID: ENST00000343245
  CDS Start-End: 201-1028
gcccgcccggccgcgatggcgggtgaaggtggttcctccgggcaaggtggagttggcgagacgccggcccggagccctggggccggttggcgggtgtggcctgcggggtccctcttggggtacatgtctgttgcttactaagtttggctttggttgaaataagaatttagcctgtatgtactgctttaactcctggaagaatgacagatgacaaagatgtgcttcgagatgtgtggtttggacgaattccaacttgtttcacgctatatcaggatgagataactgaaagggaagcagaaccatactatttgcttttgccaagagtaagttatttgacgttggtaactgacaaagtgaaaaagcactttcagaaggttatgagacaagaagacattagtgagatatggtttgaatatgaaggcacaccactgaaatggcattatccaattggtttgctatttgatcttcttgcatcaagttcagctcttccttggaacatcacagtacattttaagagttttccagaaaaagaccttctgcactgtccatctaaggatgcaattgaagctcattttatgtcatgtatgaaagaagctgatgctttaaaacataaaagtcaagtaatcaatgaaatgcagaaaaaagatcacaagcaactctggatgggattgcaaaatgacagatttgaccagttttgggccatcaatcggaaactcatggaatatcctgcagaagaaaatggatttcgttatatcccctttagaatatatcagacaacgactgaaagacctttcattcagaagctgtttcgtcctgtggctgcagatggacagttgcacacactaggagatctcctcaaagaagtttgtccttctgctattgatcctgaagatggggaaaaaaagaatcaagtgatgattcatggaattgagccaatgttggaaacacctctgcagtggctgagtgaacatctgagctacccggataattttcttcatattagtatcatcccacagccaacagattgaaggatcaactatttgcctgaacagaatcatccttaaatgggatttatcagagcatgtcacccttttgcttcaatcaggtttggtggaggcaacctgaccagaaacacttcgctgctgcaagccagacaggaaaaagattccatgtcagataaggcaactgggctggtcttactttgcatcacctctgctttcctccactgccatcattaaacctcagctgtgacatgaaagacttaccggaccactgaaggtcttctgtaaaatataatgaagctgaaacctttggcctaagaagaaaatggaagtatgtgccactcgatttgtatttctgattaacaaataaacaggggtatttcctaaggtgaccatggttgaactttagctcatgaaagtggaaacattggtttaattttcaagagaattaagaaagtaaaagagaaattctgttatcaataacttgcaagtaattttttgtaaaagattgaattacagtaaacccatctttccttaacgaaaatttcctatgtttacagtctgtctattggtatgcaatcttgtaactttgataatgaacagtgagagatttttaaataaagcctctaaatatgttttgtcatttaataacatacagttttgtcacttttcaagtactttctgactcacatacagtagatcactttttactctgtgttaccattttgactggtcgtcattggcatggggtggatatagggcataggattacttgtctcagaagctgtcatagaatttcttgctgccaattaaaaaacctgtgttctttacacactacacgtataaatattgtaactgttcatctttgttgttttatcactgtaagcctgtcaaatcatagtatcctaagcatctgtaaatgctaattttgcatttttggaaaaacccattccttccaagctagtgtttttcattggctccaggtctaatttttcactgtggtccctggcagccagtcttttgaagtttaaagattacctgtctcttgactgcagtaccttttctttaatttttaccaaaaatatccagaggttactggagttcttattcaatataaggaaagtttgctgcactttattaccaagcctctgggattttaccagtcaaacatatttgtgcattacatttcatttcttgtgagctagctggctgtccatattgaatgttgacccatttgagtacgctaaaaggcttacagtatcagacacgatcatggttttagatcccataataaaaatgaatgtttttcttataaaaaattatacaaatgctgaagtgagattctactattgttcattgcttccttttctttttccttttgcgattttcactgattaatagcacatttcttcacaaaattagataaagttggtcaaagaccagatattctggaatggaaattgtaaagcttaatcaaaaagaatagccagtacagcatacaatctcagaaacttagaagcaagtagaaaataattggttgatgtaaacgaaagtgccattttagtaaaggcaggaaaaaaatagcaatatttgagttatgtaaggataaaaaatccactgacttgtatttttgcacaagaggctggtctgaatatgattgttcacattaagagtgtttattcgtcggttcattttggggattttcccccttgatgttttgacagattgaagtgagctttagtgagcaaaaggatcagaatgcagggaacactaagctgtgatgaagaaagtgtggtaaaaagccagagtagttttatacagacaaaaccagtgtcaggcctttgcagtaggcttgagtgaacttctgatctagatttgaaagtaaattttatgaagacattgcccatttttacttcctcattcattattgtaccagcatcatagctttattactctaatcccaggtaagtcaagcctacaatgccctagaggaagagtaaaaccagaaattcatgctggcttaaataatctatttttgtttcttttcatttgaatatttaaattttatggtttattaaaaaattaaataaa

SEQ ID NO: 110509 - DNA, 2868 bp, Homo sapiens
  Payload ID: 1676
  Gene Symbol: ATG5
  Gene Name: autophagy related 5
  ENST ID: ENST00000360666
  CDS Start-End: 354-629
gtgacgtcatctccgggcgccgagggtgactggacttgtggtgcgctgccagggctccgcagcgttgccggttgtattcgctggataccagagggcggaagtgcagcagggttcagctccgacctccgcgccggtgctttttgcggctgcgcgggcttcctggagtcctgctaccgcgtccccgcaggacagtgtgtcaggcgggcagcttgccccgccgccccaccggagcgcggaatctgggcgtccccaccagtgcggggagccggaaggaggagccatagcttggagtaggtttggctttggttgaaataagaatttagcctgtatgtactgctttaactcctggaagaatgacagatgacaaagatgtgcttcgagatgtgtggtttggacgaattccaacttgtttcacgctatatcaggatgagataactgaaagggaagcagaaccatactatacagatttgaccagttttgggccatcaatcggaaactcatggaatatcctgcagaagaaaatggatttcgttatatcccctttagaatatatcagacaacgactgaaagacctttcattcagaagctgtttcgtcctgtggctgcagatggacagttgcacacactaggagatctcctcaaagaagtttgtccttctgctattgatcctgaagatggggaaaaaaagaatcaagtgatgattcatggaattgagccaatgttggaaacacctctgcagtggctgagtgaacatctgagctacccggataattttcttcatattagtatcatcccacagccaacagattgaaggatcaactatttgcctgaacagaatcatccttaaatgggatttatcagagcatgtcacccttttgcttcaatcaggtttggtggaggcaacctgaccagaaacacttcgctgctgcaagccagacaggaaaaagattccatgtcagataaggcaactgggctggtcttactttgcatcacctctgctttcctccactgccatcattaaacctcagctgtgacatgaaagacttaccggaccactgaaggtcttctgtaaaatataatgaagctgaaacctttggcctaagaagaaaatggaagtatgtgccactcgatttgtatttctgattaacaaataaacaggggtatttcctaaggtgaccatggttgaactttagctcatgaaagtggaaacattggtttaattttcaagagaattaagaaagtaaaagagaaattctgttatcaataacttgcaagtaattttttgtaaaagattgaattacagtaaacccatctttccttaacgaaaatttcctatgtttacagtctgtctattggtatgcaatcttgtaactttgataatgaacagtgagagatttttaaataaagcctctaaatatgttttgtcatttaataacatacagttttgtcacttttcaagtactttctgactcacatacagtagatcactttttactctgtgttaccattttgactggtcgtcattggcatggggtggatatagggcataggattacttgtctcagaagctgtcatagaatttcttgctgccaattaaaaaacctgtgttctttacacactacacgtataaatattgtaactgttcatctttgttgttttatcactgtaagcctgtcaaatcatagtatcctaagcatctgtaaatgctaattttgcatttttggaaaaacccattccttccaagctagtgtttttcattggctccaggtctaatttttcactgtggtccctggcagccagtcttttgaagtttaaagattacctgtctcttgactgcagtaccttttctttaatttttaccaaaaatatccagaggttactggagttcttattcaatataaggaaagtttgctgcactttattaccaagcctctgggattttaccagtcaaacatatttgtgcattacatttcatttcttgtgagctagctggctgtccatattgaatgttgacccatttgagtacgctaaaaggcttacagtatcagacacgatcatggttttagatcccataataaaaatgaatgtttttcttataaaaaattatacaaatgctgaagtgagattctactattgttcattgcttccttttctttttccttttgcgattttcactgattaatagcacatttcttcacaaaattagataaagttggtcaaagaccagatattctggaatggaaattgtaaagcttaatcaaaaagaatagccagtacagcatacaatctcagaaacttagaagcaagtagaaaataattggttgatgtaaacgaaagtgccattttagtaaaggcaggaaaaaaatagcaatatttgagttatgtaaggataaaaaatccactgacttgtatttttgcacaagaggctggtctgaatatgattgttcacattaagagtgtttattcgtcggttcattttggggattttcccccttgatgttttgacagattgaagtgagctttagtgagcaaaaggatcagaatgcagggaacactaagctgtgatgaagaaagtgtggtaaaaagccagagtagttttatacagacaaaaccagtgtcaggcctttgcagtaggcttgagtgaacttctgatctagatttgaaagtaaattttatgaagacattgcccatttttacttcctcattcattattgtaccagcatcatagctttattactctaatcccaggtaagtcaagcctacaatgccctagaggaagagtaaaaccagaaattcatgctggcttaaataatctatttttgtttcttttcatttgaatatttaaattttatggtttattaaaaaatt

SEQ ID NO: 110510 - DNA, 3088 bp, Homo sapiens
  Payload ID: 1676
  Gene Symbol: ATG5
  Gene Name: autophagy related 5
  Uniprot ID: Q9H1Y0
  ENST ID: ENST00000369070
  CDS Start-End: 431-1024
ctggacttgtggtgcgctgccagggctccgcagcgttgccggttgtattcgctggataccagagggcggaagtgcagcagggttcagctccgacctccgcgccggtgctttttgcggctgcgcgggcttcctggagtcctgctaccgcgtccccgcaggacagtgtgtcaggcgggcagcttgccccgccgccccaccggagcgcggaatctgggcgtccccaccagtgcggggagccggaaggaggagccatagcttggagtaggtttggctttggttgaaataagaatttagcctgtatgtactgctttaactcctggaagaatgacagatgacaaagatgtgcttcgagatgtgtggtttggacgaattccaacttgtttcacgctatatcaggatgagataactgaaagggaagcagaaccatactatgcattatccaattggtttgctatttgatcttcttgcatcaagttcagctcttccttggaacatcacagtacattttaagagttttccagaaaaagaccttctgcactgtccatctaaggatgcaattgaagctcattttatgtcatgtatgaaagaagctgatgctttaaaacataaaagtcaagtaatcaatgaaatgcagaaaaaagatcacaagcaactctggatgggattgcaaaatgacagatttgaccagttttgggccatcaatcggaaactcatggaatatcctgcagaagaaaatggatttcgttatatcccctttagaatatatcagacaacgactgaaagacctttcattcagaagctgtttcgtcctgtggctgcagatggacagttgcacacactaggagatctcctcaaagaagtttgtccttctgctattgatcctgaagatggggaaaaaaagaatcaagtgatgattcatggaattgagccaatgttggaaacacctctgcagtggctgagtgaacatctgagctacccggataattttcttcatattagtatcatcccacagccaacagattgaaggatcaactatttgcctgaacagaatcatccttaaatgggatttatcagagcatgtcacccttttgcttcaatcaggtttggtggaggcaacctgaccagaaacacttcgctgctgcaagccagacaggaaaaagattccatgtcagataaggcaactgggctggtcttactttgcatcacctctgctttcctccactgccatcattaaacctcagctgtgacatgaaagacttaccggaccactgaaggtcttctgtaaaatataatgaagctgaaacctttggcctaagaagaaaatggaagtatgtgccactcgatttgtatttctgattaacaaataaacaggggtatttcctaaggtgaccatggttgaactttagctcatgaaagtggaaacattggtttaattttcaagagaattaagaaagtaaaagagaaattctgttatcaataacttgcaagtaattttttgtaaaagattgaattacagtaaacccatctttccttaacgaaaatttcctatgtttacagtctgtctattggtatgcaatcttgtaactttgataatgaacagtgagagatttttaaataaagcctctaaatatgttttgtcatttaataacatacagttttgtcacttttcaagtactttctgactcacatacagtagatcactttttactctgtgttaccattttgactggtcgtcattggcatggggtggatatagggcataggattacttgtctcagaagctgtcatagaatttcttgctgccaattaaaaaacctgtgttctttacacactacacgtataaatattgtaactgttcatctttgttgttttatcactgtaagcctgtcaaatcatagtatcctaagcatctgtaaatgctaattttgcatttttggaaaaacccattccttccaagctagtgtttttcattggctccaggtctaatttttcactgtggtccctggcagccagtcttttgaagtttaaagattacctgtctcttgactgcagtaccttttctttaatttttaccaaaaatatccagaggttactggagttcttattcaatataaggaaagtttgctgcactttattaccaagcctctgggattttaccagtcaaacatatttgtgcattacatttcatttcttgtgagctagctggctgtccatattgaatgttgacccatttgagtacgctaaaaggcttacagtatcagacacgatcatggttttagatcccataataaaaatgaatgtttttcttataaaaaattatacaaatgctgaagtgagattctactattgttcattgcttccttttctttttccttttgcgattttcactgattaatagcacatttcttcacaaaattagataaagttggtcaaagaccagatattctggaatggaaattgtaaagcttaatcaaaaagaatagccagtacagcatacaatctcagaaacttagaagcaagtagaaaataattggttgatgtaaacgaaagtgccattttagtaaaggcaggaaaaaaatagcaatatttgagttatgtaaggataaaaaatccactgacttgtatttttgcacaagaggctggtctgaatatgattgttcacattaagagtgtttattcgtcggttcattttggggattttcccccttgatgttttgacagattgaagtgagctttagtgagcaaaaggatcagaatgcagggaacactaagctgtgatgaagaaagtgtggtaaaaagccagagtagttttatacagacaaaaccagtgtcaggcctttgcagtaggcttgagtgaacttctgatctagatttgaaagtaaattttatgaagacattgcccatttttacttcctcattcattattgtaccagcatcatagctttattactctaatcccaggtaagtcaagcctacaatgccctagaggaagagtaaaaccagaaattcatgctggcttaaataatctatttttgtttcttttcatttgaatatttaaattttatggtttattaaaaaattaaataaa

SEQ ID NO: 110511 - DNA, 3216 bp, Homo sapiens
  Payload ID: 1676
  Gene Symbol: ATG5
  Gene Name: autophagy related 5
  Uniprot ID: Q9H1Y0
  ENST ID: ENST00000369076
  CDS Start-End: 325-1152
ctggacttgtggtgcgctgccagggctccgcagcgttgccggttgtattcgctggataccagagggcggaagtgcagcagggttcagctccgacctccgcgccggtgctttttgcggctgcgcgggcttcctggagtcctgctaccgcgtccccgcaggacagtgtgtcaggcgggcagcttgccccgccgccccaccggagcgcggaatctgggcgtccccaccagtgcggggagccggaaggaggagccatagcttggagtaggtttggctttggttgaaataagaatttagcctgtatgtactgctttaactcctggaagaatgacagatgacaaagatgtgcttcgagatgtgtggtttggacgaattccaacttgtttcacgctatatcaggatgagataactgaaagggaagcagaaccatactatttgcttttgccaagagtaagttatttgacgttggtaactgacaaagtgaaaaagcactttcagaaggttatgagacaagaagacattagtgagatatggtttgaatatgaaggcacaccactgaaatggcattatccaattggtttgctatttgatcttcttgcatcaagttcagctcttccttggaacatcacagtacattttaagagttttccagaaaaagaccttctgcactgtccatctaaggatgcaattgaagctcattttatgtcatgtatgaaagaagctgatgctttaaaacataaaagtcaagtaatcaatgaaatgcagaaaaaagatcacaagcaactctggatgggattgcaaaatgacagatttgaccagttttgggccatcaatcggaaactcatggaatatcctgcagaagaaaatggatttcgttatatcccctttagaatatatcagacaacgactgaaagacctttcattcagaagctgtttcgtcctgtggctgcagatggacagttgcacacactaggagatctcctcaaagaagtttgtccttctgctattgatcctgaagatggggaaaaaaagaatcaagtgatgattcatggaattgagccaatgttggaaacacctctgcagtggctgagtgaacatctgagctacccggataattttcttcatattagtatcatcccacagccaacagattgaaggatcaactatttgcctgaacagaatcatccttaaatgggatttatcagagcatgtcacccttttgcttcaatcaggtttggtggaggcaacctgaccagaaacacttcgctgctgcaagccagacaggaaaaagattccatgtcagataaggcaactgggctggtcttactttgcatcacctctgctttcctccactgccatcattaaacctcagctgtgacatgaaagacttaccggaccactgaaggtcttctgtaaaatataatgaagctgaaacctttggcctaagaagaaaatggaagtatgtgccactcgatttgtatttctgattaacaaataaacaggggtatttcctaaggtgaccatggttgaactttagctcatgaaagtggaaacattggtttaattttcaagagaattaagaaagtaaaagagaaattctgttatcaataacttgcaagtaattttttgtaaaagattgaattacagtaaacccatctttccttaacgaaaatttcctatgtttacagtctgtctattggtatgcaatcttgtaactttgataatgaacagtgagagatttttaaataaagcctctaaatatgttttgtcatttaataacatacagttttgtcacttttcaagtactttctgactcacatacagtagatcactttttactctgtgttaccattttgactggtcgtcattggcatggggtggatatagggcataggattacttgtctcagaagctgtcatagaatttcttgctgccaattaaaaaacctgtgttctttacacactacacgtataaatattgtaactgttcatctttgttgttttatcactgtaagcctgtcaaatcatagtatcctaagcatctgtaaatgctaattttgcatttttggaaaaacccattccttccaagctagtgtttttcattggctccaggtctaatttttcactgtggtccctggcagccagtcttttgaagtttaaagattacctgtctcttgactgcagtaccttttctttaatttttaccaaaaatatccagaggttactggagttcttattcaatataaggaaagtttgctgcactttattaccaagcctctgggattttaccagtcaaacatatttgtgcattacatttcatttcttgtgagctagctggctgtccatattgaatgttgacccatttgagtacgctaaaaggcttacagtatcagacacgatcatggttttagatcccataataaaaatgaatgtttttcttataaaaaattatacaaatgctgaagtgagattctactattgttcattgcttccttttctttttccttttgcgattttcactgattaatagcacatttcttcacaaaattagataaagttggtcaaagaccagatattctggaatggaaattgtaaagcttaatcaaaaagaatagccagtacagcatacaatctcagaaacttagaagcaagtagaaaataattggttgatgtaaacgaaagtgccattttagtaaaggcaggaaaaaaatagcaatatttgagttatgtaaggataaaaaatccactgacttgtatttttgcacaagaggctggtctgaatatgattgttcacattaagagtgtttattcgtcggttcattttggggattttcccccttgatgttttgacagattgaagtgagctttagtgagcaaaaggatcagaatgcagggaacactaagctgtgatgaagaaagtgtggtaaaaagccagagtagttttatacagacaaaaccagtgtcaggcctttgcagtaggcttgagtgaacttctgatctagatttgaaagtaaattttatgaagacattgcccatttttacttcctcattcattattgtaccagcatcatagctttattactctaatcccaggtaagtcaagcctacaatgccctagaggaagagtaaaaccagaaattcatgctggcttaaataatctatttttgtttcttttcatttgaatatttaaattttatggtttattaaaaaattaaataaa

SEQ ID NO: 110512 - DNA, 733 bp, Homo sapiens
  Payload ID: 1676
  Gene Symbol: ATG5
  Gene Name: autophagy related 5
  ENST ID: ENST00000613993
  CDS Start-End: 1-489
atgacagatgacaaagatgtgcttcgagatgtgtggtttggacgaattccaacttgtttcacgctatatcaggatgagataactgaaagggaagcagaaccatactatttgcttttgccaagagtaagttatttgacgttggtaactgacaaagtgaaaaagcactttcagaaggttatgagacaagaagacattagtgagatatggtttgaatatgaaggcacaccactgaaatggcattatccaattggtttgctatttgatcttcttgcatcaagttcagctcttccttggaacatcacagtacattttaagagttttccagaaaaagaccttctgcactgtccatctaaggatgcaattgaagctcattttatgtcatgtatgaaagaagctgatgctttaaaacataaaagtcaagtaatcaatgaaatgcagaaaaaagatcacaagcaactctggatgggattgcaaaatgacaacgactgaaagacctttcattcagaagctgtttcgtcctgtggctgcagatggacagttgcacacactaggagatctcctcaaagaagtttgtccttctgctattgatcctgaagatggggaaaaaaagaatcaagtgatgattcatggaattgagccaatgttggaaacacctctgcagtggctgagtgaacatctgagctacccggataattttcttcatattagtatcatcccacagccaacagattga

SEQ ID NO: 110513 - DNA, 4959 bp, Homo sapiens
  Payload ID: 1677
  Gene Symbol: ATG7
  Gene Name: autophagy related 7
  Uniprot ID: O95352
  ENST ID: ENST00000354449
  CDS Start-End: 26-2137
ggaagttgagcggcggcaagaaataatggcggcagctacgggggatcctggactctctaaactgcagtttgccccttttagtagtgccttggatgttgggttttggcatgagttgacccagaagaagctgaacgagtatcggctggatgaagctcccaaggacattaagggttattactacaatggtgactctgctgggctgccagctcgcttaacattggagttcagtgcttttgacatgagtgctcccaccccagcccgttgctgcccagctattggaacactgtataacaccaacacactcgagtctttcaagactgcagataagaagctccttttggaacaagcagcaaatgagatatgggaatccataaaatcaggcactgctcttgaaaaccctgtactcctcaacaagttcctcctcttgacatttgcagatctaaagaagtaccacttctactattggttttgctatcctgccctctgtcttccagagagtttacctctcattcaggggccagtgggtttggatcaaaggttttcactaaaacagattgaagcactagagtgtgcatatgataatctttgtcaaacagaaggagtcacagctcttccttacttcttaatcaagtatgatgagaacatggtgctggtttccttgcttaaacactacagtgatttcttccaaggtcaaaggacgaagataacaattggtgtatatgatccctgtaacttagcccagtaccctggatggcctttgaggaattttttggtcctagcagcccacagatggagtagcagtttccagtctgttgaagttgtttgcttccgtgaccgtaccatgcagggggcgagagacgttgcccacagcatcatcttcgaagtgaagcttccagaaatggcatttagcccagattgtcctaaagcagttggatgggaaaagaaccagaaaggaggcatgggaccaaggatggtgaacctcagtgaatgtatggaccctaaaaggttagctgagtcatcagtggatctaaatctcaaactgatgtgttggagattggttcctactttagacttggacaaggttgtgtctgtcaaatgtctgctgcttggagccggcaccttgggttgcaatgtagctaggacgttgatgggttggggcgtgagacacatcacatttgtggacaatgccaagatctcctactccaatcctgtgaggcagcctctctatgagtttgaagattgcctagggggtggtaagcccaaggctctggcagcagcggaccggctccagaaaatattccccggtgtgaatgccagaggattcaacatgagcatacctatgcctgggcatccagtgaacttctccagtgtcactctggagcaagcccgcagagatgtggagcaactggagcagctcatcgaaagccatgatgtcgtcttcctattgatggacaccagggagagccggtggcttcctgccgtcattgctgcaagcaagagaaagctggtcatcaatgctgctttgggatttgacacatttgttgtcatgagacatggtctgaagaaaccaaagcagcaaggagctggggacttgtgtccaaaccaccctgtggcatctgctgacctcctgggctcatcgctttttgccaacatccctggttacaagcttggctgctacttctgcaatgatgtggtggccccaggagattcaaccagagaccggaccttggaccagcagtgcactgtgagtcgtccaggactggccgtgattgcaggagccctggccgtggaattgatggtatctgttttgcagcatccagaagggggctatgccattgccagcagcagtgacgatcggatgaatgagcctccaacctctcttgggcttgtgcctcaccagatccggggatttctttcacggtttgataatgtccttcccgtcagcctggcatttgacaaatgtacagcttgttcttccaaagttcttgatcaatatgaacgagaaggatttaacttcctagccaaggtgtttaattcttcacattccttcttagaagacttgactggtcttacattgctgcatcaagaaacccaagctgctgagatctgggacatgagcgatgatgagaccatctgagatggccccgctgtggggctgacttctccccggccgcctgctgaggagctctccatcgccagagcaggactgctgaccccaggcctggtgattctgggcccctcctccataccccgaggtctgggattcccccctctgctgcccaggagtggccagtgttcggcgttgctcgggattcaagataccaccagttcagagctaaataataaccttggccttggccttgctattgacctgggacttggtcctccatgcagtttttatttcttgtcacagtgactgatagccatcccccaggatcctttccccttggccctgagggggtgacccaacacagaccaaatggggaaatgagcaaccagctcctgcccagagccactgcgggaggtggcaccctcatccccggaatgtgctgcccaccgcaccgcaggctcctcctgtgggggccctgggcatgggtgagggtgggaccccgtgagcgcactgcaccctggccctggtggagcgggaggaggaggagagccgagctgggtacgagactaaagggcccacatgacccagtgacgccagatttccaccaaggactgagtgagctgctcagacatggctttctgcctcccagcctgtcctccactgtgggcatagcatctgtgcctgcctgcctgcttgagggagaggagtttctgctgctgccttgagctggggggaagagcccaggggcagatcctggcagctgcctggatggggctcctccctgcccttatgagcaggccaggcccagaaaggccgagcctgggctgccttcctgccccagccgagggaggggtcagacggctctaccatgggtaactcaggcaagagctggttttcctctttattctgggtgtgtgcagctgtgaggccccaacccaggagaggccatggcctaggtacctgtgaccaccctgcccccgtgtagagggcatcgtctttcctgctattttattctttcagcttttgtcttaggcccagaatcaaagtgaaaattgagtcgagctgacccttacaacagtaggatttagtagggtagatttcaaatgaggcttcgcttctcccaaagtagccagtccaagttccagtggctgtcgttcagctcatgggagcttcatggggacacagccggcacaggtgcagggcccgagtccgcccacccagcctggcgctgaaactgcacacgtacactatgtggtttaagagcactttattattgttcttaaggctacttttaagtacaaaaaaagatggcctgccaaacctttttttttcttcttccaggaaaaacaggccacagagaatggtatattacagatttacacacatgaagagaaggtcagagcgcactgcaggcagcgcggctctgggaagaacttcacggagccccttcttagagcagggagggggctttctcagtgaaatgtttggttttctgctgcctcctctgccccaggcccccctccagggtactgcctatcccagataggtcagtgcaccagggacccggccgccagcaccgccgacccctcccagagtgacgcccttgttcactgacaaagagacctgtcccaggagtgtcctccaccgagccggtcagctgtgggtggttttcctgttacgacgctcagtagcctgtagcaataacaaactcgtggctatgaatgcagatgcagtgttctcatagaataactgttcctgcacttttacagacaaatctacgacaaaaaaaaagatcaactttttttttccgaacaacaaaaaaaatgaatgattacaataggaaagggaaaaattaaatagctacatatcattaacaaattaatgttcttcaaaaaatacctacaaatttctctgtacattctttacgcacagcgtaacgatggtctcaaaatcacccatatagaaaagtgttctcaacgatttttcctacagaaaatataggggcctgaatgccaaagcttggaagcccagtacagtgggagtgaaatgtgtgcggggcaaggagaagggcttttctttcctccacttttcaaaggcctgcagccactctgtgactacaagagccagtcctccgaccttttcacccagtgccaatttccaaaattcaacagctaaaaactgtaaaaccgggggtcatacggtgtgcagagtccacaaagccttgcaggtgaggtgaccacgcccacgtcacctggtcaggtgccatcgtcgtgagcctctggtgggccaggtgggacacagcacaccccagggggaggggatagaaacgctcattgaccaaaaaggagcagctgtgacctccacagctgtgtctgtcatgcttgcttcatctaatttctagttagtagctattaatatagcaaataataaatgcagtaataacagtataaagtcagaggaatgtatactgccttggccccagcgtacgaggaagcgtataaaacaccatatcacagattgtctgtcagtaatctgctgttcagccaagagagttcaaagggagcagtttctgcatgtagggaagttggaagacacaaaccccacctcccctgggagcttgtaacaaagcagacagggatgcaaaaataaatgatgtcagcctgcagccaaactccagcatcccacaccgcagctgacccactgctcatcgcgagggcctgccaggagctggcctcccgcactacttgtgagtaaagtgaatatcaaataccaatcttagagtacaactgtaccagcagtaagtatatctaggactgtaactgacaaaaataaactaattctgaaaagaa

SEQ ID NO: 110514 - DNA, 2296 bp, Homo sapiens
  Payload ID: 1677
  Gene Symbol: ATG7
  Gene Name: autophagy related 7
  Uniprot ID: O95352
  ENST ID: ENST00000354956
  CDS Start-End: 26-2056
ggaagttgagcggcggcaagaaataatggcggcagctacgggggatcctggactctctaaactgcagtttgccccttttagtagtgccttggatgttgggttttggcatgagttgacccagaagaagctgaacgagtatcggctggatgaagctcccaaggacattaagggttattactacaatggtgactctgctgggctgccagctcgcttaacattggagttcagtgcttttgacatgagtgctcccaccccagcccgttgctgcccagctattggaacactgtataacaccaacacactcgagtctttcaagactgcagataagaagctccttttggaacaagcagcaaatgagatatgggaatccataaaatcaggcactgctcttgaaaaccctgtactcctcaacaagttcctcctcttgacatttgcagatctaaagaagtaccacttctactattggttttgctatcctgccctctgtcttccagagagtttacctctcattcaggggccagtgggtttggatcaaaggttttcactaaaacagattgaagcactagagtgtgcatatgataatctttgtcaaacagaaggagtcacagctcttccttacttcttaatcaagtatgatgagaacatggtgctggtttccttgcttaaacactacagtgatttcttccaaggtcaaaggacgaagataacaattggtgtatatgatccctgtaacttagcccagtaccctggatggcctttgaggaattttttggtcctagcagcccacagatggagtagcagtttccagtctgttgaagttgtttgcttccgtgaccgtaccatgcagggggcgagagacgttgcccacagcatcatcttcgaagtgaagcttccagaaatggcatttagcccagattgtcctaaagcagttggatgggaaaagaaccagaaaggaggcatgggaccaaggatggtgaacctcagtgaatgtatggaccctaaaaggttagctgagtcatcagtggatctaaatctcaaactgatgtgttggagattggttcctactttagacttggacaaggttgtgtctgtcaaatgtctgctgcttggagccggcaccttgggttgcaatgtagctaggacgttgatgggttggggcgtgagacacatcacatttgtggacaatgccaagatctcctactccaatcctgtgaggcagcctctctatgagtttgaagattgcctagggggtggtaagcccaaggctctggcagcagcggaccggctccagaaaatattccccggtgtgaatgccagaggattcaacatgagcatacctatgcctgggcatccagtgaacttctccagtgtcactctggagcaagcccgcagagatgtggagcaactggagcagctcatcgaaagccatgatgtcgtcttcctattgatggacaccagggagagccggtggcttcctgccgtcattgctgcaagcaagagaaagctggtcatcaatgctgctttgggatttgacacatttgttgtcatgagacatggtctgaagaaaccaaagcagcaaggagctggggacttgtgtccaaaccaccctgtggcatctgctgacctcctgggctcatcgctttttgccaacatccctggttacaagcttggctgctacttctgcaatgatgtggtggccccaggagattcaaccagagaccggaccttggaccagcagtgcactgtgagtcgtccaggactggccgtgattgcaggagccctggccgtggaattgatggtatctgttttgcagcatccagaagggggctatgccattgccagcagcagtgacgatcggatgaatgagcctccaacctctcttgggcttgtgcctcaccaggttcttgatcaatatgaacgagaaggatttaacttcctagccaaggtgtttaattcttcacattccttcttagaagacttgactggtcttacattgctgcatcaagaaacccaagctgctgagatctgggacatgagcgatgatgagaccatctgagatggccccgctgtggggctgacttctccccggccgcctgctgaggagctctccatcgccagagcaggactgctgaccccaggcctggtgattctgggcccctcctccataccccgaggtctgggattcccccctctgctgcccaggagtggccagtgttcggcgttgctcgggattcaagataccaccagttcagagctaaataataaccttggccttggccttgctattgacctggga

SEQ ID NO: 110515 - DNA, 455 bp, Homo sapiens
  Payload ID: 1677
  Gene Symbol: ATG7
  Gene Name: autophagy related 7
  ENST ID: ENST00000427759
  CDS Start-End: 1-290
ggggctatgccattgccagcagcagtgacgatcggatgaatgagcctccaacctctcttgggcttgtgcctcaccagatccggggatttctttcacggtttgataatgtccttcccgtcagcctggcatttgacaaatgtacagcttgttcttccaaagttcttgatcaatatgaacgagaaggatttaacttcctagccaaggtgtttaattcttcacattccttcttagaagacttgactggtcttacattgctgcatcaagaaacccaagctgctgagcatctttgagatcttcggctctggatgaagcaggagaggcagaacataaacaaatggacggaagaatcaagcacttctgtgaatggaatcttttattcctcgcccatctgattcttggctgctttgttccataaggtagatgaacaatgatgataaaataaaatgtaaataaga

SEQ ID NO: 110516 - DNA, 584 bp, Homo sapiens
  Payload ID: 1677
  Gene Symbol: ATG7
  Gene Name: autophagy related 7
  ENST ID: ENST00000418682
  CDS Start-End: 36-266
tgtggttgccggaagttgagcggcggcaagaaataatggcggcagctacgggggatcctggactctctaaactgcagtttgccccttttagtagtgccttggatgttgggttttggcatgagttgacccagaagaagctgaacgagtatcggctggatgaagctcccaaggacattaagggttattactacaatggtgactctgctgggctgccagctcgcttaacattggagttcagtgcttttgacatatatgggaatccataaaatcaggcactgctcttgaaaaccctgtactcctcaacaagttcctcctcttgacatttgcagatctaaagaagtaccacttctactattggttttgctatcctgccctctgtcttccagagagtttacctctcattcaggggccagtgggtttggatcaaaggttttcactaaaacagattgaagcactagagtgtgcatatgataatctttgtcaaacagaaggagtcacagctcttccttacttcttaatcaagtatgatgagaacatggtgctggtttccttgcttaaacactacagtgatttcttccaaggtc

SEQ ID NO: 110517 - DNA, 565 bp, Homo sapiens
  Payload ID: 1677
  Gene Symbol: ATG7
  Gene Name: autophagy related 7
  ENST ID: ENST00000444619
  CDS Start-End: 285-565
agctgtggttgccggaagttgagcggcggcttctcaaaccccataatgctggtatccagtgcatccgttctcaaaaactgaagctgatggacaccagattgcatgtgaaggtgaaggatattatagcagaaggaaaccaaaataaaagaaaaacagctcctggaagtaaccaatgagaaggacagataagagtttgaagactgtggatgtgactgcttgttccctggttgacacactgaagaagaaatcatgttgattcagagttggcttggaggcaagaaataatggcggcagctacgggggatcctggactctctaaactgcagtttgccccttttagtagtgccttggatgttgggttttggcatgagttgacccagaagaagctgaacgagtatcggctggatgaagctcccaaggacattaagggttattactacaatggtgactctgctgggctgccagctcgcttaacattggagttcagtgcttttgacatgagtgctcccaccccagcccgttgctgcccagctattggaacactgtataacaccaacacactcga

SEQ ID NO: 110518 - DNA, 647 bp, Homo sapiens
  Payload ID: 1677
  Gene Symbol: ATG7
  Gene Name: autophagy related 7
  ENST ID: ENST00000435760
  CDS Start-End: 449-647
agtggcaagcgcgggcaggaccgcgttgcgtcatcggggcgcgcgcctcagagagagctgtggttgccggaagttgagcggcggatccaattcctgtatcttcaccttgtctaccgggatttctagagcagccttgtgagagacatttctgagacctgtatgtcctgcgtctatgattcttccctgatcaaggcttctcaaaccccataatgctggtatccagtgcatccgttctcaaaaactgaagctgatggacaccagattgcatgtgaaggtgaaggatattatagcagaaggaaaccaaaataaaagaaaaacagctcctggaagtaaccaatgagaaggacagataagagtttgaagactgtggatgtgactgcttgttccctggttgacacactgaagaagaaatcatgttgattcagagttggcttggaggcaagaaataatggcggcagctacgggggatcctggactctctaaactgcagtttgccccttttagtagtgccttggatgttgggttttggcatgagttgacccagaagaagctgaacgagtatcggctggatgaagctcccaaggacattaagggttattactacaatggtgactctgctgggctgccagctcgcttaacattggagt

SEQ ID NO: 110519 - DNA, 553 bp, Homo sapiens
  Payload ID: 1677
  Gene Symbol: ATG7
  Gene Name: autophagy related 7
  ENST ID: ENST00000434066
  CDS Start-End: 1-318
cctgccctctgtcttccagagagtttacctctcattcaggggccagtgggtttggatcaaaggttttcactaaaacagattgaagcactagagtgtgcatatgataatctttgtcaaacagaaggagtcacagctcttccttacttcttaatcaagtatgatgagaacatggtgctggtttccttgcttaaacactacagtgatttcttccaaggtcaaaggacgaagataacaattggtgtatatgatccctgtaacttagcccagtaccctggatggcctttgaggaattttttggtcctagcagcccacagatgattgtcctaaagcagttggatgggaaaagaaccagaaaggaggcatgggaccaaggatggtgaacctcagtgaatgtatggaccctaaaaggttagctgagtcatcagtggatctaaatctcaaactgatgtgttggagattggttcctactttagacttggacaaggttgtgtctgtcaaatgtctgctgcttggagccggcaccttgggttgcaatgtagctaggacgttgatg

SEQ ID NO: 110520 - DNA, 435 bp, Homo sapiens
  Payload ID: 1677
  Gene Symbol: ATG7
  Gene Name: autophagy related 7
  ENST ID: ENST00000446110
  CDS Start-End: 1-418
gggctatgccattgccagcagcagtgacgatcggatgaatgagcctccaacctctcttgggcttgtgcctcaccagatccggggatttctttcacggtttgataatgtccttcccgtcagcctggcatttgacaaatgtacagcttgttcttccaaagttcttgatcaatatgaacgagaaggatttaacttcctagccaaggtgtttaattcttcacattccttcttagaagacttgactggtcttacattgctgcatcaagaaacccaagctgctgaggatcatctttctttcatccggcccaagaatggcaccttccccgcccatcaggccacctgcactcaggagtcggctgcctgtcctgaaatagatctctaccagctctcaagcagaacaattccttgcattcatacttgaatgtataatttgtgtta

SEQ ID NO: 110521 - DNA, 710 bp, Homo sapiens
  Payload ID: 1677
  Gene Symbol: ATG7
  Gene Name: autophagy related 7
  ENST ID: ENST00000414717
  CDS Start-End: 1-288
aggggctatgccattgccagcagcagtgacgatcggatgaatgagcctccaacctctcttgggcttgtgcctcaccagatccggggatttctttcacggtttgataatgtccttcccgtcagcctggcatttgacaaatgtacagcttgttcttccaaagttcttgatcaatatgaacgagaaggatttaacttcctagccaaggtgtttaattcttcacattccttcttagaagacttgactggtcttacattgctgcatcaagaaacccaagctgctgagcactaagaagattttcttacattgatacctactgtgacaaaacacacatccaatgacagtgttaaaatgtcataaatgagcctttaaaagaatgaggcacatgatacatcatggtacttgagcagactgcaagcctgaccagactgaattcatgaattcctgacttttgacttcttcctgtaagatgctaccccactgccagggactcaacctctaaatccagtcaaggggctacttgggcctggaaccaaggcacagtcaaggtgaaccagctatgctccagggggaggtggttgaaatcactggtctcctggactgggccatgagtgatggttattggggctggggaggtatgagagacatcgtgttgtccatctacctctgtgtatcttcaaaggtctctgtaataaaaagttttctgaaattta

SEQ ID NO: 110522 - DNA, 565 bp, Homo sapiens
  Payload ID: 1677
  Gene Symbol: ATG7
  Gene Name: autophagy related 7
  ENST ID: ENST00000419112
  CDS Start-End: 298-565
gagcggcggtaagtgagccgcggcgggcgagggtgtagtggggtcttgctgggccggttttggaggcctggagtcaaggggcgagctcgccagggagggcgagggtcacagcaagtctcaggatcctcctctgccagtttctgggtggtccttcctcctccagggactcactgattccggctggcgcccttcgtctgtagccgcgtcccctcagactggttcagtccggggtcttctgacttggaagctcgtgctgatttcctaagtcagcccctcctgtcctcttggcaagaaataatggcggcagctacgggggatcctggactctctaaactgcagtttgccccttttagtagtgccttggatgttgggttttggcatgagttgacccagaagaagctgaacgagtatcggctggatgaagctcccaaggacattaagggttattactacaatggtgactctgctgggctgccagctcgcttaacattggagttcagtgcttttgacatgagtgctcccaccccagcccgttgctgcccagctattggaacactgtataaca

SEQ ID NO: 110523 - DNA, 758 bp, Homo sapiens
  Payload ID: 1677
  Gene Symbol: ATG7
  Gene Name: autophagy related 7
  ENST ID: ENST00000424071
  CDS Start-End: 1-233
ctgctcttgaaaaccctgtactcctcaacaagttcctcctcttgacatttgcagatctaaagaagtaccacttctactattggttttgctatcctgccctctgtcttccagagagtttacctctcattcaggggccagtgggtttggatcaaaggttttcactaaaacagattgtcctaaagcagttggatgggaaaagaaccagaaaggaggcatgggaccaaggatggtgaacctcagtgaatgtatggaccctaaaaggttagctgagtcatcagtggatctaaatctcaaactgatgtgttggagattggttcctactttagacttggacaaggttgtgtctgtcaaatgtctgctgcttggagccggcaccttgggttgcaatgtagctaggacgttgatgggttggggcgtgagacacatcacatttgtggacaatgccaagatctcctactccaatcctgtgaggcagcctctctatgagtttgaagattgcctagggggtggtaagcccaaggctctggcagcagcggaccggctccagaaaatattccccggtgtgaatgccagaggattcaacatgagcatacctatgcctgggcatccagtgaacttctccagtgtcactctggagcaagcccgcagagatgtggagcaactggagcagctcatcgaaagccatgatgtcgtcttcctattgatggacaccagggagagccggtggcttcctgccgtcattgctgcaagcaagagaa

SEQ ID NO: 110524 - DNA, 549 bp, Homo sapiens
  Payload ID: 1677
  Gene Symbol: ATG7
  Gene Name: autophagy related 7
  ENST ID: ENST00000451830
  CDS Start-End: 94-549
agtggcaagcgcgggcaggaccgcgttgcgtcatcggggcgcgcgcctcagagagagctgtggttgccggaagttgagcggcggcaagaaataatggcggcagctacgggggatcctggactctctaaactgcagtttgccccttttagtagtgccttggatgttgggttttggcatgagttgacccagaagaagctgaacgagtatcggctggatgaagctcccaaggacattaagggttattactacaatggtgactctgctgggctgccagctcgcttaacattggagttcagtgcttttgacatgagtgctcccaccccagcccgttgctgcccagctattggaacactgtataacaccaacacactcgagtctttcaagactgcagataagaagctccttttggaacaagcagcaaatgagatatgggaatccataaaatcaggcactgctcttgaaaaccctgtactcctcaacaagttcctcctcttgacatttgcaattgaagcactagagtgtgcatatgataatctttgtcaaacagaa

SEQ ID NO: 110525 - DNA, 2042 bp, Homo sapiens
  Payload ID: 1677
  Gene Symbol: ATG7
  Gene Name: autophagy related 7
  Uniprot ID: O95352
  ENST ID: ENST00000446450
  CDS Start-End: 26-1897
ggaagttgagcggcggcaagaaataatggcggcagctacgggggatcctggactctctaaactgcagtttgccccttttagtagtgccttggatgttgggttttggcatgagttgacccagaagaagctgaacgagtatcggctggatgaagctcccaaggacattaagggttattactacaatggtgactctgctgggctgccagctcgcttaacattggagttcagtgcttttgacatgagtgctcccaccccagcccgttgctgcccagctattggaacactgtataacaccaacacactcgagtctttcaagactgcagataagaagctccttttggaacaagcagcaaatgagatatgggaatccataaaatcaggcactgctcttgaaaaccctgtactcctcaacaagttcctcctcttgacatttgcaattgaagcactagagtgtgcatatgataatctttgtcaaacagaaggagtcacagctcttccttacttcttaatcaagtatgatgagaacatggtgctggtttccttgcttaaacactacagtgatttcttccaaggtcaaaggacgaagataacaattggtgtatatgatccctgtaacttagcccagtaccctggatggcctttgaggaattttttggtcctagcagcccacagatggagtagcagtttccagtctgttgaagttgtttgcttccgtgaccgtaccatgcagggggcgagagacgttgcccacagcatcatcttcgaagtgaagcttccagaaatggcatttagcccagattgtcctaaagcagttggatgggaaaagaaccagaaaggaggcatgggaccaaggatggtgaacctcagtgaatgtatggaccctaaaaggttagctgagtcatcagtggatctaaatctcaaactgatgtgttggagattggttcctactttagacttggacaaggttgtgtctgtcaaatgtctgctgcttggagccggcaccttgggttgcaatgtagctaggacgttgatgggttggggcgtgagacacatcacatttgtggacaatgccaagatctcctactccaatcctgtgaggcagcctctctatgagtttgaagattgcctagggggtggtaagcccaaggctctggcagcagcggaccggctccagaaaatattccccggtgtgaatgccagaggattcaacatgagcatacctatgcctgggcatccagtgaacttctccagtgtcactctggagcaagcccgcagagatgtggagcaactggagcagctcatcgaaagccatgatgtcgtcttcctattgatggacaccagggagagccggtggcttcctgccgtcattgctgcaagcaagagaaagctggtcatcaatgctgctttgggatttgacacatttgttgtcatgagacatggtctgaagaaaccaaagcagcaaggagctggggacttgtgtccaaaccaccctgtggcatctgctgacctcctgggctcatcgctttttgccaacatccctggttacaagcttggctgctacttctgcaatgatgtggtggccccaggagattcaaccagagaccggaccttggaccagcagtgcactgtgagtcgtccaggactggccgtgattgcaggagccctggccgtggaattgatggtatctgttttgcagcatccagaagggggctatgccattgccagcagcagtgacgatcggatgaatgagcctccaacctctcttgggcttgtgcctcaccagatccggggatttctttcacggtttgataatgtccttcccgtcagcctggcatttgacaaatgtacagcttgttcttccaaaatctgggacatgagcgatgatgagaccatctgagatggccccgctgtggggctgacttctccccggccgcctgctgaggagctctccatcgccagagcaggactgctgaccccaggcctggtgattctgggcccctcctccataccccgaggtctgggattcccccctctgctgccca

SEQ ID NO: 110526 - DNA, 972 bp, Homo sapiens
  Payload ID: 1677
  Gene Symbol: ATG7
  Gene Name: autophagy related 7
  ENST ID: ENST00000451513
  CDS Start-End: 445-972
ggcatgcctctgctcctttgcgcacgcgcgccgcttcccagtggcaagcgcgggcaggaccgcgttgcgtcatcggggcgcgcgcctcagagagagctgtggttgccggaagttgagcggcgagcagccttgtgagagacatttctgagacctgtatgtcctgcgtctatgattcttccctgatcaaggcttctcaaaccccataatgctggtatccagtgcatccgttctcaaaaactgaagctgatggacaccagattgcatgtgaaggtgaaggatattatagcagaaggaaaccaaaataaaagaaaaacagctcctggaagtaaccaatgagaaggacagataagagtttgaagactgtggatgtgactgcttgttccctggttgacacactgaagaagaaatcatgttgattcagagttggcttggaggcaagaaataatggcggcagctacgggggatcctggactctctaaactgcagtttgccccttttagtagtgccttggatgttgggttttggcatgagttgacccagaagaagctgaacgagtatcggctggatgaagctcccaaggacattaagggttattactacaatggtgactctgctgggctgccagctcgcttaacattggagttcagtgcttttgacatgagtgctcccaccccagcccgttgctgcccagctattggaacactgtataacaccaacacactcgagtctttcaagactgcagataagaagctccttttggaacaagcagcaaatgagatatgggaatccataaaatcaggcactgctcttgaaaaccctgtactcctcaacaagttcctcctcttgacatttgcagatctaaagaagtaccacttctactattggttttgctatcctgccctctgtcttccagagagtttacctctcattcaggggccagtgggtttggatcaaaggttttcactaaaacag

SEQ ID NO: 110527 - DNA, 589 bp, Homo sapiens
  Payload ID: 1677
  Gene Symbol: ATG7
  Gene Name: autophagy related 7
  ENST ID: ENST00000423116
  CDS Start-End: 212-589
agtctggtcctcactgctgtggattgcctttactaaaatagagatctatgcagaaatacagttgcatagcttttcacataaggctcttcatgatatggcctttgcctgcttttatggcatggtccatctactctgccccatgtgcctctccttgctgccatacagaactctatcaggggaacctgcccccaatatttcaaggcaagaaataatggcggcagctacgggggatcctggactctctaaactgcagtttgccccttttagtagtgccttggatgttgggttttggcatgagttgacccagaagaagctgaacgagtatcggctggatgaagctcccaaggacattaagggttattactacaatggtgactctgctgggctgccagctcgcttaacattggagttcagtgcttttgacatgagtgctcccaccccagcccgttgctgcccagctattggaacactgtataacaccaacacactcgagtctttcaagactgcagataagaagctccttttggaacaagcagcaaatgagatatgggaatccataaaatcaggcactgctcttgaaaaccctgta

SEQ ID NO: 110528 - DNA, 3130 bp, Homo sapiens
  Payload ID: 1678
  Gene Symbol: ATG9A
  Gene Name: autophagy related 9A
  Uniprot ID: Q7Z3C6
  ENST ID: ENST00000361242
  CDS Start-End: 218-2737
gtgcttattggccagcctggctgcgggtgacagtgagtggcagacacccggcctagcgccgcgggtcgcgccgagccgagccgagccgagcggagccggcggagcctctggaatcacccgggtcgctgttcctgagcagctgcagagcatcgagggctggagaggagcacatactgtccatggagctggtggtcaaggtggacagggggcggtggtgatggcgcagtttgacactgaataccagcgcctagaggcctcctatagtgattcacccccaggggaggaggacctgttggtgcacgtcgccgaggggagcaagtcaccttggcaccatattgaaaaccttgacctcttcttctctcgagtttataatctgcaccagaagaatggcttcacatgtatgctcatcggggagatctttgagctcatgcagttcctctttgtggttgccttcactaccttcctggtcagctgcgtggactatgacatcctatttgccaacaagatggtgaaccacagtcttcaccctactgaacccgtcaaggtcactctgccagacgcctttttgcctgctcaagtctgtagtgccaggattcaggaaaatggctcccttatcaccatcctggtcattgctggtgtcttctggatccaccggcttatcaagttcatctataacatttgctgctactgggagatccactccttctacctgcacgctctgcgcatccctatgtctgcccttccgtattgcacgtggcaagaagtgcaggcccggatcgtgcagacgcagaaggagcaccagatctgcatccacaaacgtgagctgacagaactggacatctaccaccgcatcctccgtttccagaactacatggtggcactggttaacaaatccctcctgcctctgcgcttccgcctgcctggcctcggggaagctgtcttcttcacccgtggtctcaagtacaactttgagctgatcctcttctggggacctggctctctgtttctcaatgaatggagcctcaaggccgagtacaaacgtggggggcaacggctagagctggcccagcgcctcagcaaccgcatcctgtggattggcatcgctaacttcctgctgtgccccctcatcctcatatggcaaatcctctatgccttcttcagctatgctgaggtgctgaagcgggagccgggggccctgggagcacgctgctggtcactctatggccgctgctacctccgccacttcaacgagctggagcacgagctgcagtcccgcctcaaccgtggctacaagcccgcctccaagtacatgaattgcttcttgtcacctcttttgacactgctggccaagaatggagccttcttcgctggctccatcctggctgtgcttattgccctcaccatttatgacgaagatgtgttggctgtggaacatgtgctgaccaccgtcacactcctgggggtcaccgtgaccgtgtgcaggtcctttatcccggaccagcacatggtgttctgccctgagcagctgctccgcgtgatcctcgctcacatccactacatgcctgaccactggcagggtaatgcccaccgctcgcagacccgggacgagtttgcccagctcttccagtacaaggcagtgttcattttggaagagttgctgagccccattgtcacacccctcatcctcatcttctgcctgcgcccacgggccctggagattatagacttcttccgaaacttcaccgtggaggtcgttggtgtgggagatacctgctcctttgctcagatggatgttcgccagcatggtcatccccagtggctatctgctgggcagacagaggcctcagtgtaccagcaagctgaggatggaaagacagagttgtcactcatgcactttgccatcaccaaccctggctggcagccaccacgtgagagcacagccttcctaggcttcctcaaggagcaggttcagcgggatggagcagctgctagcctcgcccaagggggtctgctccctgaaaatgccctctttacgtctatccagtccttacaatctgagtctgagcccctgagccttatcgcaaatgtggtagctggctcatcctgccggggccctccactgcccagagacctgcagggctccaggcacagggctgaagtcgcctctgccctgcgctccttctccccgctgcaacccgggcaggcgcccacaggccgggctcacagcaccatgacaggctctggggtggatgccaggacagccagctccgggagcagcgtgtgggaaggacagctgcagagcctggtgctgtcagaatatgcatccacagagatgagcctgcatgccctctatatgcaccagctccacaagcagcaggcccaggctgaacctgagcggcatgtatggcaccgccgggagagtgatgagagtggagaaagcgcccctgatgaagggggagagggcgcccgggccccccagtctatccctcgctctgctagctatccctgtgcagcaccccggcctggagctcctgagaccactgccctgcatgggggcttccagaggcgctacggtggcatcacagatcctggcacagtgcccagggttccctctcatttctctcggctgcctcttggagggtgggcagaagatgggcagtcggcatcaaggcaccctgagcccgtgcccgaagagggctcggaggatgagctaccccctcaggtgcacaaggtatagacaaggctgagcagggttcctgtggcccaggatggaggccaccgctgccctgccatcccgtctgcctgccatgggacggctcctctgagtgttccctggccccacgtgtgtggtgtttgtgtgtctgtgcctggccaagggaggtgccaacactgggcttgccacagccccaggagaggaatttggggcctaggaaccgagggcacacgggactctagcctcatccccaggacccccttggctcagagtgtggtgctagaaactggcccccagcccagccccagtactgccacctttacacctacccctgcaagtccccagagggctgcccacgatagaagctgccaagcagggagaacctgtgccaactgtggagtggggaggttgggcctg

SEQ ID NO: 110529 - DNA, 3799 bp, Homo sapiens
  Payload ID: 1678
  Gene Symbol: ATG9A
  Gene Name: autophagy related 9A
  Uniprot ID: Q7Z3C6
  ENST ID: ENST00000396761
  CDS Start-End: 213-2732
agtcccgtccctgaagccgagaattggccgttgtgtctccgccccccgtgcttattggccagcctggctgcgggtgacagtgagtggcagacacccggcctagcgccgcgggtcgcgccgagccgagccgagccgagcggagccggcggagcctctggaatcacccgggtcgctgttcctgaggtggtcaaggtggacagggggcggtggtgatggcgcagtttgacactgaataccagcgcctagaggcctcctatagtgattcacccccaggggaggaggacctgttggtgcacgtcgccgaggggagcaagtcaccttggcaccatattgaaaaccttgacctcttcttctctcgagtttataatctgcaccagaagaatggcttcacatgtatgctcatcggggagatctttgagctcatgcagttcctctttgtggttgccttcactaccttcctggtcagctgcgtggactatgacatcctatttgccaacaagatggtgaaccacagtcttcaccctactgaacccgtcaaggtcactctgccagacgcctttttgcctgctcaagtctgtagtgccaggattcaggaaaatggctcccttatcaccatcctggtcattgctggtgtcttctggatccaccggcttatcaagttcatctataacatttgctgctactgggagatccactccttctacctgcacgctctgcgcatccctatgtctgcccttccgtattgcacgtggcaagaagtgcaggcccggatcgtgcagacgcagaaggagcaccagatctgcatccacaaacgtgagctgacagaactggacatctaccaccgcatcctccgtttccagaactacatggtggcactggttaacaaatccctcctgcctctgcgcttccgcctgcctggcctcggggaagctgtcttcttcacccgtggtctcaagtacaactttgagctgatcctcttctggggacctggctctctgtttctcaatgaatggagcctcaaggccgagtacaaacgtggggggcaacggctagagctggcccagcgcctcagcaaccgcatcctgtggattggcatcgctaacttcctgctgtgccccctcatcctcatatggcaaatcctctatgccttcttcagctatgctgaggtgctgaagcgggagccgggggccctgggagcacgctgctggtcactctatggccgctgctacctccgccacttcaacgagctggagcacgagctgcagtcccgcctcaaccgtggctacaagcccgcctccaagtacatgaattgcttcttgtcacctcttttgacactgctggccaagaatggagccttcttcgctggctccatcctggctgtgcttattgccctcaccatttatgacgaagatgtgttggctgtggaacatgtgctgaccaccgtcacactcctgggggtcaccgtgaccgtgtgcaggtcctttatcccggaccagcacatggtgttctgccctgagcagctgctccgcgtgatcctcgctcacatccactacatgcctgaccactggcagggtaatgcccaccgctcgcagacccgggacgagtttgcccagctcttccagtacaaggcagtgttcattttggaagagttgctgagccccattgtcacacccctcatcctcatcttctgcctgcgcccacgggccctggagattatagacttcttccgaaacttcaccgtggaggtcgttggtgtgggagatacctgctcctttgctcagatggatgttcgccagcatggtcatccccagtggctatctgctgggcagacagaggcctcagtgtaccagcaagctgaggatggaaagacagagttgtcactcatgcactttgccatcaccaaccctggctggcagccaccacgtgagagcacagccttcctaggcttcctcaaggagcaggttcagcgggatggagcagctgctagcctcgcccaagggggtctgctccctgaaaatgccctctttacgtctatccagtccttacaatctgagtctgagcccctgagccttatcgcaaatgtggtagctggctcatcctgccggggccctccactgcccagagacctgcagggctccaggcacagggctgaagtcgcctctgccctgcgctccttctccccgctgcaacccgggcaggcgcccacaggccgggctcacagcaccatgacaggctctggggtggatgccaggacagccagctccgggagcagcgtgtgggaaggacagctgcagagcctggtgctgtcagaatatgcatccacagagatgagcctgcatgccctctatatgcaccagctccacaagcagcaggcccaggctgaacctgagcggcatgtatggcaccgccgggagagtgatgagagtggagaaagcgcccctgatgaagggggagagggcgcccgggccccccagtctatccctcgctctgctagctatccctgtgcagcaccccggcctggagctcctgagaccactgccctgcatgggggcttccagaggcgctacggtggcatcacagatcctggcacagtgcccagggttccctctcatttctctcggctgcctcttggagggtgggcagaagatgggcagtcggcatcaaggcaccctgagcccgtgcccgaagagggctcggaggatgagctaccccctcaggtgcacaaggtatagacaaggctgagcagggttcctgtggcccaggatggaggccaccgctgccctgccatcccgtctgcctgccatgggacggctcctctgagtgttccctggccccacgtgtgtggtgtttgtgtgtctgtgcctggccaagggaggtgccaacactgggcttgccacagccccaggagaggaatttggggcctaggaaccgagggcacacgggactctagcctcatccccaggacccccttggctcagagtgtggtgctagaaactggcccccagcccagccccagtactgccacctttacacctacccctgcaagtccccagagggctgcccacgatagaagctgccaagcagggagaacctgtgccaactgtggagtggggaggttgggcctggaccctcaacccctgcaaccttccctagccccctcaatagatgagcaggtcaggctgtggcccttacctcacccgcagttctcgcccagtgctgcagccggctcacctctctccgcttcttgcacatcactggcctgtgtgtgctgcttgctcctgttctgttcgcttgctcccgttccgttcggcttttgctttgcgttagggtgaagaccctagcgtccagctcccctcaacgctatattttgacactaaaaaagaaggtttctaaattgtaggagcaggatggaaatactttgctgcccttgccatcttttaggatgggcccccaggagactgaggtcttcctgggccctcattgctgcttatcgtaccccccatcacctgcacatgggacagaccgggctggagggtgaccttggctgtgtgcgtcccagcaaaagagctctggcccgcatctcgctgtgccctgaagggggatgaagggcgatgcctcgcccgaggctttgggctgctgcactgcatgctgggactgctcctactctctgtcccacccctcacccagctgtggtccggctttgggagagtggtgaattgcgctgcccgaactcggagcggagcagggtagggaccgtgtacagcttgataacccttaataaaaagggagtttgaccaga

SEQ ID NO: 110530 - DNA, 3701 bp, Homo sapiens
  Payload ID: 1678
  Gene Symbol: ATG9A
  Gene Name: autophagy related 9A
  Uniprot ID: Q7Z3C6
  ENST ID: ENST00000409033
  CDS Start-End: 174-1760
cacccggcctagcgccgcgggtcgcgccgagccgagccgagccgagcggagccggcggagcctctggaatcacccgggtcgctgttcctgagcagctgcagagcatcgagggctggagaggagcacatactgtccatggagctggtggtcaaggtggacagggggcggtggtgatggcgcagtttgacactgaataccagcgcctagaggcctcctatagtgattcacccccaggggaggaggacctgttggtgcacgtcgccgaggggagcaagtcaccttggcaccatattgaaaaccttgacctcttcttctctcgagtttataatctgcaccagaagaatggcttcacatgtatgctcatcggggagatctttgagctcatgcagttcctctttgtggttgccttcactaccttcctggtcagctgcgtggactatgacatcctatttgccaacaagatggtgaaccacagtcttcaccctactgaacccgtcaaggtcactctgccagacgcctttttgcctgctcaagtctgtagtgccaggattcaggaaaatggctcccttatcaccatcctggtcattgctggtgtcttctggatccaccggcttatcaagttcatctataacatttgctgctactgggagatccactccttctacctgcacgctctgcgcatccctatgtctgcccttccgtattgcacgtggcaagaagtgcaggcccggatcgtgcagacgcagaaggagcaccagatctgcatccacaaacgtgagctgacagaactggacatctaccaccgcatcctccgtttccagaactacatggtggcactggttaacaaatccctcctgcctctgcgcttccgcctgcctggcctcggggaagctgtcttcttcacccgtggtctcaagtacaactttgagctgatcctcttctggggacctggctctctgtttctcaatgaatggagcctcaaggccgagtacaaacgtggggggcaacggctagagctggcccagcgcctcagcaaccgcatcctgtggattggcatcgctaacttcctgctgtgccccctcatcctcatatggcaaatcctctatgccttcttcagctatgctgaggtgctgaagcgggagccgggggccctgggagcacgctgctggtcactctatggccgctgctacctccgccacttcaacgagctggagcacgagctgcagtcccgcctcaaccgtggctacaagcccgcctccaagtacatgaattgcttcttgtcacctcttttgacactgctggccaagaatggagccttcttcgctggctccatcctggctgtgcttattgccctcaccatttatgacgaagatgtgttggctgtggaacatgtgctgaccaccgtcacactcctgggggtcaccgtgaccgtgtgcaggtcctttatcccggaccagcacatggtgttctgccctgagcagctgctccgcgtgatcctcgctcacatccactacatgcctgaccactggcagggtgttcattttggaagagttgctgagccccattgtcacacccctcatcctcatcttctgcctgcgcccacgggccctggagattatagacttcttccgaaacttcaccgtggaggtcgttggtgtgggagatacctgctcctttgctcagatggatgttcgccagcatggtcatccccagtggctatctgctgggcagacagaggcctcagtgtaccagcaagctgaggatggaaagacagagttgtcactcatgcactttgccatcaccaaccctggctggcagccaccacgtgagagcacagccttcctaggcttcctcaaggagcaggttcagcgggatggagcagctgctagcctcgcccaagggggtctgctccctgaaaatgccctctttacgtctatccagtccttacaatctgagtctgagcccctgagccttatcgcaaatgtggtagctggctcatcctgccggggccctccactgcccagagacctgcagggctccaggcacagggctgaagtcgcctctgccctgcgctccttctccccgctgcaacccgggcaggcgcccacaggccgggctcacagcaccatgacaggctctggggtggatgccaggacagccagctccgggagcagcgtgtgggaaggacagctgcagagcctggtgctgtcagaatatgcatccacagagatgagcctgcatgccctctatatgcaccagctccacaagcagcaggcccaggctgaacctgagcggcatgtatggcaccgccgggagagtgatgagagtggagaaagcgcccctgatgaagggggagagggcgcccgggccccccagtctatccctcgctctgctagctatccctgtgcagcaccccggcctggagctcctgagaccactgccctgcatgggggcttccagaggcgctacggtggcatcacagatcctggcacagtgcccagggttccctctcatttctctcggctgcctcttggagggtgggcagaagatgggcagtcggcatcaaggcaccctgagcccgtgcccgaagagggctcggaggatgagctaccccctcaggtgcacaaggtatagacaaggctgagcagggttcctgtggcccaggatggaggccaccgctgccctgccatcccgtctgcctgccatgggacggctcctctgagtgttccctggccccacgtgtgtggtgtttgtgtgtctgtgcctggccaagggaggtgccaacactgggcttgccacagccccaggagaggaatttggggcctaggaaccgagggcacacgggactctagcctcatccccaggacccccttggctcagagtgtggtgctagaaactggcccccagcccagccccagtactgccacctttacacctacccctgcaagtccccagagggctgcccacgatagaagctgccaagcagggagaacctgtgccaactgtggagtggggaggttgggcctggaccctcaacccctgcaaccttccctagccccctcaatagatgagcaggtcaggctgtggcccttacctcacccgcagttctcgcccagtgctgcagccggctcacctctctccgcttcttgcacatcactggcctgtgtgtgctgcttgctcctgttctgttcgcttgctcccgttccgttcggcttttgctttgcgttagggtgaagaccctagcgtccagctcccctcaacgctatattttgacactaaaaaagaaggtttctaaattgtaggagcaggatggaaatactttgctgcccttgccatcttttaggatgggcccccaggagactgaggtcttcctgggccctcattgctgcttatcgtaccccccatcacctgcacatgggacagaccgggctggagggtgaccttggctgtgtgcgtcccagcaaaagagctctggcccgcatctcgctgtgccctgaagggggatgaagggcgatgcctcgcccgaggctttgggctgctgcactgcatgctgggactgctcctactctctgtcccacccctcacccagctgtggtccggctttgggagagtggtgaattgcgctgcccgaactcggagcggagcagggtagggaccgtgtacagcttgataacccttaataaaaagggagtttgaccaga

SEQ ID NO: 110531 - DNA, 2512 bp, Homo sapiens
  Payload ID: 1678
  Gene Symbol: ATG9A
  Gene Name: autophagy related 9A
  Uniprot ID: Q7Z3C6
  ENST ID: ENST00000409422
  CDS Start-End: 176-2512
agacacccggcctagcgccgcgggtcgcgccgagccgagccgagccgagcggagccggcggagcctctggaatcacccgggtcgctgttcctgagcaccttggcaccatattgaaaaccttgacctcttcttctctcgagtttataatctgcaccagaagaatggcttcacatgtatgctcatcggggagatctttgagctcatgcagttcctctttgtggttgccttcactaccttcctggtcagctgcgtggactatgacatcctatttgccaacaagatggtgaaccacagtcttcaccctactgaacccgtcaaggtcactctgccagacgcctttttgcctgctcaagtctgtagtgccaggattcaggaaaatggctcccttatcaccatcctggtcattgctggtgtcttctggatccaccggcttatcaagttcatctataacatttgctgctactgggagatccactccttctacctgcacgctctgcgcatccctatgtctgcccttccgtattgcacgtggcaagaagtgcaggcccggatcgtgcagacgcagaaggagcaccagatctgcatccacaaacgtgagctgacagaactggacatctaccaccgcatcctccgtttccagaactacatggtggcactggttaacaaatccctcctgcctctgcgcttccgcctgcctggcctcggggaagctgtcttcttcacccgtggtctcaagtacaactttgagctgatcctcttctggggacctggctctctgtttctcaatgaatggagcctcaaggccgagtacaaacgtggggggcaacggctagagctggcccagcgcctcagcaaccgcatcctgtggattggcatcgctaacttcctgctgtgccccctcatcctcatatggcaaatcctctatgccttcttcagctatgctgaggtgctgaagcgggagccgggggccctgggagcacgctgctggtcactctatggccgctgctacctccgccacttcaacgagctggagcacgagctgcagtcccgcctcaaccgtggctacaagcccgcctccaagtacatgaattgcttcttgtcacctcttttgacactgctggccaagaatggagccttcttcgctggctccatcctggctgtgcttattgccctcaccatttatgacgaagatgtgttggctgtggaacatgtgctgaccaccgtcacactcctgggggtcaccgtgaccgtgtgcaggtcctttatcccggaccagcacatggtgttctgccctgagcagctgctccgcgtgatcctcgctcacatccactacatgcctgaccactggcagggtaatgcccaccgctcgcagacccgggacgagtttgcccagctcttccagtacaaggcagtgttcattttggaagagttgctgagccccattgtcacacccctcatcctcatcttctgcctgcgcccacgggccctggagattatagacttcttccgaaacttcaccgtggaggtcgttggtgtgggagatacctgctcctttgctcagatggatgttcgccagcatggtcatccccagtggctatctgctgggcagacagaggcctcagtgtaccagcaagctgaggatggaaagacagagttgtcactcatgcactttgccatcaccaaccctggctggcagccaccacgtgagagcacagccttcctaggcttcctcaaggagcaggttcagcgggatggagcagctgctagcctcgcccaagggggtctgctccctgaaaatgccctctttacgtctatccagtccttacaatctgagtctgagcccctgagccttatcgcaaatgtggtagctggctcatcctgccggggccctccactgcccagagacctgcagggctccaggcacagggctgaagtcgcctctgccctgcgctccttctccccgctgcaacccgggcaggcgcccacaggccgggctcacagcaccatgacaggctctggggtggatgccaggacagccagctccgggagcagcgtgtgggaaggacagctgcagagcctggtgctgtcagaatatgcatccacagagatgagcctgcatgccctctatatgcaccagctccacaagcagcaggcccaggctgaacctgagcggcatgtatggcaccgccgggagagtgatgagagtggagaaagcgcccctgatgaagggggagagggcgcccgggccccccagtctatccctcgctctgctagctatccctgtgcagcaccccggcctggagctcctgagaccactgccctgcatgggggcttccagaggcgctacggtggcatcacagatcctggcacagtgcccagggttccctctcatttctctcggctgcctcttggagggtgggcagaagatgggcagtcggcatcaaggcaccctgagcccgtgcccgaagagggctcggaggatgagctaccccctcaggtgcacaaggtatag

SEQ ID NO: 110532 - DNA, 4025 bp, Homo sapiens
  Payload ID: 1678
  Gene Symbol: ATG9A
  Gene Name: autophagy related 9A
  Uniprot ID: Q7Z3C6
  ENST ID: ENST00000409618
  CDS Start-End: 441-2960
ggggcgcgcgcgggcgccggggccgcgcgcgaggttgtccgctgttgggagctgccagcccttggcctggggccgggcgaccctggggcgaggtggactccggtccacggtcgccgcggctgggtgtggggaggcaagccaacccacccgggctatcagctgtaaggctgactcgatccctgcaacatccgcaggaacccctgagcccaggcccagccggccggggctccacgggccctggtccacactgaccctgtgagtggtgacttccctgaggggcagggctctcactagcccagggaatcccaccggggccaggctgggccaagatccacggcccccaggggctgcacggacagcagctgcagagcatcgagggctggagaggagcacatactgtccatggagctggtggtcaaggtggacagggggcggtggtgatggcgcagtttgacactgaataccagcgcctagaggcctcctatagtgattcacccccaggggaggaggacctgttggtgcacgtcgccgaggggagcaagtcaccttggcaccatattgaaaaccttgacctcttcttctctcgagtttataatctgcaccagaagaatggcttcacatgtatgctcatcggggagatctttgagctcatgcagttcctctttgtggttgccttcactaccttcctggtcagctgcgtggactatgacatcctatttgccaacaagatggtgaaccacagtcttcaccctactgaacccgtcaaggtcactctgccagacgcctttttgcctgctcaagtctgtagtgccaggattcaggaaaatggctcccttatcaccatcctggtcattgctggtgtcttctggatccaccggcttatcaagttcatctataacatttgctgctactgggagatccactccttctacctgcacgctctgcgcatccctatgtctgcccttccgtattgcacgtggcaagaagtgcaggcccggatcgtgcagacgcagaaggagcaccagatctgcatccacaaacgtgagctgacagaactggacatctaccaccgcatcctccgtttccagaactacatggtggcactggttaacaaatccctcctgcctctgcgcttccgcctgcctggcctcggggaagctgtcttcttcacccgtggtctcaagtacaactttgagctgatcctcttctggggacctggctctctgtttctcaatgaatggagcctcaaggccgagtacaaacgtggggggcaacggctagagctggcccagcgcctcagcaaccgcatcctgtggattggcatcgctaacttcctgctgtgccccctcatcctcatatggcaaatcctctatgccttcttcagctatgctgaggtgctgaagcgggagccgggggccctgggagcacgctgctggtcactctatggccgctgctacctccgccacttcaacgagctggagcacgagctgcagtcccgcctcaaccgtggctacaagcccgcctccaagtacatgaattgcttcttgtcacctcttttgacactgctggccaagaatggagccttcttcgctggctccatcctggctgtgcttattgccctcaccatttatgacgaagatgtgttggctgtggaacatgtgctgaccaccgtcacactcctgggggtcaccgtgaccgtgtgcaggtcctttatcccggaccagcacatggtgttctgccctgagcagctgctccgcgtgatcctcgctcacatccactacatgcctgaccactggcagggtaatgcccaccgctcgcagacccgggacgagtttgcccagctcttccagtacaaggcagtgttcattttggaagagttgctgagccccattgtcacacccctcatcctcatcttctgcctgcgcccacgggccctggagattatagacttcttccgaaacttcaccgtggaggtcgttggtgtgggagatacctgctcctttgctcagatggatgttcgccagcatggtcatccccagtggctatctgctgggcagacagaggcctcagtgtaccagcaagctgaggatggaaagacagagttgtcactcatgcactttgccatcaccaaccctggctggcagccaccacgtgagagcacagccttcctaggcttcctcaaggagcaggttcagcgggatggagcagctgctagcctcgcccaagggggtctgctccctgaaaatgccctctttacgtctatccagtccttacaatctgagtctgagcccctgagccttatcgcaaatgtggtagctggctcatcctgccggggccctccactgcccagagacctgcagggctccaggcacagggctgaagtcgcctctgccctgcgctccttctccccgctgcaacccgggcaggcgcccacaggccgggctcacagcaccatgacaggctctggggtggatgccaggacagccagctccgggagcagcgtgtgggaaggacagctgcagagcctggtgctgtcagaatatgcatccacagagatgagcctgcatgccctctatatgcaccagctccacaagcagcaggcccaggctgaacctgagcggcatgtatggcaccgccgggagagtgatgagagtggagaaagcgcccctgatgaagggggagagggcgcccgggccccccagtctatccctcgctctgctagctatccctgtgcagcaccccggcctggagctcctgagaccactgccctgcatgggggcttccagaggcgctacggtggcatcacagatcctggcacagtgcccagggttccctctcatttctctcggctgcctcttggagggtgggcagaagatgggcagtcggcatcaaggcaccctgagcccgtgcccgaagagggctcggaggatgagctaccccctcaggtgcacaaggtatagacaaggctgagcagggttcctgtggcccaggatggaggccaccgctgccctgccatcccgtctgcctgccatgggacggctcctctgagtgttccctggccccacgtgtgtggtgtttgtgtgtctgtgcctggccaagggaggtgccaacactgggcttgccacagccccaggagaggaatttggggcctaggaaccgagggcacacgggactctagcctcatccccaggacccccttggctcagagtgtggtgctagaaactggcccccagcccagccccagtactgccacctttacacctacccctgcaagtccccagagggctgcccacgatagaagctgccaagcagggagaacctgtgccaactgtggagtggggaggttgggcctggaccctcaacccctgcaaccttccctagccccctcaatagatgagcaggtcaggctgtggcccttacctcacccgcagttctcgcccagtgctgcagccggctcacctctctccgcttcttgcacatcactggcctgtgtgtgctgcttgctcctgttctgttcgcttgctcccgttccgttcggcttttgctttgcgttagggtgaagaccctagcgtccagctcccctcaacgctatattttgacactaaaaaagaaggtttctaaattgtaggagcaggatggaaatactttgctgcccttgccatcttttaggatgggcccccaggagactgaggtcttcctgggccctcattgctgcttatcgtaccccccatcacctgcacatgggacagaccgggctggagggtgaccttggctgtgtgcgtcccagcaaaagagctctggcccgcatctcgctgtgccctgaagggggatgaagggcgatgcctcgcccgaggctttgggctgctgcactgcatgctgggactgctcctactctctgtcccacccctcacccagctgtggtccggctttgggagagtggtgaattgcgctgcccgaactcggagcggagcagggtagggaccgtgtacagcttgataacccttaataaaaagggagtttgacca

SEQ ID NO: 110533 - DNA, 576 bp, Homo sapiens
  Payload ID: 1678
  Gene Symbol: ATG9A
  Gene Name: autophagy related 9A
  ENST ID: ENST00000456708
  CDS Start-End: 184-480
agtgagtggcagacacccggcctagcgccgcgggtcgcgccgagccgagccgagccgagcggagccggcggagcctctggaatcacccgggtcgctgttcctgagctgcagagcatcgagggctggagaggagcacatactgtccatggagctggtggtcaaggtggacagggggcggtggtgatggcgcagtttgacactgaataccagcgcctagaggcctcctatagtgattcacccccaggggaggaggacctgttggtgcacgtcgccgaggggagcaagtcaccttggcaccatattgaaaaccttgacctcttcttctctcgaacgtttataatctgcaccagaagaatggcttcacatgtatgctcatcggggagatctttgagctcatgcagttcctctttgtggttgccttcactaccttcctggtcagctgcgtggactatgacatcctatttgccaacaagatggtgaaccacagtcttcaccctactgaacccgtcaaggtcactctgccagacgcctttttgcctgctcaagtctgtagtgccaggattcaggaaaatggct

SEQ ID NO: 110534 - DNA, 574 bp, Homo sapiens
  Payload ID: 1678
  Gene Symbol: ATG9A
  Gene Name: autophagy related 9A
  ENST ID: ENST00000412355
  CDS Start-End: 132-428
gagtggcagacacccggcctagcgccgcgggtcgcgccgagccgagccgagccgagcggagccggcggagcctctggaatcacccgggtcgctgttcctgaggtggtcaaggtggacagggggcggtggtgatggcgcagtttgacactgaataccagcgcctagaggcctcctatagtgattcacccccaggggaggaggacctgttggtgcacgtcgccgaggggagcaagtcaccttggcaccatattgaaaaccttgacctcttcttctctcgaacgtttataatctgcaccagaagaatggcttcacatgtatgctcatcggggagatctttgagctcatgcagttcctctttgtggttgccttcactaccttcctggtcagctgcgtggactatgacatcctatttgccaacaagatggtgaaccacagtcttcaccctactgaacccgtcaaggtcactctgccagacgcctttttgcctgctcaagtctgtagtgccaggattcaggaaaatggctcccttatcaccatcctggtcattgctggtgtcttctggatccaccggctt

SEQ ID NO: 110535 - DNA, 568 bp, Homo sapiens
  Payload ID: 1678
  Gene Symbol: ATG9A
  Gene Name: autophagy related 9A
  ENST ID: ENST00000434939
  CDS Start-End: 290-568
cttgagaccctggagttggaagagtggcccggtttagcacagccagaggaagtgctcgtagtcctgggctggaagggtgcttcttccccactgcagccttcctgccccatgcttggcctcctcttggtggggtgtggatggctgggagggttgggttcctttttatccccactgcccactctctggggcctgacatcttctcctccagcagctgcagagcatcgagggctggagaggagcacatactgtccatggagctggtggtcaaggtggacagggggcggtggtgatggcgcagtttgacactgaataccagcgcctagaggcctcctatagtgattcacccccaggggaggaggacctgttggtgcacgtcgccgaggggagcaagtcaccttggcaccatattgaaaaccttgacctcttcttctctcgagtttataatctgcaccagaagaatggcttcacatgtatgctcatcggggagatctttgagctcatgcagttcctctttgtggttgccttcactaccttcctggtcagctgcgtggactatgacatcctattt

SEQ ID NO: 110536 - DNA, 581 bp, Homo sapiens
  Payload ID: 1678
  Gene Symbol: ATG9A
  Gene Name: autophagy related 9A
  ENST ID: ENST00000431715
  CDS Start-End: 182-581
agtgagtggcagacacccggcctagcgccgcgggtcgcgccgagccgagccgagccgagcggagccggcggagcctctggaatcacccgggtcgctgttcctgaggcagttcctctttgtggttgccttcactaccttcctggtcagctgcgtggactatgacatcctatttgccaacaagatggtgaaccacagtcttcaccctactgaacccgtcaaggtcactctgccagacgcctttttgcctgctcaagtctgtagtgccaggattcaggaaaatggctcccttatcaccatcctggtcattgctggtgtcttctggatccaccggcttatcaagttcatctataacatttgctgctactgggagatccactccttctacctgcacgctctgcgcatccctatgtctgcccttccgtattgcacgtggcaagaagtgcaggcccggatcgtgcagacgcagaaggagcaccagatctgcatccacaaacgtgagctgacagaactggacatctaccaccgcatcctccgtttccagaactacatggtggcactggttaacaaatccctcctgcctc

SEQ ID NO: 110537 - DNA, 5245 bp, Homo sapiens
  Payload ID: 1678
  Gene Symbol: ATG9A
  Gene Name: autophagy related 9A
  ENST ID: ENST00000446716
  CDS Start-End: 1-766
gcgggatggagcagctgctagcctcgcccaagggggtctgctccctgaaaatgccctctttacgtctatccagtccttacaatctgagtctgagcccctgagccttatcgcaaatgtggtagctggctcatcctgccggggccctccactgcccagagacctgcagggctccaggcacagggctgaagtcgcctctgccctgcgctccttctccccgctgcaacccgggcaggcgcccacaggccgggctcacagcaccatgacaggctctggggtggatgccaggacagccagctccgggagcagcgtgtgggaaggacagctgcagagcctggtgctgtcagaatatgcatccacagagatgagcctgcatgccctctatatgcaccagctccacaagcagcaggcccaggctgaacctgagcggcatgtatggcaccgccgggagagtgatgagagtggagaaagcgcccctgatgaagggggagagggcgcccgggccccccagtctatccctcgctctgctagctatccctgtgcagcaccccggcctggagctcctgagaccactgccctgcatgggggcttccagaggcgctacggtggcatcacagatcctggcacagtgcccagggttccctctcatttctctcggctgcctcttggagggtgggcagaagatgggcagtcggcatcaaggcaccctgagcccgtgcccgaagagggctcggaggatgagctaccccctcaggtgcacaaggtatagacaaggctgagcagggttcctgtggcccaggatggaggccaccgctgccctgccatcccgtctgcctgccatgggacggctcctctgagtgttccctggccccacgtgtgtggtgtttgtgtgtctgtgcctggccaagggaggtgccaacactgggcttgccacagccccaggagaggaatttggggcctaggaaccgagggcacacgggactctagcctcatccccaggacccccttggctcagagtgtggtgctagaaactggcccccagcccagccccagtactgccacctttacacctacccctgcaagtccccagagggctgcccacgatagaagctgccaagcagggagaacctgtgccaactgtggagtggggaggttgggcctggaccctcaacccctgcaaccttccctagccccctcaatagatgagcaggtcaggctgtggcccttacctcacccgcagttctcgcccagtgctgcagccggctcacctctctccgcttcttgcacatcactggcctgtgtgtgctgcttgctcctgttctgttcgcttgctcccgttccgttcggcttttgctttgcgttagggtgaagaccctagcgtccagctcccctcaacgctatattttgacactaaaaaagaaggtttctaaattgtaggagcaggatggaaatactttgctgcccttgccatcttttaggatgggcccccaggagactgaggtcttcctgggccctcattgctgcttatcgtaccccccatcacctgcacatgggacagaccgggctggagggtgaccttggctgtgtgcgtcccagcaaaagagctctggcccgcatctcgctgtgccctgaagggggatgaagggcgatgcctcgcccgaggctttgggctgctgcactgcatgctgggactgctcctactctctgtcccacccctcacccagctgtggtccggctttgggagagtggtgaattgcgctgcccgaactcggagcggagcagggtagggaccgtgtacagcttgataacccttaataaaaagggagtttgaccagacttcttgttgtctcgcgcggctagaatcctgggaacaagagaaatgggatggggactctgccggggtctagaagaaagtatgtttaggccgtcgctcagatacgctgagcaaggcggctggcggaagggcagcttccgacccacagttccgtggaggtctgtgtcctgccccgagccaggattccgtgaggtctgtttccagccccgagccacgattccgtggaggtttccagctcggcctggtcgtcagatttcccgccctgggcacgtgaccaagccggctctgcttctctaatttgcattcgttgcctgcaccattccccccgctcccccctcggagacatttggccaatgggagccgtgggtaggggctgtgggcggggctacagccgtggagcgcggtgcgagtccaacaccgagcattcccgtgggcctgcagttggcaggagggtcccgggcccagagccagcggggccgtgctgagacggcgtacgtgccctgcgtgagtgcgtggcggcggcgcgtgcgctaggggagtgggcggtgaggcctggtccacgtgcgtcccttcccgggacccccgcagcttggcgcccagcggctacgtgagccaaggcacccggatgtccgcgcccctctccgagtgaccagtcccggcctccggtcccgcagtgcccgcagcctcggccggcgtccacgcattgccatggtgactgtgggcaactactgcgaggccgaagggcccgtgggtccggcctggatgcaggatggcctgagtccctgcttcttcttcacgctcgtgccctcgacgcggatggctctggggactctggccttggtgctggctcttccctgcagacgccgggagcggcccgctggtgctgattcgctgtcttggggggccggccctcgcatctctccctacgtgctgcagctgcttctggccacacttcaggcggcgctgcccctggccggcctggctggccgggtgggcactgcccggggggccccactgccaagctatctacttctggcctccgtgctggagagtctggccggcgcctgtggcctgtggctgcttgtcgtggagcggagccaggcacggcagcgtctggcaatgggcatctggatcaagttcaggcacagccctggtctcctgctcctctggactgtggcgtttgcagctgagaacttggccctggtgtcttggaacagcccacagtggtggtgggcaagggcagacttgggccagcaggttcagtttagcctgtgggtgctgcggtatgtggtctctggagggctgtttgtcctgggtctctgggcccctggacttcgtccccagtcctatacattgcaggttcatgaagaggaccaagatgtggaaaggagccaggttcggtcagcagcccaacagtctacctggcgagattttggcaggaagctccgcctcctgagtggctacctgtggcctcgagggagtccagctctgcagctggtggtgctcatctgcctggggctcatgggtttggaacgggcactcaatgtgttggtgcctatattctataggaacattggtgagcaggaggagcaccagctcagtgtgctggtccttcatcagcctggtggctgggatggtccttacctagggaggtgggacagagctgggtggtcagaaagagactgtggctggtacctggggccattttgcctgaagagagtcctgggcgccataagtgggttctgactcgtttcctccacagtgaacttgctgactgagaaggcaccttggaactctctggcctggactgttaccagttacgtcttcctcaagttcctccaggggggtggcactggcagtacaggcttcgtgagcaacctgcgcaccttcctgtggatccgggtgcagcagttcacgtctcggcgggtggagctgctcatcttctcccacctgcacgagctctcactgcgctggcacctggggcgccgcacaggggaggtgctgcggatcgcggatcggggcacatccagtgtcacagggctgctcagctacctggtgttcaatgtcatccccacgctggccgacatcatcattggcatcatctacttcagcatgttcttcaacgcctggtttggcctcattgtgttcctgtgcatgagtctttacctcaccctgaccattgtggtcactgagtggagaaccaagtttcgtcgtgctatgaacacacaggagaacgctacccgggcacgagcagtggactctctgctaaacttcgagacggtgaagtattacaacgccgagagttacgaagtggaacgctatcgagaggccatcatcaaatatcagggtttggagtggaagtcgagcgcttcactggttttactaaatcagacccagaacctggtgattgggctcgggctcctcgccggctccctgctttgcgcatactttgtcactgagcagaagctacaggttggggactatgtgctctttggcacctacattatccagctgtacatgcccctcaattggtttggcacctactacaggatgatccagaccaacttcattgacatggagaacatgtttgacttgctgaaagaggagacagaagtgaaggaccttcctggagcagggccccttcgctttcagaagggccgtattgagtttgagaacgtgcacttcagctatgccgatgggcgggagactctgcaggacgtgtctttcactgtgatgcctggacagacacttgccctggtgggcccatctggggcagggaagagcacaattttgcgcctgctgtttcgcttctacgacatcagctctggctgcatccgaatagatgggcaggacatttcacagggtacaggacacaggtgggcgagcggggactgaagctgagcggcggggagaagcagcgcgtcgccattgcccgcaccatcctcaaggctccgggcatcattctgctggatgaggcaacgtcagcgctggatacatctaatgagagggccatccaggcttctctggccaaagtctgtgccaaccgcaccaccatcgtagtggcacacaggctctcaactgtggtcaatgctgaccagatcctcgtcatcaaggatggctgcatcgtggagaggggacgacacgaggctctgttgtcccgaggtggggtgtatgctgacatgtggcagctgcagcagggacaggaagaaacctctgaagacactaagcctcagaccatggaacggtgacaaaagtttggccacttccctctcaaagactaacccagaagggaataagatgtgtctcctttccctggcttatttcatcctggtcttggggtatggtgctagctatggtaagggaaagggacctttccgaaaaacatcttttggggaaataaaaatgtggactgtg

SEQ ID NO: 110538 - DNA, 733 bp, Homo sapiens
  Payload ID: 1678
  Gene Symbol: ATG9A
  Gene Name: autophagy related 9A
  ENST ID: ENST00000429920
  CDS Start-End: 1-733
ctcgctcacatccactacatgcctgaccactggcagggtaatgcccaccgctcgcagacccgggacgagtttgcccagctcttccagtacaaggcagtgttcattttggaagagttgctgagccccattgtcacacccctcatcctcatcttctgcctgcgcccacgggccctggagattatagacttcttccgaaacttcaccgtggaggtcgttggtgtgggagatacctgctcctttgctcagatggatgttcgccagcatggtcatccccagtggctatctgctgggcagacagaggcctcagtgtaccagcaagctgaggatggaaagacagagttgtcactcatgcactttgccatcaccaaccctggctggcagccaccacgtgagagcacagccttcctaggcttcctcaaggagcaggttcagcgggatggagcagctgctagcctcgcccaagggggtctgctccctgaaaatgccctctttacgtctatccagtccttacaatctgagtctgagcccctgagccttatcgcaaatgtggtagctggctcatcctgccggggccctccactgcccagagacctgcagggctccaggcacagggctgaagtcgcctctgccctgcgctccttctccccgctgcaacccgggcaggcgcccacaggccgggctcacagcaccatgacaggctctggctccacaagcagcaggcccaggctgaacc

SEQ ID NO: 110539 - DNA, 893 bp, Homo sapiens
  Payload ID: 1678
  Gene Symbol: ATG9A
  Gene Name: autophagy related 9A
  ENST ID: ENST00000436856
  CDS Start-End: 331-893
ctagcgccgcgggtcgcgccgagccgagccgagccgagcggagccggcggagcctctggaatcacccgggtcgctgttcctgaggaacccctgagcccaggcccagccggccggggctccacgggccctggtccacactgaccctgtgagtggtgacttccctgaggggcagggctctcactagcccagggaatcccaccggggccaggctgggccaagatccacggcccccaggggctgcacggacagcagctgcagagcatcgagggctggagaggagcacatactgtccatggagctggtggtcaaggtggacagggggcggtggtgatggcgcagtttgacactgaataccagcgcctagaggcctcctatagtgattcacccccaggggaggaggacctgttggtgcacgtcgccgaggggagcaagtcaccttggcaccatattgaaaaccttgacctcttcttctctcgagtttataatctgcaccagaagaatggcttcacatgtatgctcatcggggagatctttgagctcatgcagttcctctttgtggttgccttcactaccttcctggtcagctgcgtggactatgacatcctatttgccaacaagatggtgaaccacagtcttcaccctactgaacccgtcaaggtcactctgccagacgcctttttgcctgctcaagtctgtagtgccaggattcaggaaaatggctcccttatcaccatcctggtcattgctggtgtcttctggatccaccggcttatcaagttcatctataacatttgctgctactgggagatccactccttctacctgcacgctctgcgcatccctatgtctgcccttccgtattgcacgtggcaagaagtgcaggcccggatcgt

SEQ ID NO: 110540 - DNA, 699 bp, Homo sapiens
  Payload ID: 1678
  Gene Symbol: ATG9A
  Gene Name: autophagy related 9A
  ENST ID: ENST00000457841
  CDS Start-End: 184-699
agtgagtggcagacacccggcctagcgccgcgggtcgcgccgagccgagccgagccgagcggagccggcggagcctctggaatcacccgggtcgctgttcctgagctgcagagcatcgagggctggagaggagcacatactgtccatggagctggtggtcaaggtggacagggggcggtggtgatggcgcagtttgacactgaataccagcgcctagaggcctcctatagtgattcacccccaggggaggaggacctgttggtgcacgtcgccgaggggagcaagtcaccttggcaccatattgaaaaccttgacctcttcttctctcgagtttataatctgcaccagaagaatggcttcacatgtatgctcatcggggagatctttgagctcatgcagttcctctttgtggttgccttcactaccttcctggtcagctgcgtggactatgacatcctatttgccaacaagatggtgaaccacagtcttcaccctactgaacccgtcaaggtcactctgccagacgcctttttgcctgctcaagtctgtagtgccaggattcaggaaaatggctcccttatcaccatcctggtcattgctggtgtcttctggatccaccggcttatcaagttcatctataacatttgctgctactgggagatccactccttctacctgcacgctctgcgcatccctatg

SEQ ID NO: 110541 - DNA, 796 bp, Homo sapiens
  Payload ID: 1678
  Gene Symbol: ATG9A
  Gene Name: autophagy related 9A
  ENST ID: ENST00000432520
  CDS Start-End: 363-796
gcgcgaggttgtccgctgttgggagctgccagcccttggcctggggccgggcgaccctggggcgaggtggactccggtccacggtcgccgcggctgggtgtggggaggcaagccaacccacccgggctatcagctgtaaggctgactcgatccctgcaacatccgcaggaacccctgagcccaggcccagccggccggggctccacgggccctggtccacactgaccctgtgagtggtgacttccctgaggggcagggctctcactagcccagggaatcccaccggggccaggctgggccaagatccacggcccccaggggctgcacggacaggtggtcaaggtggacagggggcggtggtgatggcgcagtttgacactgaataccagcgcctagaggcctcctatagtgattcacccccaggggaggaggacctgttggtgcacgtcgccgaggggagcaagtcaccttggcaccatattgaaaaccttgacctcttcttctctcgagtttataatctgcaccagaagaatggcttcacatgtatgctcatcggggagatctttgagctcatgcagttcctctttgtggttgccttcactaccttcctggtcagctgcgtggactatgacatcctatttgccaacaagatggtgaaccacagtcttcaccctactgaacccgtcaaggtcactctgccagacgcctttttgcctgctcaagtctgtagtgccaggattcaggaaaatggctcccttatcaccatcctggtcattgctggtgtcttctggatcca

SEQ ID NO: 110542 - DNA, 700 bp, Homo sapiens
  Payload ID: 1678
  Gene Symbol: ATG9A
  Gene Name: autophagy related 9A
  ENST ID: ENST00000428226
  CDS Start-End: 192-700
ctagcgccgcgggtcgcgccgagccgagccgagccgagcggagccggcggagcctctggaatcacccgggtcgctgttcctgagcagctgcagagcatcgagggctggagaggagcacatactgtccatggagctgggtctcttcttcctccttattggcaggtggtcaaggtggacagggggcggtggtgatggcgcagtttgacactgaataccagcgcctagaggcctcctatagtgattcacccccaggggaggaggacctgttggtgcacgtcgccgaggggagcaagtcaccttggcaccatattgaaaaccttgacctcttcttctctcgagtttataatctgcaccagaagaatggcttcacatgtatgctcatcggggagatctttgagctcatgcagttcctctttgtggttgccttcactaccttcctggtcagctgcgtggactatgacatcctatttgccaacaagatggtgaaccacagtcttcaccctactgaacccgtcaaggtcactctgccagacgcctttttgcctgctcaagtctgtagtgccaggattcaggaaaatggctcccttatcaccatcctggtcattgctggtgtcttctggatccaccggcttatcaagttcatctataacatttgctgctactgggagatccactccttctacctgcacgctctgcgcat

SEQ ID NO: 110543 - DNA, 589 bp, Homo sapiens
  Payload ID: 1678
  Gene Symbol: ATG9A
  Gene Name: autophagy related 9A
  ENST ID: ENST00000439812
  CDS Start-End: 197-589
agtgagtggcagacacccggcctagcgccgcgggtcgcgccgagccgagccgagccgagcggagccggcggagcctctggaatcacccgggtcgctgttcctgagcagctgcagagcatcgagggctggagaggagcacatactgtccatggagctggtagggccatgtggtcaaggtggacagggggcggtggtgatggcgcagtttgacactgaataccagcgcctagaggcctcctatagtgattcacccccaggggaggaggacctgttggtgcacgtcgccgaggggagcaagtcaccttggcaccatattgaaaaccttgacctcttcttctctcgagtttataatctgcaccagaagaatggcttcacatgtatgctcatcggggagatctttgagctcatgcagttcctctttgtggttgccttcactaccttcctggtcagctgcgtggactatgacatcctatttgccaacaagatggtgaaccacagtcttcaccctactgaacccgtcaaggtcactctgccagacgcctttttgcctgctcaagtctgtagtgccaggattcaggaaaatggctcc

SEQ ID NO: 110544 - DNA, 685 bp, Homo sapiens
  Payload ID: 1678
  Gene Symbol: ATG9A
  Gene Name: autophagy related 9A
  ENST ID: ENST00000443140
  CDS Start-End: 395-685
gttgggagctgccagcccttggcctggggccgggcgaccctggggcgaggtggactccggtccacggtcgccgcggctgggtgtggggaggcaagccaacccacccgggctatcagctgtaaggctgactcgatccctgcaacatccgcaggaacccctgagcccaggcccagccggccggggctccacgggccctggtccacactgaccctgtgagtggtgacttccctgaggggcagggctctcactagcccagggaatcccaccggggccaggctgggccaagatccacggcccccaggggctgcacggacagctgcagagcatcgagggctggagaggagcacatactgtccatggagctggtggtcaaggtggacagggggcggtggtgatggcgcagtttgacactgaataccagcgcctagaggcctcctatagtgattcacccccaggggaggaggacctgttggtgcacgtcgccgaggggagcaagtcaccttggcaccatattgaaaaccttgacctcttcttctctcgagtttataatctgcaccagaagaatggcttcacatgtatgctcatcggggagatctttgagctcatgcagttcctctttgtggttgccttcactaccttcctggtcagctgcgtggactatgacatcctatttgccaacaagatg

SEQ ID NO: 110545 - DNA, 4572 bp, Homo sapiens
  Payload ID: 1679
  Gene Symbol: ATG9B
  Gene Name: autophagy related 9B
  Uniprot ID: Q674R7
  ENST ID: ENST00000605952
  CDS Start-End: 77-2851
agctcagtgtcacagacctttgtggaagcaacaacagctcccatccttccaacctttctggagaagccgtggcctgatggtgagccgaatgggctggggggggagaagaaggcggctggggcggtggggagatctggggcccggatcggtgcccctcctccccatgccactgccacctcctcctcctccttcatgccggggacctgggggagggaggatctccatcttctctctgtcccctgcccctcatacaagaagctccccctcctcattttcccctcccaccgcagggcccccttgctcagtgctacaggggacaggggcttctcagtcttgccacagtgctctccctatcccagccacccccccaacacaggctcaacctgcaatgacacctgcctctgcatctccctcctggggatcccactccaccccacccctggccccggcaacccccactccctcacagcagtgcccccaggactctcctgggctgcgggtaggccctttgatccctgaacaggattatgagcggctggaggactgtgaccctgaggggtcccaagactcacccatccacggggaggagcagcaacccctgcttcatgtccctgaagggctccgaggctcctggcatcacatccagaacctggacagtttcttcaccaagatctacagctaccaccagcggaatggctttgcctgcatcttgctggaggatgtcttccagctgggacaatttattttcattgtcaccttcacaaccttcctccttcgatgcgtggattacaatgttctctttgccaaccaaccaagtaaccataccagacctgggccgttccacagcaaagtgaccctgtcagatgccatcctaccctcagcccagtgtgctgagaggatccgctccagcccgctgctggtcctcctcctggtcctggctgccggcttctggctggtccaactgcttcgctcagtctgcaacctcttcagctactgggacatccaggtgttttacagggaggccctgcacatccccccggaggagctgagctcggttccctgggcagaggtgcagtcccgcctcttggcactgcagcggagcgggggcctgtgcgtgcagccgcggcccctgacggagctggacatccaccaccgcatcctgcgctacaccaactaccaggtggcgctggccaacaaaggcctgctgccggcccgctgcccgctgccctggggaggcagtgcggctttcctcagccgcggcctggcgctcaatgtcgacctgctgctcttccgcggtcccttctcgctcttccgcgggggctgggagctgccgcacgcctacaagcgcagcgaccagcggggcgccctagcagcgcgctgggggcgcacagtgctgctgctggccgccctgaacctggcgctgagcccgctggtgctggcctggcaggttctgcacgtcttctatagccacgtggagctgctgcggcgcgagcctggcgcgctgggggcgcgcggctggtcccgcctggcgcgcttgcagctgcgccacttcaacgagctgccgcacgagctgcgcgcgcgcctggcccgcgcctaccgccccgccgccgccttcctgcgcaccgctgcgccccccgcgcccctgcgcacgctgctggcccgccagctcgttttcttcgcgggtgcactcttcgccgcgctgcttgtgctcaccgtctacgacgaggacgtgctagccgtggagcacgtgctcaccgccatgaccgcgctcggggtcaccgccaccgtcgccaggtctttcattccggaagagcagtgccagggtcgtgcgccgcagctcctgctgcagacagccctggcccacatgcactacctcccggaggagcccggccccggcggcagggaccgcgcctaccggcagatggcgcagctgctgcagtaccgagcggtctccctcctggaggagctcctgtccccgctcctcaccccgctgtttctgcttttctggttccgccctcgtgccctggagattatcgacttttttcatcacttcactgtggatgtggctggggttggggacatctgttcctttgcccttatggatgtgaagcgccacggacaccctcagtggctctcggcgggacagactgaggcctcgctgtctcagcgtgcggaggacggcaagactgagctttctttgatgcggttctccctggcgcatccactctggcgccccccagggcacagctctaagtttcttgggcacctctggggccgagtacaacaagatgcagctgcctggggtgccacctcggctcgcggcccctccaccccgggggtgctcagcaactgcacctcgcccctgcctgaggccttcctggccaacctcttcgtgcaccctctcctgcctccgagagatctgagcccgacagccccctgtccagctgcggccacagccagcctccttgcctccatttcccgaattgcccaggaccccagctctgtgtccccaggaggcactgggggccagaagctggcccagctcccagaacttgcttctgccgagatgagtctccatgtcatctacctgcaccagcttcaccagcagcagcagcagcaggagccgtggggtgaggctgcagcctccatcctgtccaggccctgctccagcccctcacagccaccctcgcctgatgaggagaagccatcctggtcaagtgacggctccagtcctgcctctagccccagacaacagtggggaacccagaaggcccggaatctgttccccggagggtttcaggtgaccacagacacccagaaggagcctgaccgggcctcttgcactgactgagacgactcctcagggccccactcctggcagctgagtgctgcacctgccttctcgatcacgagcctgagaactgcacgggggagcagcccagactggctggaaaccatgttttcagagtgcagggtcaagtggcgtcctctggacagatgtgagaaggcaccacctcaagaggggaggagcggggctgatcctggtcgggcggacctgagtcgggcagccgctctcccggaactggaagggaaagccaggcggctctcaggggctgttggtgtctgagccgggagggtcgaacgcccagggcactgcgccccgcaactgacgctcctgcaaggaaaagctctggcacgccgatgacgtcgccggcctcgtccagctccatgtcgccctccgtcgccaggatgcgctgcacggtctgcaggacgttggttgccatggtaacatcgccgcagacaaacatgtggccccgctcgaggcacagcacgcggtgcacctccgcagccagctccgtcctcaggatgtcctgcacgttaccattgcgccctcagggtctcacaccttggggttgtcaggttcccgggagaaggcggtgaggactcggccaaacaccccgcgctgctgggcgttctgcacctcgtcgcggtagagatggtcaagttgggagcatcggcagccgaacaccaaagtcatgggagtgggctgcagccctgcaagcaaccccgcgcttgggaaggctcttctccggggcacagtgctagtggggcctccccacaggccaccgtcgcccagcctggcagcccagcgttttgggctgaaaccaccattactttggctgtttcatctctaagagagtgtagaatgctttcacagagaccctgcacagccctgatttacagagggaagggaagcgcgggtgaggtggtggcccctggtggagctgcgctagaatgcgcggcttcggactcagaattccatgccctttgcattgtgtgacatcgcagtccccttccccgctcccacttcatattctcccatacttataactctcctcccagtcacagccctcttcttttgattgacagaccaccctgggcaccccatgctcaatatgaacaccttgtagcatccttaggtcttggacagacctcggtcagctctggcacagtcaagaatccaccttgggcagttcttctttgagtcttagccctaatccctttgaaaattctattttcctttgtcctcaatccagtcaacacctactatgtaccaggcaccaggaagccagaagctcagggcccagcccttgcctttggtacctgccctccccttggtctcatgagcgtcttttcagctttgtggactttgtttcctgccctctctttcctatttcctgccttccagccccacccctctgtccctagattgtgtgactcccttcaggcagtcctttagtccccagcctcacctttgctctcaatgtcatgcagccgctcctgccagaatccccggaagggggcaatgccagtgcctggacccaccaggatgcagggcaagctgggatcgggtggcagccggaaggagggagccctggcaggagagacactccatcaggtcccctttgcctttcctgctccaccattctcaccatgcagggtgggtggagcaaggaggacccaagttcttcccatctcaaaaaaaaattaaaaaaaaaacaaaaaacaaaa

SEQ ID NO: 110546 - DNA, 3489 bp, Homo sapiens
  Payload ID: 1679
  Gene Symbol: ATG9B
  Gene Name: autophagy related 9B
  Uniprot ID: Q674R7
  ENST ID: ENST00000469530
  CDS Start-End: 1-2775
atggtgagccgaatgggctggggggggagaagaaggcggctggggcggtggggagatctggggcccggatcggtgcccctcctccccatgccactgccacctcctcctcctccttcatgccggggacctgggggagggaggatctccatcttctctctgtcccctgcccctcatacaagaagctccccctcctcattttcccctcccaccgcagggcccccttgctcagtgctacaggggacaggggcttctcagtcttgccacagtgctctccctatcccagccacccccccaacacaggctcaacctgcaatgacacctgcctctgcatctccctcctggggatcccactccaccccacccctggccccggcaacccccactccctcacagcagtgcccccaggactctcctgggctgcgggtaggccctttgatccctgaacaggattatgagcggctggaggactgtgaccctgaggggtcccaagactcacccatccacggggaggagcagcaacccctgcttcatgtccctgaagggctccgaggctcctggcatcacatccagaacctggacagtttcttcaccaagatctacagctaccaccagcggaatggctttgcctgcatcttgctggaggatgtcttccagctgggacaatttattttcattgtcaccttcacaaccttcctccttcgatgcgtggattacaatgttctctttgccaaccaaccaagtaaccataccagacctgggccgttccacagcaaagtgaccctgtcagatgccatcctaccctcagcccagtgtgctgagaggatccgctccagcccgctgctggtcctcctcctggtcctggctgccggcttctggctggtccaactgcttcgctcagtctgcaacctcttcagctactgggacatccaggtgttttacagggaggccctgcacatccccccggaggagctgagctcggttccctgggcagaggtgcagtcccgcctcttggcactgcagcggagcgggggcctgtgcgtgcagccgcggcccctgacggagctggacatccaccaccgcatcctgcgctacaccaactaccaggtggcgctggccaacaaaggcctgctgccggcccgctgcccgctgccctggggaggcagtgcggctttcctcagccgcggcctggcgctcaatgtcgacctgctgctcttccgcggtcccttctcgctcttccgcgggggctgggagctgccgcacgcctacaagcgcagcgaccagcggggcgccctagcagcgcgctgggggcgcacagtgctgctgctggccgccctgaacctggcgctgagcccgctggtgctggcctggcaggttctgcacgtcttctatagccacgtggagctgctgcggcgcgagcctggcgcgctgggggcgcgcggctggtcccgcctggcgcgcttgcagctgcgccacttcaacgagctgccgcacgagctgcgcgcgcgcctggcccgcgcctaccgccccgccgccgccttcctgcgcaccgctgcgccccccgcgcccctgcgcacgctgctggcccgccagctcgttttcttcgcgggtgcactcttcgccgcgctgcttgtgctcaccgtctacgacgaggacgtgctagccgtggagcacgtgctcaccgccatgaccgcgctcggggtcaccgccaccgtcgccaggtctttcattccggaagagcagtgccagggtcgtgcgccgcagctcctgctgcagacagccctggcccacatgcactacctcccggaggagcccggccccggcggcagggaccgcgcctaccggcagatggcgcagctgctgcagtaccgagcggtctccctcctggaggagctcctgtccccgctcctcaccccgctgtttctgcttttctggttccgccctcgtgccctggagattatcgacttttttcatcacttcactgtggatgtggctggggttggggacatctgttcctttgcccttatggatgtgaagcgccacggacaccctcagtggctctcggcgggacagactgaggcctcgctgtctcagcgtgcggaggacggcaagactgagctttctttgatgcggttctccctggcgcatccactctggcgccccccagggcacagctctaagtttcttgggcacctctggggccgagtacaacaagatgcagctgcctggggtgccacctcggctcgcggcccctccaccccgggggtgctcagcaactgcacctcgcccctgcctgaggccttcctggccaacctcttcgtgcaccctctcctgcctccgagagatctgagcccgacagccccctgtccagctgcggccacagccagcctccttgcctccatttcccgaattgcccaggaccccagctctgtgtccccaggaggcactgggggccagaagctggcccagctcccagaacttgcttctgccgagatgagtctccatgtcatctacctgcaccagcttcaccagcagcagcagcagcaggagccgtggggtgaggctgcagcctccatcctgtccaggccctgctccagcccctcacagccaccctcgcctgatgaggagaagccatcctggtcaagtgacggctccagtcctgcctctagccccagacaacagtggggaacccagaaggcccggaatctgttccccggagggtttcaggtgaccacagacacccagaaggagcctgaccgggcctcttgcactgactgagacgactcctcagggtcagtattgcctcctgtgaggggagggagaaaggacggcataggtagttggtttggagtccgacttgaagcgatgggagcagtggtgggaatttggggtgatgggaggtggtcatctctggaatctagacccctggactgcttgccaagagccgtctcctcccacaggtaccctggcttcggcagccacaggagattggagggtggagtagaaaaacacaaggagtcattgttagaggccccatagatgacaggcccaggtgctttagttgggcaggacctgggagtcagtgaggaactcgccccgagaacagagaaaaggtaggcaaggagaggagatgctgatggcatctggaaacaagtcttagagatggtctgcacccagagggaataaggggagacatccccaactggaatgtgtcctggagcagctgcctgggaagaagtcctcgagtttcctcaaggtgggggacagaggtcaaggatgaggccgagctaaatggaagggcgacagtgaggcaggtgggctttaaggctgtggattcgtcatgctggcggctgccagcagcactttcaggttccttggggcttgtaggggatggggacttgtcagtggaaagacgggagggatgatgtttttggacttcagtacgggtgtgatgtcccaggaagtgggtgtggctccccatcctgtatgaaa

SEQ ID NO: 110547 - DNA, 5023 bp, Homo sapiens
  Payload ID: 1680
  Gene Symbol: AMBRA1
  Gene Name: autophagy/beclin-1 regulator 1
  Uniprot ID: Q9C0C7
  ENST ID: ENST00000314845
  CDS Start-End: 361-3987
aggggattaatgaagagccaccagactatctttatggagaatctagattgggaagttaagctaagaatgtgcatttttgaaaaagtttttatggtagaagagaatgtatatcagaggaaagaatgtagagaagaaagcaacattgtccactgggaattgataagttctgcgtagaatttagagttataaggactatctcattggctcctaatgaatgctaaataacaaatggaaattgctatttccatgaggacaacttacaaggacctgtatggcctcattttagctgcttcagtgtgttggagctgttacttgctccttcatttcctgggcctggtgtgacagtggctactgagcgccatgaaggttgtcccagaaaagaatgctgtccggatactctgggggcgagaacggggtgctcgggccatgggagctcagcggcttctgcaggagctggtagaagataaaacccggtggatgaaatgggagggcaagagagtagaactgccggatagtccacgctctaccttcttattggccttcagcccagacaggactctcttagcctccacccatgtgaaccataatatctatattacggaggtgaagactggcaagtgtgttcattccctgattggacaccgccgtactccatggtgtgtcacttttcatcccaccatctcaggccttattgcttctggctgcctagatggggaggttaggatttgggatttacacggtggcagtgaaagctggttcacagatagcaacaatgccattgcctccctggctttccaccctacggctcagctcctgctgattgccactgccaatgagatccacttctgggactggagtcgacgggaaccctttgctgtggtgaagacagctagtgagatggaacgggtccgtctggtgagatttgatccacttggacactacttactcacagcaattgttaacccctctaatcaacagggtgatgacgaaccagagatccccatagatggaacagaattatcccactaccgtcagcgtgccctcctgcaatcacagccagttcgccggacgcctctcctccacaatttcctgcacatgctgtcctcccgctcttctggcatccagaccgagcccttccatcccccggagcaggcctcgtcaacgcagcaggaccagggcctcctgaaccggccgtctgccttcagtacagtccagagcagcactgccggcaacacgctccgcaacctcagtctgggtcctacccgccgctctttgggagggcctctgtctagccacccttctaggtatcaccgagaaatagctcctgggttgacaggatctgagtggacccggacagtactcagtctgaactcccgctctgaggcggaatccatgcccccgcccagaaccagtgcctcttcggtgagtttgctgtctgtgctgagacagcaggaaggtggctctcaggcatctgtgtacacttcagccacagaagggaggggttttccggcatcagggttggcaactgagtcagatggagggaatggctccagccaaaacaactcgggcagcattcgccatgagcttcagtgtgacctgagacgcttctttctggagtatgaccggcttcaggagctggatcagagcctgagtggggaagctccccagacccaacaggcccaggaaatgctcaacaataacattgaatctgagaggccaggcccttcccaccagcccaccccacacagcagtgagaacaactccaacctgtcccgtggccacctgaatcgctgtcgtgcttgccacaatctcctgaccttcaacaacgataccctgcgctgggaaagaaccacacctaactactcctctggcgaggctagttcctcttggcaggtccccagctcctttgagagtgtgccatcaagtggcagccagttgccacctctcgagcggactgagggccaaacgcccagctccagcaggctggagttgagcagctctgctagtccgcaggaggagaggactgtgggggtggcctttaaccaggagacaggccactgggaaagaatttacacccagtccagcagatctggaactgtgtcacaggaggccttacatcaggatatgcctgaggagagctctgaggaggattcactcaggaggaggctgctggaatcttccctcatttcattatcccgttatgatggagcaggatccagagagcacccaatttacccagacccagcgagattatctcctgctgcatactacgcccagaggatgatccagtatctctcacggagagacagtattcgccagcgctccatgcgctaccaacagaaccgtctccgttcttccacctcctcctcttcctcagacaaccagggtccatcagtagagggaaccgacttggaatttgaggactttgaggacaatggtgacagatccaggcaccgagctccacgcaatgcccggatgtctgcaccttcgcttggacgctttgtcccaaggcgtttcttgctgcctgagtacttgccttatgctgggatttttcatgaacgtggacagcctggcttggctactcactcttctgttaacagggtcctggcaggggcagtgatcggtgatggacagtctgctgtggccagtaacattgccaatactacctaccggctccagtggtgggacttcactaagtttgacctccctgaaatcagtaatgcttccgtgaatgtgctggtgcagaactgcaagatctacaatgatgccagctgtgacatttctgcagatggccagctcctggcagctttcatccccagcagccagaggggctttcctgatgaaggcatcctggcagtgtactccctggccccccataacctgggcgaaatgctctacaccaagcgatttggtcccaatgccatttcggtgagcctgtccccaatgggcagatatgtaatggtgggcttggcctcacgaaggatcctgctgcacccctccacagagcacatggtggcccaggtcttcaggctgcaacaggcccatggtggagagacctccatgaggagagttttcaacgtcctttatcccatgcctgccgaccagcggagacatgtcagtatcaactctgcccgttggctgcctgagccagggcttggcttggcctatggtactaacaaaggagacctggtgatctgccgaccagaggccttaaactctggtgttgagtactactgggaccagctgaacgagacggtcttcactgtccattccaacagcaggagcagcgagcggcctggaaccagcagagccacatggaggacagacagagacatggggctgatgaatgccattgggcttcagccccggaaccctgccacctcagtgacatctcagggcacccagactctggcccttcagctgcagaatgccgaaacacagactgagagggaggtgccggagccagggacagccgcctcaggtcctggtgaaggtgagggttcagagtatggtgccagtggagaagatgcgctcagcaggatccagaggctgatggcggagggcggcatgacagccgtggtgcagcgggagcagagcaccaccatggcctccatgggcggcttcggcaacaacatcatcgtcagccaccgcattcaccgcagctctcagacgggcactgaacctggtgccgcccacacctcctcaccccagccctccacctctcggggactgctcccagaggccgggcaactggcagagcgaggcctaagcccccggacagcttcctgggaccagcctggtacccctgggcgggagccaacccagccaaccctgccctcttcctcccctgtccccattcctgtttcccttcccagcgctgagggaccaaccctccactgcgagttgaccaataacaaccaccttctggatggtggcagcagcaggggggacgctgcaggccctaggggagaaccacggaacaggtagagacaaacgttgcactggtgcctcccctcgaaccgccaagcagaaaccggacctcacagctgactgggaactggacatgtggaagagctgctggctgcatcagggaacaggaggaggaagagggtcagggtggagaggaagatcagtcagtgggcacaagacagtcaaatgggcaaggcctgcctcggggaactagaaccttccaggatctggagcccgggagagccacactgtgggcttaatgtgaatagaggaacaagtgggtatctctgccaggcaccccactttctcctagtaacatgggctcaggggactcagccctggacagagagcctccagagagtgaacagtcttccagatctgggccaatcatcctggacagaggcccgcgaggcagctttgccctgtccacctgttgggtgggcagagccaccaggaacccagacaccacctccaactctgagccttccagagcttcagcctctcttcgtcgtcttaccccactgaaaccaacagggatcgggccaggctcccagattcttgaggacagggacttcggcatttactaatgggggactactgtggggtaagggggcgcctgcttgcctgatacaggatggggtcaagggacagtgggcaggtcctcactcaggagtggggggtgtaggctggccagcccccagggcttgtccaccagtcttctccccgcaaggccctcagagcagcgcctgtgggtgtcagtattacctgagcctaggccaaagctagcccaaggctggggaaggggaggagactccaggtcagaatgtgaggtctcagtctgtgatttaaggtgttgcatgtggactcttaactgtacgtgtagtttctagtggagaaatcaaggctctgatcattttgtttttagtatgaaaatgtgatttcctttctgtttgtaactcatcatagaaacattgtggtgggaggagaggggatagtctacagctaatgagggaaacaccaaagatcacatcattaaaatgatgacatgcccctc

SEQ ID NO: 110548 - DNA, 5351 bp, Homo sapiens
  Payload ID: 1680
  Gene Symbol: AMBRA1
  Gene Name: autophagy/beclin-1 regulator 1
  Uniprot ID: Q9C0C7
  ENST ID: ENST00000458649
  CDS Start-End: 420-4316
aaatgaagggcccttaatcataagcaatttcctagttacacgacctcagtgctcccagaaggggattaatgaagagccaccagactatctttatggagaatctagattgggaagttaagctaagaatgtgcatttttgaaaaagtttttatggtagaagagaatgtatatcagaggaaagaatgtagagaagaaagcaacattgtccactgggaattgataagttctgcgtagaatttagagttataaggactatctcattggctcctaatgaatgctaaataacaaatggaaattgctatttccatgaggacaacttacaaggacctgtatggcctcattttagctgcttcagtgtgttggagctgttacttgctccttcatttcctgggcctggtgtgacagtggctactgagcgccatgaaggttgtcccagaaaagaatgctgtccggatactctgggggcgagaacggggtgctcgggccatgggagctcagcggcttctgcaggagctggtagaagataaaacccggtggatgaaatgggagggcaagagagtagaactgccggatagtccacgctctaccttcttattggccttcagcccagacaggactctcttagcctccacccatgtgaaccataatatctatattacggaggtgaagactggcaagtgtgttcattccctgattggacaccgccgtactccatggtgtgtcacttttcatcccaccatctcaggccttattgcttctggctgcctagatggggaggttaggatttgggatttacacggtggcagtgaaagctggttcacagatagcaacaatgccattgcctccctggctttccaccctacggctcagctcctgctgattgccactgccaatgagatccacttctgggactggagtcgacgggaaccctttgctgtggtgaagacagctagtgagatggaacgggtccgtctggtgagatttgatccacttggacactacttactcacagcaattgttaacccctctaatcaacagggtgatgacgaaccagagatccccatagatggaacagaattatcccactaccgtcagcgtgccctcctgcaatcacagccagttcgccggacgcctctcctccacaatttcctgcacatgctgtcctcccgctcttctggcatccaggtgggagagcaaagcacagtgcaagattctgctaccccctcacccccaccgcctccccctcagccctccacggagcgccccaggacttccgcttacatcaggctccgacagcgggtcagttaccccacagctgagtgctgccagcaccttgggatcctgtgcctttgcagccgctgctctggcactcgagttccttccctcttgccacaccaggacagtgtcccccctgcttctgccagagctactaccccttccttttcttttgtacagaccgagcccttccatcccccggagcaggcctcgtcaacgcagcaggaccagggcctcctgaaccggccgtctgccttcagtacagtccagagcagcactgccggcaacacgctccgcaacctcagtctgggtcctacccgccgctctttgggagggcctctgtctagccacccttctaggtatcaccgagaaatagctcctgggttgacaggatctgagtggacccggacagtactcagtctgaactcccgctctgaggcggaatccatgcccccgcccagaaccagtgcctcttcggtgagtttgctgtctgtgctgagacagcaggaaggtggctctcaggcatctgtgtacacttcagccacagaagggaggggttttccggcatcagggttggcaactgagtcagatggagggaatggctccagccaaaacaactcgggcagcattcgccatgagcttcagtgtgacctgagacgcttctttctggagtatgaccggcttcaggagctggatcagagcctgagtggggaagctccccagacccaacaggcccaggaaatgctcaacaataacattgaatctgagaggccaggcccttcccaccagcccaccccacacagcagtgagaacaactccaacctgtcccgtggccacctgaatcgctgtcgtgcttgccacaatctcctgaccttcaacaacgataccctgcgctgggaaagaaccacacctaactactcctctggcgaggctagttcctcttggcaggtccccagctcctttgagagtgtgccatcaagtggcagccagttgccacctctcgagcggactgagggccaaacgcccagctccagcaggctggagttgagcagctctgctagtccgcaggaggagaggactgtgggggtggcctttaaccaggagacaggccactgggaaagaatttacacccagtccagcagatctggaactgtgtcacaggaggccttacatcaggatatgcctgaggagagctctgaggaggattcactcaggaggaggctgctggaatcttccctcatttcattatcccgttatgatggagcaggatccagagagcacccaatttacccagacccagcgagattatctcctgctgcatactacgcccagaggatgatccagtatctctcacggagagacagtattcgccagcgctccatgcgctaccaacagaaccgtctccgttcttccacctcctcctcttcctcagacaaccagggtccatcagtagagggaaccgacttggaatttgaggactttgaggacaatggtgacagatccaggcaccgagctccacgcaatgcccggatgtctgcaccttcgcttggacgctttgtcccaaggcgtttcttgctgcctgagtacttgccttatgctgggatttttcatgaacgtggacagcctggcttggctactcactcttctgttaacagggtcctggcaggggcagtgatcggtgatggacagtctgctgtggccagtaacattgccaatactacctaccggctccagtggtgggacttcactaagtttgacctccctgaaatcagtaatgcttccgtgaatgtgctggtgcagaactgcaagatctacaatgatgccagctgtgacatttctgcagatggccagctcctggcagctttcatccccagcagccagaggggctttcctgatgaaggcatcctggcagtgtactccctggccccccataacctgggcgaaatgctctacaccaagcgatttggtcccaatgccatttcggtgagcctgtccccaatgggcagatatgtaatggtgggcttggcctcacgaaggatcctgctgcacccctccacagagcacatggtggcccaggtcttcaggctgcaacaggcccatggtggagagacctccatgaggagagttttcaacgtcctttatcccatgcctgccgaccagcggagacatgtcagtatcaactctgcccgttggctgcctgagccagggcttggcttggcctatggtactaacaaaggagacctggtgatctgccgaccagaggccttaaactctggtgttgagtactactgggaccagctgaacgagacggtcttcactgtccattccaacagcaggagcagcgagcggcctggaaccagcagagccacatggaggacagacagagacatggggctgatgaatgccattgggcttcagccccggaaccctgccacctcagtgacatctcagggcacccagactctggcccttcagctgcagaatgccgaaacacagactgagagggaggtgccggagccagggacagccgcctcaggtcctggtgaaggtgagggttcagagtatggtgccagtggagaagatgcgctcagcaggatccagaggctgatggcggagggcggcatgacagccgtggtgcagcgggagcagagcaccaccatggcctccatgggcggcttcggcaacaacatcatcgtcagccaccgcattcaccgcagctctcagacgggcactgaacctggtgccgcccacacctcctcaccccagccctccacctctcggggactgctcccagaggccgggcaactggcagagcgaggcctaagcccccggacagcttcctgggaccagcctggtacccctgggcgggagccaacccagccaaccctgccctcttcctcccctgtccccattcctgtttcccttcccagcgctgagggaccaaccctccactgcgagttgaccaataacaaccaccttctggatggtggcagcagcaggggggacgctgcaggccctaggggagaaccacggaacaggtagagacaaacgttgcactggtgcctcccctcgaaccgccaagcagaaaccggacctcacagctgactgggaactggacatgtggaagagctgctggctgcatcagggaacaggaggaggaagagggtcagggtggagaggaagatcagtcagtgggcacaagacagtcaaatgggcaaggcctgcctcggggaactagaaccttccaggatctggagcccgggagagccacactgtgggcttaatgtgaatagaggaacaagtgggtatctctgccaggcaccccactttctcctagtaacatgggctcaggggactcagccctggacagagagcctccagagagtgaacagtcttccagatctgggccaatcatcctggacagaggcccgcgaggcagctttgccctgtccacctgttgggtgggcagagccaccaggaacccagacaccacctccaactctgagccttccagagcttcagcctctcttcgtcgtcttaccccactgaaaccaacagggatcgggccaggctcccagattcttgaggacagggacttcggcatttactaatgggggactactgtggggtaagggggcgcctgcttgcctgatacaggatggggtcaagggacagtgggcaggtcctcactcaggagtggggggtgtaggctggccagcccccagggcttgtccaccagtcttctccccgcaaggccctcagagcagcgcctgtgggtgtcagtattacctgagcctaggccaaagctagcccaaggctggggaaggggaggagactccaggtcagaatgtgaggtctcagtctgtgatttaaggtgttgcatgtggactcttaactgtacgtgtagtttctagtggagaaatcaaggctctgatcattttgtttttagtatgaaaatgtgatttcctttctgtttgtaactcatcatagaaacattgtggtgggaggagaggggatagtctacagctaatgagggaaacaccaaagatcacatcattaaaatgatgacatgcccct

SEQ ID NO: 110549 - DNA, 522 bp, Homo sapiens
  Payload ID: 1680
  Gene Symbol: AMBRA1
  Gene Name: autophagy/beclin-1 regulator 1
  ENST ID: ENST00000526606
  CDS Start-End: 451-522
gagctgtttttcggcgctcggctgtggttccttgaacgattgcttgggcgttcctcctttgatgtctggggcgttcttgtattcggtgatcttttgcgccgtcttcttgcttgatgtctcctgagcggcggcggcgccgggtcgagggctgagttgtccgcgaggccccgcgctcaagccgccttctcctgccggtcggtagaacggaccccttcctttattcctgtctcctctttctttttccctgtggctcagcccgttcgctggactgcaaaccgagctcccgtctgccttgcagtggagaagagaaagagaaaatgagtgagaaagatttccatgaggacaacttacaaggacctgtatggcctcattttagctgcttcagtgtgttggagctgttacttgctccttcatttcctgggcctggtgtgacagtggctactgagcgccatgaaggttgtcccagaaaagaatgctgtccggatactctgggggcgagaacggggtgctcgggccatggga

SEQ ID NO: 110550 - DNA, 5067 bp, Homo sapiens
  Payload ID: 1680
  Gene Symbol: AMBRA1
  Gene Name: autophagy/beclin-1 regulator 1
  Uniprot ID: Q9C0C7
  ENST ID: ENST00000534300
  CDS Start-End: 315-4031
tcttgcttgatgtctcctgagcggcggcggcgccgggtcgagggctgagttgtccgcgaggccccgcgctcaagccgccttctcctgccggtcggtagaacggaccccttcctttattcctgtctcctctttctttttccctgtggctcagcccgttcgctggactgcaaaccgagctcccgtctgccttgcagatttccatgaggacaacttacaaggacctgtatggcctcattttagctgcttcagtgtgttggagctgttacttgctccttcatttcctgggcctggtgtgacagtggctactgagcgccatgaaggttgtcccagaaaagaatgctgtccggatactctgggggcgagaacggggtgctcgggccatgggagctcagcggcttctgcaggagctggtagaagataaaacccggtggatgaaatgggagggcaagagagtagaactgccggatagtccacgctctaccttcttattggccttcagcccagacaggactctcttagcctccacccatgtgaaccataatatctatattacggaggtgaagactggcaagtgtgttcattccctgattggacaccgccgtactccatggtgtgtcacttttcatcccaccatctcaggccttattgcttctggctgcctagatggggaggttaggatttgggatttacacggtggcagtgaaagctggttcacagatagcaacaatgccattgcctccctggctttccaccctacggctcagctcctgctgattgccactgccaatgagatccacttctgggactggagtcgacgggaaccctttgctgtggtgaagacagctagtgagatggaacgggtccgtctggtgagatttgatccacttggacactacttactcacagcaattgttaacccctctaatcaacagggtgatgacgaaccagagatccccatagatggaacagaattatcccactaccgtcagcgtgccctcctgcaatcacagccagttcgccggacgcctctcctccacaatttcctgcacatgctgtcctcccgctcttctggcatccaggtgggagagcaaagcacagtgcaagattctgctaccccctcacccccaccgcctccccctcagccctccacggagcgccccaggacttccgcttacatcaggctccgacagcgggtcagttaccccacagctgagtgctgccagcaccttgggatcctgtgcctttgcagccgctgctctggcactcgagttccttccctcttgccacaccaggacagtgtcccccctgcttctgccagagctactaccccttccttttcttttgtacagaccgagcccttccatcccccggagcaggcctcgtcaacgcagcaggaccagggcctcctgaaccggccgtctgccttcagtacagtccagagcagcactgccggcaacacgctccgcaacctcagtctgggtcctacccgccgctctttgggagggcctctgtctagccacccttctaggtatcaccgagaaatagctcctgggttgacaggatctgagtggacccggacagtactcagtctgaactcccgctctgaggcggaatccatgcccccgcccagaaccagtgcctcttcggtgagtttgctgtctgtgctgagacagcaggaaggtggctctcaggcatctgtgtacacttcagccacagaagggaggggttttccggcatcagggttggcaactgagtcagatggagggaatggctccagccaaaacaactcgggcagcattcgccatgagcttcagtgtgacctgagacgcttctttctggagtatgaccggcttcaggagctggatcagagcctgagtggggaagctccccagacccaacaggcccaggaaatgctcaacaataacattgaatctgagaggccaggcccttcccaccagcccaccccacacagcagtgagaacaactccaacctgtcccgtggccacctgaatcgctgtcgtgcttgccacaatctcctgaccttcaacaacgataccctgcgctgggaaagaaccacacctaactactcctctggcgaggctagttcctcttggcaggtccccagctcctttgagagtgtgccatcaagtggcagccagttgccacctctcgagcggactgagggccaaacgcccagctccagcaggctggagttgagcagctctgctagtccgcaggaggagaggactgtgggggtggcctttaaccaggagacaggccactgggaaagaatttacacccagtccagcagatctggaactgtgtcacaggaggccttacatcaggatatgcctgaggagagctctgaggaggattcactcaggaggaggctgctggaatcttccctcatttcattatcccgttatgatggagcaggatccagagagcacccaatttacccagacccagcgagggacaatggtgacagatccaggcaccgagctccacgcaatgcccggatgtctgcaccttcgcttggacgctttgtcccaaggcgtttcttgctgcctgagtacttgccttatgctgggatttttcatgaacgtggacagcctggcttggctactcactcttctgttaacagggtcctggcaggggcagtgatcggtgatggacagtctgctgtggccagtaacattgccaatactacctaccggctccagtggtgggacttcactaagtttgacctccctgaaatcagtaatgcttccgtgaatgtgctggtgcagaactgcaagatctacaatgatgccagctgtgacatttctgcagatggccagctcctggcagctttcatccccagcagccagaggggctttcctgatgaaggcatcctggcagtgtactccctggccccccataacctgggcgaaatgctctacaccaagcgatttggtcccaatgccatttcggtgagcctgtccccaatgggcagatatgtaatggtgggcttggcctcacgaaggatcctgctgcacccctccacagagcacatggtggcccaggtcttcaggctgcaacaggcccatggtggagagacctccatgaggagagttttcaacgtcctttatcccatgcctgccgaccagcggagacatgtcagtatcaactctgcccgttggctgcctgagccagggcttggcttggcctatggtactaacaaaggagacctggtgatctgccgaccagaggccttaaactctggtgttgagtactactgggaccagctgaacgagacggtcttcactgtccattccaacagcaggagcagcgagcggcctggaaccagcagagccacatggaggacagacagagacatggggctgatgaatgccattgggcttcagccccggaaccctgccacctcagtgacatctcagggcacccagactctggcccttcagctgcagaatgccgaaacacagactgagagggaggtgccggagccagggacagccgcctcaggtcctggtgaaggtgagggttcagagtatggtgccagtggagaagatgcgctcagcaggatccagaggctgatggcggagggcggcatgacagccgtggtgcagcgggagcagagcaccaccatggcctccatgggcggcttcggcaacaacatcatcgtcagccaccgcattcaccgcagctctcagacgggcactgaacctggtgccgcccacacctcctcaccccagccctccacctctcggggactgctcccagaggccgggcaactggcagagcgaggcctaagcccccggacagcttcctgggaccagcctggtacccctgggcgggagccaacccagccaaccctgccctcttcctcccctgtccccattcctgtttcccttcccagcgctgagggaccaaccctccactgcgagttgaccaataacaaccaccttctggatggtggcagcagcaggggggacgctgcaggccctaggggagaaccacggaacaggtagagacaaacgttgcactggtgcctcccctcgaaccgccaagcagaaaccggacctcacagctgactgggaactggacatgtggaagagctgctggctgcatcagggaacaggaggaggaagagggtcagggtggagaggaagatcagtcagtgggcacaagacagtcaaatgggcaaggcctgcctcggggaactagaaccttccaggatctggagcccgggagagccacactgtgggcttaatgtgaatagaggaacaagtgggtatctctgccaggcaccccactttctcctagtaacatgggctcaggggactcagccctggacagagagcctccagagagtgaacagtcttccagatctgggccaatcatcctggacagaggcccgcgaggcagctttgccctgtccacctgttgggtgggcagagccaccaggaacccagacaccacctccaactctgagccttccagagcttcagcctctcttcgtcgtcttaccccactgaaaccaacagggatcgggccaggctcccagattcttgaggacagggacttcggcatttactaatgggggactactgtggggtaagggggcgcctgcttgcctgatacaggatggggtcaagggacagtgggcaggtcctcactcaggagtggggggtgtaggctggccagcccccagggcttgtccaccagtcttctccccgcaaggccctcagagcagcgcctgtgggtgtcagtattacctgagcctaggccaaagctagcccaaggctggggaaggggaggagactccaggtcagaatgtgaggtctcagtctgtgatttaaggtgttgcatgtggactcttaactgtacgtgtagtttctagtggagaaatcaaggctctgatcattttgtttttagtatgaaaatgtgatttcctttctgtttgtaactcatcatagaaacattgtggtgggaggagaggggatagtctacagctaatgagggaaacaccaaagatcacatcattaaaatgatgacatgcccctc

SEQ ID NO: 110551 - DNA, 4817 bp, Homo sapiens
  Payload ID: 1680
  Gene Symbol: AMBRA1
  Gene Name: autophagy/beclin-1 regulator 1
  ENST ID: ENST00000533727
  CDS Start-End: 242-3781
gccgccttctcctgccggtcggtagaacggaccccttcctttattcctgtctcctctttctttttccctgtggctcagcccgttcgctggactgcaaaccgagctcccgtctgccttgcagatttccatgaggacaacttacaaggacctgtatggcctcattttagctgcttcagtgtgttggagctgttacttgctccttcatttcctgggcctggtgtgacagtggctactgagcgccatgaaggttgtcccagaaaagaatgctgtccggatactctgggggcgagaacggggtgctcgggccatgggagctcagcggcttctgcaggagctggtagaagataaaacccggtggatgaaatgggagggcaagagagtagaactgccggatagtccacgctctaccttcttattggccttcagcccagacaggactctcttagcctccacccatgtgaaccataatatctatattacggaggtgaagactggcaagtgtgttcattccctgattggacaccgccgtactccatggtgtgtcacttttcatcccaccatctcaggccttattgcttctggctgcctagatggggaggttaggatttgggatttacacggtggcagtgaaagctggttcacagatagcaacaatgccattgcctccctggctttccaccctacggctcagctcctgctgattgccactgccaatgagatccacttctgggactggagtcgacgggaaccctttgctgtggtgaagacagctagtgagatggaacgggtccgtctggtgagatttgatccacttggacactacttactcacagcaattgttaacccctctaatcaacagggtgatgacgaaccagagatccccatagatggaacagaattatcccactaccgtcagcgtgccctcctgcaatcacagccagttcgccggacgcctctcctccacaatttcctgcacatgctgtcctcccgctcttctggcatccagaccgagcccttccatcccccggagcaggcctcgtcaacgcagcaggaccagggcctcctgaaccggccgtctgccttcagtacagtccagagcagcactgccggcaacacgctccgcaacctcagtctgggtcctacccgccgctctttgggagggcctctgtctagccacccttctaggtatcaccgagaaatagctcctgggttgacaggatctgagtggacccggacagtactcagtctgaactcccgctctgaggcggaatccatgcccccgcccagaaccagtgcctcttcggtgagtttgctgtctgtgctgagacagcaggaaggtggctctcaggcatctgtgtacacttcagccacagaagggaggggttttccggcatcagggttggcaactgagtcagatggagggaatggctccagccaaaacaactcgggcagcattcgccatgagcttcagtgtgacctgagacgcttctttctggagtatgaccggcttcaggagctggatcagagcctgagtggggaagctccccagacccaacaggcccaggaaatgctcaacaataacattgaatctgagaggccaggcccttcccaccagcccaccccacacagcagtgagaacaactccaacctgtcccgtggccacctgaatcgctgtcgtgcttgccacaatctcctgaccttcaacaacgataccctgcgctgggaaagaaccacacctaactactcctctggcgaggctagttcctcttggcaggtccccagctcctttgagagtgtgccatcaagtggcagccagttgccacctctcgagcggactgagggccaaacgcccagctccagcaggctggagttgagcagctctgctagtccgcaggaggagaggactgtgggggtggcctttaaccaggagacaggccactgggaaagaatttacacccagtccagcagatctggaactgtgtcacaggaggccttacatcaggatatgcctgaggagagctctgaggaggattcactcaggagattatctcctgctgcatactacgcccagaggatgatccagtatctctcacggagagacagtattcgccagcgctccatgcgctaccaacagaaccgtctccgttcttccacctcctcctcttcctcagacaaccagggtccatcagtagagggaaccgacttggaatttgaggactttgaggacaatggtgacagatccaggcaccgagctccacgcaatgcccggatgtctgcaccttcgcttggacgctttgtcccaaggcgtttcttgctgcctgagtacttgccttatgctgggatttttcatgaacgtggacagcctggcttggctactcactcttctgttaacagggtcctggcaggggcagtgatcggtgatggacagtctgctgtggccagtaacattgccaatactacctaccggctccagtggtgggacttcactaagtttgacctccctgaaatcagtaatgcttccgtgaatgtgctggtgcagaactgcaagatctacaatgatgccagctgtgacatttctgcagatggccagctcctggcagctttcatccccagcagccagaggggctttcctgatgaaggcatcctggcagtgtactccctggccccccataacctgggcgaaatgctctacaccaagcgatttggtcccaatgccatttcggtgagcctgtccccaatgggcagatatgtaatggtgggcttggcctcacgaaggatcctgctgcacccctccacagagcacatggtggcccaggtcttcaggctgcaacaggcccatggtggagagacctccatgaggagagttttcaacgtcctttatcccatgcctgccgaccagcggagacatgtcagtatcaactctgcccgttggctgcctgagccagggcttggcttggcctatggtactaacaaaggagacctggtgatctgccgaccagaggccttaaactctggtgttgagtactactgggaccagctgaacgagacggtcttcactgtccattccaacagcaggagcagcgagcggcctggaaccagcagagccacatggaggacagacagagacatggggctgatgaatgccattgggcttcagccccggaaccctgccacctcagtgacatctcagggcacccagactctggcccttcagctgcagaatgccgaaacacagactgagagggaggtgccggagccagggacagccgcctcaggtcctggtgaaggtgagggttcagagtatggtgccagtggagaagatgcgctcagcaggatccagaggctgatggcggagggcggcatgacagccgtggtgcagcgggagcagagcaccaccatggcctccatgggcggcttcggcaacaacatcatcgtcagccaccgcattcaccgcagctctcagacgggcactgaacctggtgccgcccacacctcctcaccccagccctccacctctcggggactgctcccagaggccgggcaactggcagagcgaggcctaagcccccggacagcttcctgggaccagcctggtacccctgggcgggagccaacccagccaaccctgccctcttcctcccctgtccccattcctgtttcccttcccagcgctgagggaccaaccctccactgcgagttgaccaataacaaccaccttctggatggtggcagcagcaggggggacgctgcaggccctaggggagaaccacggaacaggtagagacaaacgttgcactggtgcctcccctcgaaccgccaagcagaaaccggacctcacagctgactgggaactggacatgtggaagagctgctggctgcatcagggaacaggaggaggaagagggtcagggtggagaggaagatcagtcagtgggcacaagacagtcaaatgggcaaggcctgcctcggggaactagaaccttccaggatctggagcccgggagagccacactgtgggcttaatgtgaatagaggaacaagtgggtatctctgccaggcaccccactttctcctagtaacatgggctcaggggactcagccctggacagagagcctccagagagtgaacagtcttccagatctgggccaatcatcctggacagaggcccgcgaggcagctttgccctgtccacctgttgggtgggcagagccaccaggaacccagacaccacctccaactctgagccttccagagcttcagcctctcttcgtcgtcttaccccactgaaaccaacagggatcgggccaggctcccagattcttgaggacagggacttcggcatttactaatgggggactactgtggggtaagggggcgcctgcttgcctgatacaggatggggtcaagggacagtgggcaggtcctcactcaggagtggggggtgtaggctggccagcccccagggcttgtccaccagtcttctccccgcaaggccctcagagcagcgcctgtgggtgtcagtattacctgagcctaggccaaagctagcccaaggctggggaaggggaggagactccaggtcagaatgtgaggtctcagtctgtgatttaaggtgttgcatgtggactcttaactgtacgtgtagtttctagtggagaaatcaaggctctgatcattttgtttttagtatgaaaatgtgatttcctttctgtttgtaactcatcatagaaacattgtggtgggaggagaggggatagtctacagctaatgagggaaacaccaaagatcacatcattaaaatgatgacatgcccctc

SEQ ID NO: 110552 - DNA, 4102 bp, Homo sapiens
  Payload ID: 1680
  Gene Symbol: AMBRA1
  Gene Name: autophagy/beclin-1 regulator 1
  Uniprot ID: Q9C0C7
  ENST ID: ENST00000528950
  CDS Start-End: 293-4102
attcggtgatcttttgcgccgtcttcttgcttgatgtctcctgagcggcggcggcgccgggtcgagggctgagttgtccgcgaggccccgcgctcaagccgccttctcctgccggtcggtagaacggaccccttcctttattcctgtctcctctttctttttccctgtggctcagcccgttcgctggactgcaaaccgagctcccgtctgccttgcagctgcttcagtgtgttggagctgttacttgctccttcatttcctgggcctggtgtgacagtggctactgagcgccatgaaggttgtcccagaaaagaatgctgtccggatactctgggggcgagaacggggtgctcgggccatgggagctcagcggcttctgcaggagctggtagaagataaaacccggtggatgaaatgggagggcaagagagtagaactgccggatagtccacgctctaccttcttattggccttcagcccagacaggactctcttagcctccacccatgtgaaccataatatctatattacggaggtgaagactggcaagtgtgttcattccctgattggacaccgccgtactccatggtgtgtcacttttcatcccaccatctcaggccttattgcttctggctgcctagatggggaggttaggatttgggatttacacggtggcagtgaaagctggttcacagatagcaacaatgccattgcctccctggctttccaccctacggctcagctcctgctgattgccactgccaatgagatccacttctgggactggagtcgacgggaaccctttgctgtggtgaagacagctagtgagatggaacgggtccgtctggtgagatttgatccacttggacactacttactcacagcaattgttaacccctctaatcaacagggtgatgacgaaccagagatccccatagatggaacagaattatcccactaccgtcagcgtgccctcctgcaatcacagccagttcgccggacgcctctcctccacaatttcctgcacatgctgtcctcccgctcttctggcatccaggtgggagagcaaagcacagtgcaagattctgctaccccctcacccccaccgcctccccctcagccctccacggagcgccccaggacttccgcttacatcaggctccgacagcgggtcagttaccccacagctgagtgctgccagcaccttgggatcctgtgcctttgcagccgctgctctggcactcgagttccttccctcttgccacaccaggacagtgtcccccctgcttctgccagagctactaccccttccttttcttttgtacagaccgagcccttccatcccccggagcaggcctcgtcaacgcagcaggaccagggcctcctgaaccggccgtctgccttcagtacagtccagagcagcactgccggcaacacgctccgcaacctcagtctgggtcctacccgccgctctttgggagggcctctgtctagccacccttctaggtatcaccgagaaatagctcctgggttgacaggatctgagtggacccggacagtactcagtctgaactcccgctctgaggcggaatccatgcccccgcccagaaccagtgcctcttcggtgagtttgctgtctgtgctgagacagcaggaaggtggctctcaggcatctgtgtacacttcagccacagaagggaggggttttccggcatcagggttggcaactgagtcagatggagggaatggctccagccaaaacaactcgggcagcattcgccatgagcttcagtgtgacctgagacgcttctttctggagtatgaccggcttcaggagctggatcagagcctgagtggggaagctccccagacccaacaggcccaggaaatgctcaacaataacattgaatctgagaggccaggcccttcccaccagcccaccccacacagcagtgagaacaactccaacctgtcccgtggccacctgaatcgctgtcgtgcttgccacaatctcctgaccttcaacaacgataccctgcgctgggaaagaaccacacctaactactcctctggcgaggctagttcctcttggcaggtccccagctcctttgagagtgtgccatcaagtggcagccagttgccacctctcgagcggactgagggccaaacgcccagctccagcaggctggagttgagcagctctgctagtccgcaggaggagaggactgtgggggtggcctttaaccaggagacaggccactgggaaagaatttacacccagtccagcagatctggaactgtgtcacaggaggccttacatcaggatatgcctgaggagagctctgaggaggattcactcaggagattatctcctgctgcatactacgcccagaggatgatccagtatctctcacggagagacagtattcgccagcgctccatgcgctaccaacagaaccgtctccgttcttccacctcctcctcttcctcagacaaccagggtccatcagtagagggaaccgacttggaatttgaggactttgaggacaatggtgacagatccaggcaccgagctccacgcaatgcccggatgtctgcaccttcgcttggacgctttgtcccaaggcgtttcttgctgcctgagtacttgccttatgctgggatttttcatgaacgtggacagcctggcttggctactcactcttctgttaacagggtcctggcaggggcagtgatcggtgatggacagtctgctgtggccagtaacattgccaatactacctaccggctccagtggtgggacttcactaagtttgacctccctgaaatcagtaatgcttccgtgaatgtgctggtgcagaactgcaagatctacaatgatgccagctgtgacatttctgcagatggccagctcctggcagctttcatccccagcagccagaggggctttcctgatgaaggcatcctggcagtgtactccctggccccccataacctgggcgaaatgctctacaccaagcgatttggtcccaatgccatttcggtgagcctgtccccaatgggcagatatgtaatggtgggcttggcctcacgaaggatcctgctgcacccctccacagagcacatggtggcccaggtcttcaggctgcaacaggcccatggtggagagacctccatgaggagagttttcaacgtcctttatcccatgcctgccgaccagcggagacatgtcagtatcaactctgcccgttggctgcctgagccagggcttggcttggcctatggtactaacaaaggagacctggtgatctgccgaccagaggccttaaactctggtgttgagtactactgggaccagctgaacgagacggtcttcactgtccattccaacagcaggagcagcgagcggcctggaaccagcagagccacatggaggacagacagagacatggggctgatgaatgccattgggcttcagccccggaaccctgccacctcagtgacatctcagggcacccagactctggcccttcagctgcagaatgccgaaacacagactgagagggaggtgccggagccagggacagccgcctcaggtcctggtgaaggtgagggttcagagtatggtgccagtggagaagatgcgctcagcaggatccagaggctgatggcggagggcggcatgacagccgtggtgcagcgggagcagagcaccaccatggcctccatgggcggcttcggcaacaacatcatcgtcagccaccgcattcaccgcagctctcagacgggcactgaacctggtgccgcccacacctcctcaccccagccctccacctctcggggactgctcccagaggccgggcaactggcagagcgaggcctaagcccccggacagcttcctgggaccagcctggtacccctgggcgggagccaacccagccaaccctgccctcttcctcccctgtccccattcctgtttcccttcccagcgctgagggaccaaccctccactgcgagttgaccaataacaaccaccttctggatggtggcagcagcaggggggacgctgcaggccctaggggagaaccacggaacaggtag

SEQ ID NO: 110553 - DNA, 837 bp, Homo sapiens
  Payload ID: 1680
  Gene Symbol: AMBRA1
  Gene Name: autophagy/beclin-1 regulator 1
  ENST ID: ENST00000526545
  CDS Start-End: 1-771
aactctgcccgttggctgcctgagccagggcttggcttggcctatggtactaacaaaggagacctggtgatctgccgaccagaaaccagcagagccacatggaggacagacagagacatggggctgatgaatgccattgggcttcagccccggaaccctgccacctcagtgacatctcagggcacccagactctggcccttcagctgcagaatgccgaaacacagactgagagggaggtgccggagccagggacagccgcctcaggtcctggtgaaggtgagggttcagagtatggtgccagtggagaagatgcgctcagcaggatccagaggctgatggcggagggcggcatgacagccgtggtgcagcgggagcagagcaccaccatggcctccatgggcggcttcggcaacaacatcatcgtcagccaccgcattcaccgcagctctcagacgggcactgaacctggtgccgcccacacctcctcaccccagccctccacctctcggggactgctcccagaggccgggcaactggcagagcgaggcctaagcccccggacagcttcctgggaccagcctggtacccctgggcgggagccaacccagccaaccctgccctcttcctcccctgtccccattcctgtttcccttcccagcgctgagggaccaaccctccactgcgagttgaccaataacaaccaccttctggatggtggcagcagcaggggggacgctgcaggccctaggggagaaccacggaacaggtagagacaaacgttgcactggtgcctcccctcgaaccgccaagcagaaaccggacctcacagctgactg

SEQ ID NO: 110554 - DNA, 6982 bp, Homo sapiens
  Payload ID: 1681
  Gene Symbol: AVL9
  Gene Name: AVL9 homolog (S. cerevisiase)
  Uniprot ID: Q8NBF6
  ENST ID: ENST00000318709
  CDS Start-End: 222-2168
gtgtcaggtgacagcccggaagctgcggaagcggatgagggaagggcggccgtggccctgggggcggcgggagctgctttgcctccaccgatctccctgtgcggccctcatgtgctgtgctcgctgacacccgaagtccgcggctttccgcacacggtggggtcgtcagacccgctgcccttggcggtcgaagtcgtcgtgcgggcccgcggcggccgcccatggagaaggccaggagaggcggggatggcgtcccccgggggcccgtactgcacatcgtggtggtcggatttcaccacaagaagggctgccaggttgaattctcttacccgcccctgattccaggagatggacatgacagccacactttacctgaagaatggaagtatttgcccttccttgccttaccagatggcgcacacaactaccaggaagatactgtgttttttcacttgccacccagaaatggaaatggagccacagtatttggtatctcttgctatcgacaaattgaagccaaggcactgaaagtaaggcaagcagatatcaccagagagactgttcagaaaagtgtctgtgttctaagcaagctgcctctgtatggtttacttcaagcaaaacttcaactcattacacatgcatattttgaagagaaggatttttcccaaatttctattctaaaggagctttatgaacatatgaatagttccttgggaggtgcttcattagaaggatcccaagtatatcttggtctgtcacctcgagatcttgtccttcattttcgacacaaggtcttaatcctatttaagctaattcttcttgaaaaaaaggttcttttttatatttctccagtgaataaattggtgggtgcactgatgactgtgttatccctttttccaggcatgattgaacatggtctcagtgactgttctcagtatagaccccggaaaagtatgtctgaagatggtgggcttcaggaaagtaacccatgtgcagatgattttgtttctgcatccactgctgatgtttcacataccaacttgggaactatcaggaaagtcatggcaggaaaccatggagaagatgctgccatgaagactgaggagcctttgttccaagtggaagacagcagcaaagggcaggaacccaatgataccaatcaatatttgaaacctccatctcgcccatctccagattcttcagaaagtgactgggaaactttggatcctagtgtcttagaggaccccaacttgaaagaaagggaacagctgggatcagaccagacaaatttgtttccaaaggactctgtcccctcagagagtcttccaattactgtacaacctcaagctaatacgggacaggtagtcctgataccagggctcatttcgggtttggaagaggatcagtatggcatgcccctggccatcttcacaaagggatatctgtgtttgccttacatggcattgcagcagcatcatcttctctccgatgtcaccgttcgggggtttgttgctggagctactaacatcctttttcgacaacagaaacacctcagtgatgccattgtggaagtagaagaagctctgatccagatccatgatccagaactcaggaagctgcttaacccaaccactgcagacctaaggttcgcagactacctagtgaggcacgtgactgagaatcgggatgacgtcttcctagatggcacgggctgggagggaggtgacgaatggatccgggcccagtttgcggtctacattcatgccctgctggctgccacactgcaattagacaatgaaaagatattatcggactatgggacaacttttgttacagcatggaagaatactcacaactacagggtgtggaacagcaacaagcatccagcacttgcagaaataaatccaaaccatccatttcaaggccaatactcagtatcagacatgaagttaaggttctcacattctgttcagaatagtgaacgtggcaaaaaaattggaaacgtcatggtcacaactagccggaatgttgtacaaacaggaaaagctgttggccagtcagttggaggagctttttccagtgcaaagacagctatgtcttcatggctttccactttcaccacttccacctcccaaagtctcactgagccaccagatgagaagccttgagcaaggcgtcagaggctgctattgctttctgaggtttaagtgtcccctgtctgtctgctgctcccaggctgttactagccacagatccacagcaggggaccatatgtcgaactgtttacatggatgttgctctaagtgaatgtttcgggatgccgaaatgatgaaatcacagccatagcagggatggctttccaggttggggtttcaattgactacttttatttcagtctgagcctgattaaaacatacagtgaaccttctaatgaattttgagttctgatattgtacattggtttactttagaagagtttttacttatgtaaattttgttctgttttggtgtttgaatatctagatggtcactgtaatttatacttgctaaaattaatttatattaccattttctctaaagttggccttaaaacgtgcttataaagtgaaggggtcatacagttgggccttcattattttgctgaattatgtgatgatttttttgctttctacccacaaaacatttattaattcacttcctcccagaaacatgaaagttagaggtggtagttctgaggattgggtgttttgttttacgtttttagtttgttctttccacatccttaaaaacttggtttcagacatcaaggagtatcactgtgctttcctcctctttataactgtgcaggtgggtgtgcagagaaatagcagagtgatggttcgatgatactgaagcagtttaacatgaatgtgtctgtagggcaatactttcaaagaagacctatgtgtttatttttcaaccgcagtcatgttgcagtcttacaagcactttttttttattccagagtttgtgccatctgtttctctttttttttttggggggggggggggggcggggtctcactctatcgcccaggctggagtgcagtggtgccatctcggctcactgcaacctccatctcccgggttcaagcaattcttgtacctcagcctcccaagtagctgggattatggacatgcgccaccatgcccagctaattattgtatttttagtagagacggggttttgccatgttggccaggctggtcttgatctcctggcctcaagtgatctgcccgcctcagcctctcaaagtgctgggactacaggcatgagccactgcgcctggcctgtttcttttttaaacagttttctattgggtgtttgcagacctacagcttttctcgtagtcttattcataaagcttttcaaagcacttagtcttctacttccctaactgaaagtcctcctataatcaatccctacccccttctagaagtatcttaaaagaaaagcaaggtgattgtaagtattaaatagaaatctcatcttagtttatattcagcaaagtaagaggcaagagaagaaaactgcagccttgacatctgtcatctgagaaaggatatctggtttcatgttaggcacatacatgcatgtgtgtgccatctactgatgatttgtacacagctggacctcgtgtgtttgccatgctcagctctcatttgcttttcaaggatacctgggatggctgttctcagagagtacttacggggaacagactgccttttagtaacaagggatacttgggaaatacattgtgagtatgatctatcccagattgctggggaaataaaggagggccctgattatatttggtttattcctcactaaatgtttaagaagtaaatgctcccaaggcatttgaaatgaacatagaaacataatctaaatgtctctaaattttccactttgtgttttctaaacacaaattgtattactcatttgagcataactcaagaattcagcgatgataaattgaagggctgaatgtgagaactccattaattccacttcttccaagaaagttaacctcaggaaatgctgtttgaagagaagaaagtagtaccaaacaaaaaccttaaacagtacttgaatcttttttgcgctgagactataaagaattcattctaacatcttgtttcataagggccacatcattcgttggagcatgatagtgtgatttgtgtacaattgttacctctcagctgctgaagttcacacttcaaggatctaggagctctgtgaggggtcgtccagcaagatgctgatttgtctttcagttggtatggtttctgtgatcggggtaaactcccgtctcccactattcaaaagcagcccaactcatgctttggaatccactgaaataaaaatagttacatgaagtttaactttgctttaatatcacttgttcctcattgaatatacactttgatcggactttctattaacatttctagctaagagtttgactcttagtggtcactttactgactttccaacataaaacaagtatctcagaagatacaactttcatcatagaaatggtcaaaagaccatagctatatttccttcaggttctgggaggtggagtttttcaaggaacactggctgttgtattgttggcaggggccccaaggcagctcgcacaatcaaaggcaggaagcctcacccctggtcctgtgaccccccccccccacacacacacatacttcaggcttggattctaggctccaagtggccagcatagaagcagcagcctctctccaaaccctggctctgtgagccataggaaccagcactaggtcatcttctgacatagccctggtgaaggtgtgtgtgtgttggtggccacacttgctaaggcttttgtgtctaagaattgagtatttgtacctaggtgtgagggaaccagggtcagccagcctttttcagatggcgccaggcacacacactacatcaatggcttgctggtggcttcaccactatccaggtgacttaaaagagtgtttggaaaatgtccctggtatacttcaattcctactagacattgtaatgacaatggtgtaggtaaggaagagagagttaaaactaccagttgtggaatagaaatagttgcatgtccaaagaaggcttagaatgattgtgcatatgcagttggctcacataaccagcatgaacagtctctccccaaatccattagtgattcactaccccccgccaagcacagccctaaaacaattctcgtccactttcctgttaagaaacacagcagcaatatactttggcagcaaaccagagcatatgatgtaacttgctcaaccttatcttcctttccaaattctatactaagcatctgatgttttttagaataatttcctttggaaagccaacgagaaaacaaattaggaagagagagaagtgagaaattgttgcatggctgaggaacaagatgcttaaaatctgaatggaagtattttgagagcagtatttcatgtgctaagggttataagaattcttttagaaagggattagaattttactctgctagttacaagttttaaagtcacgctacggcattatcaccctggcaggtaggttttgttattgttttacattttgtgaaaaaaagttttgtagaagttacagctagtggtcttttccctccagagccagtgatgagtgtgggagcacttcagctctgtaaggggccagcgttctgacctttaaccacatgaactaacctgcgtcagcagttgcagaaagtagcctgttaggacagcagctgctaagcgttgcctggtattttagtggggagaaggctgggactcttcatggcatcaacacttgcatgctctgaatctttgatcagagatgaggtgccatttttggcatttccaccccgtctcgtggtagcctttaaaagtggtagaagatgctgccctaattccccgaggatgattgtcattccatgcagcataatgtgccgtgaggagttttctcattccagttctttggacttcgtaacattggaattgtttttccataatttccggcattccataaatatttgtcaaggacaaagaaaaggaatgtggatgtttattcttttcatatgaatgactttgtacacatgacttcctgctttcattatgaaggaggggaaactagttcccttgtatggtaactccaaagttaaaaaattgtgcatgtctgaggggttgaatatattttgtaaaactctaaatacatttgtatttctgtgctgttctaaagtttacctttttacttatatgaaagataactatatatttaaatcatgtaagtggaacacagtgtagggggtttttccaatcttatttttcatcaggttctcacacccacgtagtatgctgctcaaattttttcgtgtgtgcaaatgtgaacatttgaacatttcagttaggtactgagccagaaaaggtaattgaagttttcagaaagcttctgtgcttagaaaatattttgttgttttcttaaaatattagtattttgtagctggaagaataagatcaaggcttacatgtttcaggccacttggtcactggttcctgaatttagaaaacattggattaatgagttggtgaaggcatttagtggttacaaaaacagtttaaatatttatgattaaaggcttttcacaaacctttttaaagaaaatttagctgagaaaacttaaaaagttttctaaggaagtttaactgtggcacatgttttgatcagaaaggtagttctctttgctctggtagttttaaagtttgtactagttctttatttctgttgtttttttaaattgttaaaattataaatcacgtctaatcatactgaattgtaaaacttgaattgtatctttattttaagcataaatgagaataaaatgatcctgttcaccctgcctacagttgga

SEQ ID NO: 110555 - DNA, 4336 bp, Homo sapiens
  Payload ID: 1681
  Gene Symbol: AVL9
  Gene Name: AVL9 homolog (S. cerevisiase)
  ENST ID: ENST00000409301
  CDS Start-End: 185-2077
agggaagggcggccgtggccctgggggcggcgggagctgctttgcctccaccgatctccctgtgcggccctcatgtgctgtgctcgctgacacccgaagtccgcggctttccgcacacggtggggtcgtcagacccgctgcccttggcggtcgaagtcgtcgtgcgggcccgcggcggccgcccatggagaaggccaggagaggcggggatggcgtcccccgggggcccgtactgcacatcgtggtggtcggatttcaccacaagaagggctgccaggttgaattctcttacccgcccctgattccaggagatggacatgacagccacactttacctgaagaatggaagtatttgcccttccttgccttaccagatggcgcacacaactaccaggaagatactgtgttttttcacttgccacccagaaatggaaatggagccacagtatttggtatctcttgctatcgacaaattgaagccaaggcactgaaagtaaggcaagcagatatcaccagagagactgttcagaaaagtgtctgtgttctaagcaagctgcctctgtatggtttacttcaagcaaaacttcaactcattacacatgcatattttgaagagaaggatttttcccaaatttctattctaaaggagctttatgaacatatgaatagttccttgggaggtgcttcattagaaggatcccaagtatatcttggtctgtcacctcgagatcttgtccttcattttcgacacaaggtcttaatcctatttaagctaattcttcttgaaaaaaaggttcttttttatatttctccagtgaataaattggtgggtgcactgatgactgtgttatccctttttccaggcatgattgaacatggtctcagtgactgttctcagtatagaccccggaaaagtatgtctgaagatggtgggcttcaggaaagtaacccatgtgcagatgattttgtttctgcatccactgctgatgtttcacataccaacttgggaactatcaggaaagtcatggcaggaaaccatggagaagatgctgccatgaagactgaggagcctttgttccaagtggaagacagcagcaaagggcaggaacccaatgataccaatcaatatttgaaacctccatctcgcccatctccagattcttcagaaagtgactgggaaactttggatcctagtgtcttagaggaccccaacttgaaagaaagggaacagctgggatcagaccagacaaatttgtttccaaaggactctgtcccctcagagagtcttccaattactgtacaacctcaagctaatacgggacaggtagtcctgataccagggctcatttcgggtttggaagaggatcagtatggcatgcccctggccatcttcacaaagggatatctgtgtttgccttacatggcattgcagcagcatcatcttctctccgatgtcaccgttcgggggtttgttgctggagctactaacatcctttttcgacaacagaaacacctcagtgatgccattgtggaagtagaagaagctctgatccagatccatgatccagaactcaggaagctgcttaacccaaccactgcagacctaaggttcgcagactacctagtgaggcacgtgactgagaatcgggatgacgtcttcctagatggcacgggctgggagggaggtgacgaatggatccgggcccagtttgcggtctacattcatgccctgctggctgccacactgcaattagacaatgaaaagatattatcggactatgggacaacttttgttacagcatggaagaatactcacaactacagggtgtggaacagcaacaagcatccagcacttgcagaaataaatccaaattctgttcagaatagtgaacgtggcaaaaaaattggaaacgtcatggtcacaactagccggaatgttgtacaaacaggaaaagctgttggccagtcagttggaggagctttttccagtgcaaagacagctatgtcttcatggctttccactttcaccacttccacctcccaaagtctcactgagccaccagatgagaagccttgagcaaggcgtcagaggctgctattgctttctgaggtttaagtgtcccctgtctgtctgctgctcccaggctgttactagccacagatccacagcaggggaccatatgtcgaactgtttacatggatgttgctctaagtgaatgtttcgggatgccgaaatgatgaaatcacagccatagcagggatggctttccaggttggggtttcaattgactacttttatttcagtctgagcctgattaaaacatacagtgaaccttctaatgaattttgagttctgatattgtacattggtttactttagaagagtttttacttatgtaaattttgttctgttttggtgtttgaatatctagatggtcactgtaatttatacttgctaaaattaatttatattaccattttctctaaagttggccttaaaacgtgcttataaagtgaaggggtcatacagttgggccttcattattttgctgaattatgtgatgatttttttgctttctacccacaaaacatttattaattcacttcctcccagaaacatgaaagttagaggtggtagttctgaggattgggtgttttgttttacgtttttagtttgttctttccacatccttaaaaacttggtttcagacatcaaggagtatcactgtgctttcctcctctttataactgtgcaggtgggtgtgcagagaaatagcagagtgatggttcgatgatactgaagcagtttaacatgaatgtgtctgtagggcaatactttcaaagaagacctatgtgtttatttttcaaccgcagtcatgttgcagtcttacaagcactttttttttattccagagtttgtgccatctgtttctctttttttttttggggggggggggggggcggggtctcactctatcgcccaggctggagtgcagtggtgccatctcggctcactgcaacctccatctcccgggttcaagcaattcttgtacctcagcctcccaagtagctgggattatggacatgcgccaccatgcccagctaattattgtatttttagtagagacggggttttgccatgttggccaggctggtcttgatctcctggcctcaagtgatctgcccgcctcagcctctcaaagtgctgggactacaggcatgagccactgcgcctggcctgtttcttttttaaacagttttctattgggtgtttgcagacctacagcttttctcgtagtcttattcataaagcttttcaaagcacttagtcttctacttccctaactgaaagtcctcctataatcaatccctacccccttctagaagtatcttaaaagaaaagcaaggtgattgtaagtattaaatagaaatctcatcttagtttatattcagcaaagtaagaggcaagagaagaaaactgcagccttgacatctgtcatctgagaaaggatatctggtttcatgttaggcacatacatgcatgtgtgtgccatctactgatgatttgtacacagctggacctcgtgtgtttgccatgctcagctctcatttgcttttcaaggatacctgggatggctgttctcagagagtacttacggggaacagactgccttttagtaacaagggatacttgggaaatacattgtgagtatgatctatcccagattgctggggaaataaaggagggccctgattatatttggtttattcctcactaaatgtttaagaagtaaatgctcccaaggcatttgaaatgaacatagaaacataatctaaatgtctctaaattttccactttgtgttttctaaacacaaattgtattactcatttgagcataactcaagaattcagcgatgataaattgaagggctgaatgtgagaactccattaattccacttcttccaagaaagttaacctcaggaaatgctgtttgaagagaagaaagtagtaccaaacaaaaaccttaaacagtacttgaatcttttttgcgctgagactataaagaattcattctaacatcttgtttcataagggccacatcattcgttggagcatgatagtgtgatttgtgtacaattgttacctctcagctgctgaagttcacacttcaaggatctaggagctctgtgaggggtcgtccagcaagatgctgatttgtctttcagttggtatggtttctgtgatcggggtaaactcccgtctcccactattcaaaagcagcccaactcatgctttggaatccactgaaataaaaatagttacatgaagtttaa

SEQ ID NO: 110556 - DNA, 6372 bp, Homo sapiens
  Payload ID: 1681
  Gene Symbol: AVL9
  Gene Name: AVL9 homolog (S. cerevisiase)
  ENST ID: ENST00000446718
  CDS Start-End: 1-1707
caggaagatactgtgttttttcacttgccacccagaaatggaaatggagccacagtatttggtatctcttgctatcgacaaattgaagccaaggcactgaaagtaaggcaagcagatatcaccagagagactgttcagaaaagtgtctgtgttctaagcaagctgcctctgtatggtttacttcaagcaaaacttcaactcattacacatgcatattttgaagagaaggatttttcccaaatttctattctaaaggagctttatgaacatatgaatagttccttgggaggtgcttcattagaaggatcccaagtatatcttggtctgtcacctcgagatcttgtccttcattttcgacacaaggtcttaatcctatttaagctaattcttcttgaaaaaaaggttcttttttatatttctccagtgaataaattggtgggtgcactgatgactgtgttatccctttttccaggcatgattgaacatggtctcagtgactgttctcagtatagaccccggaaaagtatgtctgaagatggtgggcttcaggaaagtaacccatgtgcagatgattttgtttctgcatccactgctgatgtttcacataccaacttgggaactatcaggaaagtcatggcaggaaaccatggagaagatgctgccatgaagactgaggagcctttgttccaagtggaagacagcagcaaagggcaggaacccaatgataccaatcaatatttgaaacctccatctcgcccatctccagattcttcagaaagtgactgggaaactttggatcctagtgtcttagaggaccccaacttgaaagaaagggaacagctgggatcagaccagacaaatttgtttccaaaggactctgtcccctcagagagtcttccaattactgtacaacctcaagctaatacgggacaggtagtcctgataccagggctcatttcgggtttggaagaggatcagtatggcatgcccctggccatcttcacaaagggatatctgtgtttgccttacatggcattgcagcagcatcatcttctctccgatgtcaccgttcgggggtttgttgctggagctactaacatcctttttcgacaacagaaacacctcagtgatgccattgtggaagtagaagaagctctgatccagatccatgatccagaactcaggaagctgcttaacccaaccactgcagacctaaggttcgcagactacctagtgaggcacgtgactgagaatcgggatgacgtcttcctagatggcacgggctgggagggaggtgacgaatggatccgggcccagtttgcggtctacattcatgccctgctggctgccacactgcaattagttctgttcagaatagtgaacgtggcaaaaaaattggaaacgtcatggtcacaactagccggaatgttgtacaaacaggaaaagctgttggccagtcagttggaggagctttttccagtgcaaagacagctatgtcttcatggctttccactttcaccacttccacctcccaaagtctcactgagccaccagatgagaagccttgagcaaggcgtcagaggctgctattgctttctgaggtttaagtgtcccctgtctgtctgctgctcccaggctgttactagccacagatccacagcaggggaccatatgtcgaactgtttacatggatgttgctctaagtgaatgtttcgggatgccgaaatgatgaaatcacagccatagcagggatggctttccaggttggggtttcaattgactacttttatttcagtctgagcctgattaaaacatacagtgaaccttctaatgaattttgagttctgatattgtacattggtttactttagaagagtttttacttatgtaaattttgttctgttttggtgtttgaatatctagatggtcactgtaatttatacttgctaaaattaatttatattaccattttctctaaagttggccttaaaacgtgcttataaagtgaaggggtcatacagttgggccttcattattttgctgaattatgtgatgatttttttgctttctacccacaaaacatttattaattcacttcctcccagaaacatgaaagttagaggtggtagttctgaggattgggtgttttgttttacgtttttagtttgttctttccacatccttaaaaacttggtttcagacatcaaggagtatcactgtgctttcctcctctttataactgtgcaggtgggtgtgcagagaaatagcagagtgatggttcgatgatactgaagcagtttaacatgaatgtgtctgtagggcaatactttcaaagaagacctatgtgtttatttttcaaccgcagtcatgttgcagtcttacaagcactttttttttattccagagtttgtgccatctgtttctctttttttttttggggggggggggggggcggggtctcactctatcgcccaggctggagtgcagtggtgccatctcggctcactgcaacctccatctcccgggttcaagcaattcttgtacctcagcctcccaagtagctgggattatggacatgcgccaccatgcccagctaattattgtatttttagtagagacggggttttgccatgttggccaggctggtcttgatctcctggcctcaagtgatctgcccgcctcagcctctcaaagtgctgggactacaggcatgagccactgcgcctggcctgtttcttttttaaacagttttctattgggtgtttgcagacctacagcttttctcgtagtcttattcataaagcttttcaaagcacttagtcttctacttccctaactgaaagtcctcctataatcaatccctacccccttctagaagtatcttaaaagaaaagcaaggtgattgtaagtattaaatagaaatctcatcttagtttatattcagcaaagtaagaggcaagagaagaaaactgcagccttgacatctgtcatctgagaaaggatatctggtttcatgttaggcacatacatgcatgtgtgtgccatctactgatgatttgtacacagctggacctcgtgtgtttgccatgctcagctctcatttgcttttcaaggatacctgggatggctgttctcagagagtacttacggggaacagactgccttttagtaacaagggatacttgggaaatacattgtgagtatgatctatcccagattgctggggaaataaaggagggccctgattatatttggtttattcctcactaaatgtttaagaagtaaatgctcccaaggcatttgaaatgaacatagaaacataatctaaatgtctctaaattttccactttgtgttttctaaacacaaattgtattactcatttgagcataactcaagaattcagcgatgataaattgaagggctgaatgtgagaactccattaattccacttcttccaagaaagttaacctcaggaaatgctgtttgaagagaagaaagtagtaccaaacaaaaaccttaaacagtacttgaatcttttttgcgctgagactataaagaattcattctaacatcttgtttcataagggccacatcattcgttggagcatgatagtgtgatttgtgtacaattgttacctctcagctgctgaagttcacacttcaaggatctaggagctctgtgaggggtcgtccagcaagatgctgatttgtctttcagttggtatggtttctgtgatcggggtaaactcccgtctcccactattcaaaagcagcccaactcatgctttggaatccactgaaataaaaatagttacatgaagtttaactttgctttaatatcacttgttcctcattgaatatacactttgatcggactttctattaacatttctagctaagagtttgactcttagtggtcactttactgactttccaacataaaacaagtatctcagaagatacaactttcatcatagaaatggtcaaaagaccatagctatatttccttcaggttctgggaggtggagtttttcaaggaacactggctgttgtattgttggcaggggccccaaggcagctcgcacaatcaaaggcaggaagcctcacccctggtcctgtgaccccccccccccacacacacacatacttcaggcttggattctaggctccaagtggccagcatagaagcagcagcctctctccaaaccctggctctgtgagccataggaaccagcactaggtcatcttctgacatagccctggtgaaggtgtgtgtgtgttggtggccacacttgctaaggcttttgtgtctaagaattgagtatttgtacctaggtgtgagggaaccagggtcagccagcctttttcagatggcgccaggcacacacactacatcaatggcttgctggtggcttcaccactatccaggtgacttaaaagagtgtttggaaaatgtccctggtatacttcaattcctactagacattgtaatgacaatggtgtaggtaaggaagagagagttaaaactaccagttgtggaatagaaatagttgcatgtccaaagaaggcttagaatgattgtgcatatgcagttggctcacataaccagcatgaacagtctctccccaaatccattagtgattcactaccccccgccaagcacagccctaaaacaattctcgtccactttcctgttaagaaacacagcagcaatatactttggcagcaaaccagagcatatgatgtaacttgctcaaccttatcttcctttccaaattctatactaagcatctgatgttttttagaataatttcctttggaaagccaacgagaaaacaaattaggaagagagagaagtgagaaattgttgcatggctgaggaacaagatgcttaaaatctgaatggaagtattttgagagcagtatttcatgtgctaagggttataagaattcttttagaaagggattagaattttactctgctagttacaagttttaaagtcacgctacggcattatcaccctggcaggtaggttttgttattgttttacattttgtgaaaaaaagttttgtagaagttacagctagtggtcttttccctccagagccagtgatgagtgtgggagcacttcagctctgtaaggggccagcgttctgacctttaaccacatgaactaacctgcgtcagcagttgcagaaagtagcctgttaggacagcagctgctaagcgttgcctggtattttagtggggagaaggctgggactcttcatggcatcaacacttgcatgctctgaatctttgatcagagatgaggtgccatttttggcatttccaccccgtctcgtggtagcctttaaaagtggtagaagatgctgccctaattccccgaggatgattgtcattccatgcagcataatgtgccgtgaggagttttctcattccagttctttggacttcgtaacattggaattgtttttccataatttccggcattccataaatatttgtcaaggacaaagaaaaggaatgtggatgtttattcttttcatatgaatgactttgtacacatgacttcctgctttcattatgaaggaggggaaactagttcccttgtatggtaactccaaagttaaaaaattgtgcatgtctgaggggttgaatatattttgtaaaactctaaatacatttgtatttctgtgctgttctaaagtttacctttttacttatatgaaagataactatatatttaaatcatgtaagtggaacacagtgtagggggtttttccaatcttatttttcatcaggttctcacacccacgtagtatgctgctcaaattttttcgtgtgtgcaaatgtgaacatttgaacatttcagttaggtactgagccagaaaaggtaattgaagttttcagaaagcttctgtgcttagaaaatattttgttgttttcttaaaatattagtattttgtagctggaagaataagatcaaggcttacatgtttcaggccacttggtcactggttcctgaatttagaaaacattggattaatgagttggtgaaggcatttagtggttacaaaaacagtttaaatatttatgattaaaggcttttcacaaacctttttaaagaaaatttagctgagaaaacttaaaaagttttctaaggaagtttaactgtggcacatgttttgatcagaaaggtagttctctttgctctggtagttttaaagtttgtactagttctttatttctgttgtttttttaaattgttaaaattataaatcacgtctaatcatactgaattgtaaaacttgaattgtatctttattttaagcataaatgagaataaaatgatcctgttcaccctgcc

SEQ ID NO: 110557 - DNA, 3643 bp, Homo sapiens
  Payload ID: 1682
  Gene Symbol: AXIN1
  Gene Name: axin 1
  Uniprot ID: O15169
  ENST ID: ENST00000262320
  CDS Start-End: 373-2961
ctcgggaggcgatcgtggccgctgccgccgccagagccggccggagtcggcccggagccgcgtccacgcggagcgggcgggtgggagctggcggctgggcccctgcggcgcccccgcggcctgccccgcgtccgcctccgggccgccgagccgcagccgccgagatgggggccgccccgggccgcgcccccgccgggtcccgcccgccgcgctgccgctgagcgcatgggcccggaccgcgccgcgccgctccgggagccgggcccggggtcccgccaccaccgcgcgcgggacagattgattcactttggagctgtaagtactgatgtattagggtgcagcgctcattgttccttgacgcagagtcccaaaatgaatatccaagagcagggtttccccttggacctcggagcaagtttcaccgaagatgctccccgacccccagtgcctggtgaggagggagaactggtgtccacagacccgaggcccgccagctacagtttctgctccgggaaaggtgttggcattaaaggtgagacttcgacggccactccgaggcgctcggatctggacctggggtatgagcctgagggcagtgcctcccccaccccaccatacttgaagtgggctgagtcactgcattccctgctggatgaccaagatgggataagcctgttcaggactttcctgaagcaggagggctgtgccgacttgctggacttctggtttgcctgcactggcttcaggaagctggagccctgtgactcgaacgaggagaagaggctgaagctggcgagagccatctaccgaaagtacattcttgataacaatggcatcgtgtcccggcagaccaagccagccaccaagagcttcataaagggctgcatcatgaagcagctgatcgatcctgccatgtttgaccaggcccagaccgaaatccaggccactatggaggaaaacacctatccctccttccttaagtctgatatttatttggaatatacgaggacaggctcggagagccccaaagtctgtagtgaccagagctctgggtcagggacagggaagggcatatctggatacctgccgaccttaaatgaagatgaggaatggaagtgtgaccaggacatggatgaggacgatggcagagacgctgctccccccggaagactccctcagaagctgctcctggagacagctgccccgagggtctcctccagtagacggtacagcgaaggcagagagttcaggtatggatcctggcgggagccagtcaacccctattatgtcaatgccggctatgccctggccccagccaccagtgccaacgacagcgagcagcagagcctgtccagcgatgcagacaccctgtccctcacggacagcagcgtggatgggatccccccatacaggatccgtaagcagcaccgcagggagatgcaggagagcgtgcaggtcaatgggcgggtgcccctacctcacattccccgcacgtaccgggtgccgaaggaggtccgcgtggagcctcagaagttcgcggaggagctcatccaccgcctggaggctgtgcagcgcacgcgggaggccgaggagaagctggaggagcggctgaagcgcgtgcgcatggaggaggaaggtgaggacggcgatccatcgtcagggcccccagggccgtgtcacaagctgcctcccgcccccgcttggcaccacttcccgccccgctgtgtggacatgggctgtgccgggctccgggatgcacacgaggagaaccctgagagcatcctggacgagcacgtacagcgtgtgctgaggacacctggccgccagtcgcctgggcctggccatcgctccccggacagtgggcacgtggccaagatgccagtggcactggggggtgccgcctcggggcacgggaagcacgtacccaagtcaggggcgaagctggacgcggccggcctgcaccaccaccgacacgtccaccaccacgtccaccacagcacagcccggcccaaggagcaggtggaggccgaggccacccgcagggcccagagcagcttcgcctggggcctggaaccacacagccatggggcaaggtcccgaggctactcagagagtgttggcgctgcccccaacgccagtgatggcctcgcccacagtgggaaggtgggcgtggcgtgcaaaagaaatgccaagaaggctgagtcggggaagagcgccagcaccgaggtgccaggtgcctcggaggatgcggagaagaaccagaaaatcatgcagtggatcattgagggggaaaaggagatcagcaggcaccgcaggaccggccacgggtcttcggggacgaggaagccacagccccatgagaactccagacccttgtcccttgagcacccctgggccggccctcagctccggacctccgtgcagccctcccacctcttcatccaagaccccaccatgccaccccacccagctcccaaccccctaacccagctggaggaggcgcgccgacgtctggaggaggaagaaaagagagccagccgagcaccctccaagcagaggtatgtgcaggaggttatgcggcggggacgcgcctgcgtcaggccagcgtgcgcgccggtgctgcacgtggtaccagccgtgtcggacatggagctctccgagacagagacaagatcgcagaggaaggtgggcggcgggagtgcccagccgtgtgacagcatcgttgtggcgtactacttctgcggggaacccatcccctaccgcaccctggtgaggggccgcgctgtcaccctgggccagttcaaggagctgctgaccaaaaagggcagctacagatactacttcaagaaagtgagcgacgagtttgactgtggggtggtgtttgaggaggttcgagaggacgaggccgtcctgcccgtctttgaggagaagatcatcggcaaagtggagaaggtggactgataggctggtgggctggccgctgtgccaggcgaggcccttggcgggcacgggtgtcacggccaggcagatgacctcgtactcaggagcccgatggggaacagtgttgggtgtaccacccatccctgtggtctacccgtgtctagaggcaggtagggggtccctccaagtggtccacaagcttctgtcctgcccccaaggaggcagcctggaccactcctcatagcaatacttggagggcccagcccaagtgaggcagccgaggtccctgctgccagcttcaggtgacccccccccatcccccggcacctcccttgggcacgtgtgctgggatctactttccctctgggatttgcccacgtacccaggtctgggtggggcccaggcccggatgcagaggcctgcagggcctctgtcaattgtacgcgccaccgagtgccttcaacacagcttgtctcttgcctgccactgtgtgaatcggcgacggagcactgcacctgcctccagccgccggctgtgcagtcctgggtcctcctttctgagggcccgtgtaaatatgtacatttctcaggctaggccagcaggggctgcccgagtctgtttttcatgcgatgacacttgtacaattaattatcttttcaaaggtacttggataataatgaaataaaactgtttttgaacctgc

SEQ ID NO: 110558 - DNA, 3324 bp, Homo sapiens
  Payload ID: 1682
  Gene Symbol: AXIN1
  Gene Name: axin 1
  Uniprot ID: O15169
  ENST ID: ENST00000354866
  CDS Start-End: 163-2643
gctgccgctgagcgcatgggcccggaccgcgccgcgccgctccgggagccgggcccggggtcccgccaccaccgcgcgcgggacagattgattcactttggagctgtaagtactgatgtattagggtgcagcgctcattgttccttgacgcagagtcccaaaatgaatatccaagagcagggtttccccttggacctcggagcaagtttcaccgaagatgctccccgacccccagtgcctggtgaggagggagaactggtgtccacagacccgaggcccgccagctacagtttctgctccgggaaaggtgttggcattaaaggtgagacttcgacggccactccgaggcgctcggatctggacctggggtatgagcctgagggcagtgcctcccccaccccaccatacttgaagtgggctgagtcactgcattccctgctggatgaccaagatgggataagcctgttcaggactttcctgaagcaggagggctgtgccgacttgctggacttctggtttgcctgcactggcttcaggaagctggagccctgtgactcgaacgaggagaagaggctgaagctggcgagagccatctaccgaaagtacattcttgataacaatggcatcgtgtcccggcagaccaagccagccaccaagagcttcataaagggctgcatcatgaagcagctgatcgatcctgccatgtttgaccaggcccagaccgaaatccaggccactatggaggaaaacacctatccctccttccttaagtctgatatttatttggaatatacgaggacaggctcggagagccccaaagtctgtagtgaccagagctctgggtcagggacagggaagggcatatctggatacctgccgaccttaaatgaagatgaggaatggaagtgtgaccaggacatggatgaggacgatggcagagacgctgctccccccggaagactccctcagaagctgctcctggagacagctgccccgagggtctcctccagtagacggtacagcgaaggcagagagttcaggtatggatcctggcgggagccagtcaacccctattatgtcaatgccggctatgccctggccccagccaccagtgccaacgacagcgagcagcagagcctgtccagcgatgcagacaccctgtccctcacggacagcagcgtggatgggatccccccatacaggatccgtaagcagcaccgcagggagatgcaggagagcgtgcaggtcaatgggcgggtgcccctacctcacattccccgcacgtaccgggtgccgaaggaggtccgcgtggagcctcagaagttcgcggaggagctcatccaccgcctggaggctgtgcagcgcacgcgggaggccgaggagaagctggaggagcggctgaagcgcgtgcgcatggaggaggaaggtgaggacggcgatccatcgtcagggcccccagggccgtgtcacaagctgcctcccgcccccgcttggcaccacttcccgccccgctgtgtggacatgggctgtgccgggctccgggatgcacacgaggagaaccctgagagcatcctggacgagcacgtacagcgtgtgctgaggacacctggccgccagtcgcctgggcctggccatcgctccccggacagtgggcacgtggccaagatgccagtggcactggggggtgccgcctcggggcacgggaagcacgtacccaagtcaggggcgaagctggacgcggccggcctgcaccaccaccgacacgtccaccaccacgtccaccacagcacagcccggcccaaggagcaggtggaggccgaggccacccgcagggcccagagcagcttcgcctggggcctggaaccacacagccatggggcaaggtcccgaggctactcagagagtgttggcgctgcccccaacgccagtgatggcctcgcccacagtgggaaggtgggcgtggcgtgcaaaagaaatgccaagaaggctgagtcggggaagagcgccagcaccgaggtgccaggtgcctcggaggatgcggagaagaaccagaaaatcatgcagtggatcattgagggggaaaaggagatcagcaggcaccgcaggaccggccacgggtcttcggggacgaggaagccacagccccatgagaactccagacccttgtcccttgagcacccctgggccggccctcagctccggacctccgtgcagccctcccacctcttcatccaagaccccaccatgccaccccacccagctcccaaccccctaacccagctggaggaggcgcgccgacgtctggaggaggaagaaaagagagccagccgagcaccctccaagcagaggacaagatcgcagaggaaggtgggcggcgggagtgcccagccgtgtgacagcatcgttgtggcgtactacttctgcggggaacccatcccctaccgcaccctggtgaggggccgcgctgtcaccctgggccagttcaaggagctgctgaccaaaaagggcagctacagatactacttcaagaaagtgagcgacgagtttgactgtggggtggtgtttgaggaggttcgagaggacgaggccgtcctgcccgtctttgaggagaagatcatcggcaaagtggagaaggtggactgataggctggtgggctggccgctgtgccaggcgaggcccttggcgggcacgggtgtcacggccaggcagatgacctcgtactcaggagcccgatggggaacagtgttgggtgtaccacccatccctgtggtctacccgtgtctagaggcaggtagggggtccctccaagtggtccacaagcttctgtcctgcccccaaggaggcagcctggaccactcctcatagcaatacttggagggcccagcccaagtgaggcagccgaggtccctgctgccagcttcaggtgacccccccccatcccccggcacctcccttgggcacgtgtgctgggatctactttccctctgggatttgcccacgtacccaggtctgggtggggcccaggcccggatgcagaggcctgcagggcctctgtcaattgtacgcgccaccgagtgccttcaacacagcttgtctcttgcctgccactgtgtgaatcggcgacggagcactgcacctgcctccagccgccggctgtgcagtcctgggtcctcctttctgagggcccgtgtaaatatgtacatttctcaggctaggccagcaggggctgcccgagtctgtttttcatgcgatgacacttgtacaattaattatcttttcaaaggtacttggataataatgaaataaaactgtttttgaacctg

SEQ ID NO: 110559 - DNA, 334 bp, Homo sapiens
  Payload ID: 1682
  Gene Symbol: AXIN1
  Gene Name: axin 1
  ENST ID: ENST00000457798
  CDS Start-End: 1-308
gtctggaggaggaagaaaagagagccagccgagcaccctccaagcagaggacaagatcgcagaggaaggtgggcggcgggagtgcccagccgtgtgacagcatcgttgtggcgtactacttctgcggggaacccatcccctaccgcaccctggtgaggggccgcgctgtcaccctgggccagttcaaggagctgctgaccaaaaagggcagctacaggcctccttcccatctgcggtgctgcctgctcactgccctcctcacctccgtcctgcagatactacttcaagaaagtgagcgacgagtttgactgtggggtggtgtttgaggaggttc

SEQ ID NO: 110560 - DNA, 4259 bp, Homo sapiens
  Payload ID: 1683
  Gene Symbol: AXIN2
  Gene Name: axin 2
  Uniprot ID: Q9Y2T1
  ENST ID: ENST00000307078
  CDS Start-End: 315-2846
cggctgtgattggcgcggcgggatcactggctccgcgagcctggcccgggggagtcggctggagccggctgcgctttgataaggtcctggcaactcagtaacagcccgagagccgggaaataaaaataacccctcagagcgatggatttcggggccgcccggcggccgaggcgcccgccgaaggccctgctgtaaaagagaggaggttcagatgagcccctgctgacttgagagagacagagagaccacgccgattgctgagaggaactggaagaagaaaaattcccagactcagtgggaagagctccctcaccatgagtagcgctatgttggtgacttgcctcccggaccccagcagcagcttccgtgaggatgccccgcggcccccagtgccaggggaagaaggggagaccccaccgtgtcagccaggggtgggcaagggccaggtcaccaaacccatgcctgtctcttccaacaccaggcggaacgaagatgggttgggggagccggaggggcgggcatctccggattcccctctgacccggtggaccaagtccttacactccttattgggcgatcaagacggtgcttacctgttccgaactttcctggagagggagaaatgcgtggataccttagacttctggtttgcctgcaatggattcaggcagatgaacctgaaggataccaaaactttacgagtagccaaagcgatctacaaaaggtacattgagaacaacagcattgtctccaagcagctgaagcctgccaccaagacctacataagagatggcatcaagaagcagcagattgattccatcatgtttgaccaggcgcagaccgagatccagtcggtgatggaggaaaatgcctaccagatgtttttgacttctgatatatacctcgaatatgtgaggagtgggggagaaaacacagcttacatgagtaatgggggactcgggagcctaaaggtcgtgtgtggctatctccccaccttgaatgaagaagaggagtggacttgtgccgacttcaagtgcaaactttcgccaaccgtggttggcttgtccagcaaaactctgagggccacggcgagtgtgaggtccacggaaactgttgacagtggatacaggtccttcaagaggagcgatcctgttaatccttatcacataggttctggctatgtctttgcaccagccaccagcgccaacgacagtgagatatccagtgatgcgctgacggatgattccatgtccatgacggacagcagtgtagatggaattcctccttatcgtgtgggcagtaagaaacagctccagagagaaatgcatcgcagtgtgaaggccaatggccaagtgtctctacctcatttcccgagaacccaccgcctgcccaaggagatgacccccgtggaacccgccacctttgcagctgagctgatctcgaggctggaaaagctgaagctggagttggagagccgccacagcctggaggagcgcctgcagcagatccgagaggatgaagagagagagggctccgagctcacactcaattcgcgggagggggcgcccacgcagcaccccctctccctactgccctccggcagctacgaggaagacccgcagacgatactggacgatcacctgtccagggtcctcaagacccctggctgccagtctccaggcgtaggccgctatagcccccgctcccgctccccggaccaccaccaccaccaccattcgcagtaccactccctgctcccgcccggtggcaagctgcctcccgcggccgcctcgccgggcgcctgccccctcctcgggggcaaaggctttgtgaccaagcagacgacgaagcatgtccaccaccactacatccaccaccatgccgtccccaagaccaaggaggagatcgaggcggaggccacgcagcgggtgcactgcttctgccctgggggcagcgagtattactgctactcgaaatgcaaaagccactccaaggctccggaaaccatgcccagcgagcagtttggcggcagcagaggcagtaccttgcccaaacgcaatgggaaaggcacggagccgggcctggccctgcccgccagggaaggaggggcccccggcggagctggggccctgcagcttccccgggaggaaggagacaggtcgcaggatgtctggcagtggatgctggagagtgagcggcagagcaagcccaagccccatagtgcccaaagcacaaaaaaggcctaccccttggagtctgcccgctcgtctccaggcgaacgagccagccggcaccatctgtgggggggcaacagcgggcacccccgcaccaccccccgtgcccacctgttcacccaggaccctgcgatgcctcccctgaccccacccaacacgctggctcagctggaggaggcctgtcgcaggctagctgaggtgtcgaagcccccaaagcagcggtgctgtgtggccagtcagcagagggacaggaatcattcggccactgttcagacgggagccacacccttctccaatccaagcctggctccagaagatcacaaagagccaaagaaactggcaggtgtccacgcgctccaggccagtgagttggttgtcacttactttttctgtggggaagaaattccataccggaggatgctgaaggctcagagcttgaccctgggccactttaaagagcagctcagcaaaaagggaaattataggtattacttcaaaaaagcaagcgatgagtttgcctgtggagcggtgtttgaggagatctgggaggatgagacggtgctcccgatgtatgaaggccggattctgggcaaagtggagcggatcgattgagccctggggtctggctttggtgaactgttggagcccgaagctcttgtgaactgtcttggctgtgagcaactgcgacaaaacattttgaaggaaaattaaaccaatgaagaagacaaagtctaaggaagaatcggccagtgggccttcgggagggcggggggaggttgattttcatgattcatgagctgggtactgactgagataagaaaagcctgaactatttattaaaaacatgaccactcttggctattgaagatgctgcctgtatttgagagactgccatacataatatatgacttcctagggatctgaaatccataaactaagagaaactgtgtatagcttacctgaacaggaatccttactgatatttatagaacagttgatttcccccatccccagtttatggatatgctgctttaaacttggaagggggagacaggaagttttaattgttctgactaaacttaggagttgagctaggagtgcgttcatggtttcttcactaacagaggaattatgctttgcactacgtccctccaagtgaagacagactgttttagacagactttttaaaatggtgccctaccattgacacatgcagaaattggtgcgttttgtttttttttttcctatgctgctctgttttgtcttaaaggtcttgagggttgaccatgttgcgtcatcatcaacattttgggggttgtgttggatgggatgatctgttgcagagggagaggcagggaaccctgctccttcgggccccaggttgatcctgtgactgaggctccccctcatgtagcctccccaggcccagggccctgaggcctgctagaatcactgccgctgtgctttcgtggaaatgacagttccttgttttttttgtttctgtttttgttttacattagtcattggaccacagccattcaggaactaccccctgccccacaaagaaatgaacagttgtagggagacccagcagcacctttcctccacacaccttcattttgatgttcgggtttttgtgttaagttaatctgtacattctgtttgccattgttacttgtactatacatctgtatatagtgtacggcaaaagagtattaatccactatctctagtgcttgactttaaatcagtacagtacctgtacctgcacggtcacccgctccgtgtgtcgccctatattgagggctcaagctttcccttgttttttgaaaggggtttatgtataaatatattttatgcctttttattacaagtcttgtactcaatgacttttgtcatgacattttgttctacttatactgtaaattatgcattataaagagttcatttaaggaaaattacttggtacaataattattgtaattaagagatgtagcctttattaaaattttatatttttcaaaa

SEQ ID NO: 110561 - DNA, 2541 bp, Homo sapiens
  Payload ID: 1683
  Gene Symbol: AXIN2
  Gene Name: axin 2
  ENST ID: ENST00000375702
  CDS Start-End: 110-2446
gttcagatgagcccctgctgacttgagagagacagagagaccacgccgattgctgagaggaactggaagaagaaaaattcccagactcagtgggaagagctccctcaccatgagtagcgctatgttggtgacttgcctcccggaccccagcagcagcttccgtgaggatgccccgcggcccccagtgccaggggaagaaggggagaccccaccgtgtcagccaggggtgggcaagggccaggtcaccaaacccatgcctgtctcttccaacaccaggcggaacgaagatgggttgggggagccggaggggcgggcatctccggattcccctctgacccggtggaccaagtccttacactccttattgggcgatcaagacggtgcttacctgttccgaactttcctggagagggagaaatgcgtggataccttagacttctggtttgcctgcaatggattcaggcagatgaacctgaaggataccaaaactttacgagtagccaaagcgatctacaaaaggtacattgagaacaacagcattgtctccaagcagctgaagcctgccaccaagacctacataagagatggcatcaagaagcagcagattgattccatcatgtttgaccaggcgcagaccgagatccagtcggtgatggaggaaaatgcctaccagatgtttttgacttctgatatatacctcgaatatgtgaggagtgggggagaaaacacagcttacatgagtaatgggggactcgggagcctaaaggtcgtgtgtggctatctccccaccttgaatgaagaagaggagtggacttgtgccgacttcaagtgcaaactttcgccaaccgtggttggcttgtccagcaaaactctgagggccacggcgagtgtgaggtccacggaaactgttgacagtggatacaggtccttcaagaggagcgatcctgttaatccttatcacataggttctggctatgtctttgcaccagccaccagcgccaacgacagtgagatatccagtgatgcgctgacggatgattccatgtccatgacggacagcagtgtagatggaattcctccttatcgtgtgggcagtaagaaacagctccagagagaaatgcatcgcagtgtgaaggccaatggccaagtgtctctacctcatttcccgagaacccaccgcctgcccaaggagatgacccccgtggaacccgccacctttgcagctgagctgatctcgaggctggaaaagctgaagctggagttggagagccgccacagcctggaggagcgcctgcagcagatccgagaggatgaagagagagagggctccgagctcacactcaattcgcgggagggggcgcccacgcagcaccccctctccctactgccctccggcagctacgaggaagacccgcagacgatactggacgatcacctgtccagggtcctcaagacccctggctgccagtctccaggcgtaggccgctatagcccccgctcccgctccccggaccaccaccaccaccaccattcgcagtaccactccctgctcccgcccggtggcaagctgcctcccgcggccgcctcgccgggcgcctgccccctcctcgggggcaaaggctttgtgaccaagcagacgacgaagcatgtccaccaccactacatccaccaccatgccgtccccaagaccaaggaggagatcgaggcggaggccacgcagcgggtgcactgcttctgccctgggggcagcgagtattactgctactcgaaatgcaaaagccactccaaggctccggaaaccatgcccagcgagcagtttggtgcccaaagcacaaaaaaggcctaccccttggagtctgcccgctcgtctccaggcgaacgagccagccggcaccatctgtgggggggcaacagcgggcacccccgcaccaccccccgtgcccacctgttcacccaggaccctgcgatgcctcccctgaccccacccaacacgctggctcagctggaggaggcctgtcgcaggctagctgaggtgtcgaagcccccaaagcagcggtgctgtgtggccagtcagcagagggacaggaatcattcggccactgttcagacgggagccacacccttctccaatccaagcctggctccagaagatcacaaagagccaaagaaactggcaggtgtccacgcgctccaggccagtgagttggttgtcacttactttttctgtggggaagaaattccataccggaggatgctgaaggctcagagcttgaccctgggccactttaaagagcagctcagcaaaaagggaaattataggtattacttcaaaaaagcaagcgatgagtttgcctgtggagcggtgtttgaggagatctgggaggatgagacggtgctcccgatgtatgaaggccggattctgggcaaagtggagcggatcgattgagccctggggtctggctttggtgaactgttggagcccgaagctcttgtgaactgtcttggctgtgagcaactgcgacaaaacattttgaaggaaaa

SEQ ID NO: 110562 - DNA, 621 bp, Homo sapiens
  Payload ID: 1683
  Gene Symbol: AXIN2
  Gene Name: axin 2
  ENST ID: ENST00000544103
  CDS Start-End: 170-621
ggggggaggtcagggaagacagaggtgttgactgagctggattcttggtggggagaggaggttcagatgagcccctgctgacttgagagagacagagagaccacgccgattgctgagaggaactggaagaagaaaaattcccagactcagtgggaagagctccctcaccatgagtagcgctatgttggtgacttgcctcccggaccccagcagcagcttccgtgaggatgccccgcggcccccagtgccaggggaagaaggggagaccccaccgtgtcagccaggggtgggcaagggccaggtcaccaaacccatgcctgtctcttccaacaccaggcggaacgaagatgggttgggggagccggaggggcgggcatctccggattcccctctgacccggtggaccaagtccttacactccttattgggcgatcaagacggtgcttacctgttccgaactttcctggagagggagaaatgcgtggataccttagacttctggtttgcctgcaatggattcaggcagatgaacctgaaggataccaaaactttacgagtagccaaagcgatctacaaaaggtacattgagaacaacagcattgtctccaagcagctgaagcc

SEQ ID NO: 110563 - DNA, 1034 bp, Homo sapiens
  Payload ID: 1683
  Gene Symbol: AXIN2
  Gene Name: axin 2
  ENST ID: ENST00000585045
  CDS Start-End: 460-1034
caagtccggggcgcccgtgtccctcgcgtccctcctcccggcccgggcccctcgcccgtggccgccccggccccttttgcggagaggcagagactccgcgcgtcgccatttctggactaggctgctgctttctgtgctttttctgcgggcgcctctgcaaacggcggcgccggggaccgaccccccgcccgggctcggggcgctgctggcgtgtcccggggttccggcctcgaggtgtgcccgccagggctctggaggcgttcagttgcatttgggccgggggaccgggccggaggggctcggaggacatgagagcctggcttcggcggccttcgtcttccagagaggaggttcagatgagcccctgctgacttgagagagacagagagaccacgccgattgctgagaggaactggaagaagaaaaattcccagactcagtgggaagagctccctcaccatgagtagcgctatgttggtgacttgcctcccggaccccagcagcagcttccgtgaggatgccccgcggcccccagtgccaggggaagaaggggagaccccaccgtgtcagccaggggtgggcaagggccaggtcaccaaacccatgcctgtctcttccaacaccaggcggaacgaagatgggttgggggagccggaggggcgggcatctccggattcccctctgacccggtggaccaagtccttacactccttattgggcgatcaagacggtgcttacctgttccgaactttcctggagagggagaaatgcgtggataccttagacttctggtttgcctgcaatggattcaggcagatgaacctgaaggataccaaaactttacgagtagccaaagcgatctacaaaaggtacattgagaacaacagcattgtctccaagcagctgaagcctgccaccaagacctacataagagatggcatcaagaagcagcagattgattccatcatgtttgaccaggcgcagaccgagatccagtcggtgatggaggaaaatgcctaccagatgtttttgac

SEQ ID NO: 110564 - DNA, 1060 bp, Homo sapiens
  Payload ID: 1683
  Gene Symbol: AXIN2
  Gene Name: axin 2
  ENST ID: ENST00000580513
  CDS Start-End: 484-1060
gttaaatccacagcgcagtttttgttggaagcgcccggaggacatttggtgcgccgagtgactgctggaaacaggacctgcgttgaaagccgggccgggcgggggcggaggcccgctcggatcttttgcataaaaggggcggcggggcgcgccgttccccctccccggccggtggctttcgctctgaacccgggattgttgtttcccgcaccccctcccccgccgcacgactccccatgttccccgacgccgcggccggcccgggggggcccggggctgccgccgcgagccgagccgggggccggggccgggcccctgccaggggcgcctgcgaggtctcgccgccgagcgcgcgcggggatcaatgagaggaggttcagatgagcccctgctgacttgagagagacagagagaccacgccgattgctgagaggaactggaagaagaaaaattcccagactcagtgggaagagctccctcaccatgagtagcgctatgttggtgacttgcctcccggaccccagcagcagcttccgtgaggatgccccgcggcccccagtgccaggggaagaaggggagaccccaccgtgtcagccaggggtgggcaagggccaggtcaccaaacccatgcctgtctcttccaacaccaggcggaacgaagatgggttgggggagccggaggggcgggcatctccggattcccctctgacccggtggaccaagtccttacactccttattgggcgatcaagacggtgcttacctgttccgaactttcctggagagggagaaatgcgtggataccttagacttctggtttgcctgcaatggattcaggcagatgaacctgaaggataccaaaactttacgagtagccaaagcgatctacaaaaggtacattgagaacaacagcattgtctccaagcagctgaagcctgccaccaagacctacataagagatggcatcaagaagcagcagattgattccatcatgtttgaccaggcgcagaccgagatccagtcggtgatggaggaaaatgcctaccagatgtttttgactt

SEQ ID NO: 110565 - DNA, 976 bp, Homo sapiens
  Payload ID: 1683
  Gene Symbol: AXIN2
  Gene Name: axin 2
  ENST ID: ENST00000577278
  CDS Start-End: 162-976
gggcagataccccccgggggtcgcgtcgctgtcgcggttatggatagaggaggttcagatgagcccctgctgacttgagagagacagagagaccacgccgattgctgagaggaactggaagaagaaaaattcccagactcagtgggaagagctccctcaccatgagtagcgctatgttggtgacttgcctcccggaccccagcagcagcttccgtgaggatgccccgcggcccccagtgccaggggaagaaggggagaccccaccgtgtcagccaggggtgggcaagggccaggtcaccaaacccatgcctgtctcttccaacaccaggcggaacgaagatgggttgggggagccggaggggcgggcatctccggattcccctctgacccggtggaccaagtccttacactccttattgggcgatcaagacggtgcttacctgttccgaactttcctggagagggagaaatgcgtggataccttagacttctggtttgcctgcaatggattcaggcagatgaacctgaaggataccaaaactttacgagtagccaaagcgatctacaaaaggtacattgagaacaacagcattgtctccaagcagctgaagcctgccaccaagacctacataagagatggcatcaagaagcagcagattgattccatcatgtttgaccaggcgcagaccgagatccagtcggtgatggaggaaaatgcctaccagatgtttttgacttctgatatatacctcgaatatgtgaggagtgggggagaaaacacagcttacatgagtaatgggggactcgggagcctaaaggtcgtgtgtggctatctccccaccttgaatgaagaagaggagtggacttgtgccgacttcaagtgcaaactttcgccaaccgtggttggcttgtccagcaaaactctgagggccacggcgagtgtgaggtccacggaaactgttgacagtggatacag

SEQ ID NO: 110566 - DNA, 4060 bp, Homo sapiens
  Payload ID: 1683
  Gene Symbol: AXIN2
  Gene Name: axin 2
  ENST ID: ENST00000618960
  CDS Start-End: 315-2651
cggctgtgattggcgcggcgggatcactggctccgcgagcctggcccgggggagtcggctggagccggctgcgctttgataaggtcctggcaactcagtaacagcccgagagccgggaaataaaaataacccctcagagcgatggatttcggggccgcccggcggccgaggcgcccgccgaaggccctgctgtaaaagagaggaggttcagatgagcccctgctgacttgagagagacagagagaccacgccgattgctgagaggaactggaagaagaaaaattcccagactcagtgggaagagctccctcaccatgagtagcgctatgttggtgacttgcctcccggaccccagcagcagcttccgtgaggatgccccgcggcccccagtgccaggggaagaaggggagaccccaccgtgtcagccaggggtgggcaagggccaggtcaccaaacccatgcctgtctcttccaacaccaggcggaacgaagatgggttgggggagccggaggggcgggcatctccggattcccctctgacccggtggaccaagtccttacactccttattgggcgatcaagacggtgcttacctgttccgaactttcctggagagggagaaatgcgtggataccttagacttctggtttgcctgcaatggattcaggcagatgaacctgaaggataccaaaactttacgagtagccaaagcgatctacaaaaggtacattgagaacaacagcattgtctccaagcagctgaagcctgccaccaagacctacataagagatggcatcaagaagcagcagattgattccatcatgtttgaccaggcgcagaccgagatccagtcggtgatggaggaaaatgcctaccagatgtttttgacttctgatatatacctcgaatatgtgaggagtgggggagaaaacacagcttacatgagtaatgggggactcgggagcctaaaggtcgtgtgtggctatctccccaccttgaatgaagaagaggagtggacttgtgccgacttcaagtgcaaactttcgccaaccgtggttggcttgtccagcaaaactctgagggccacggcgagtgtgaggtccacggaaactgttgacagtggatacaggtccttcaagaggagcgatcctgttaatccttatcacataggttctggctatgtctttgcaccagccaccagcgccaacgacagtgagatatccagtgatgcgctgacggatgattccatgtccatgacggacagcagtgtagatggaattcctccttatcgtgtgggcagtaagaaacagctccagagagaaatgcatcgcagtgtgaaggccaatggccaagtgtctctacctcatttcccgagaacccaccgcctgcccaaggagatgacccccgtggaacccgccacctttgcagctgagctgatctcgaggctggaaaagctgaagctggagttggagagccgccacagcctggaggagcgcctgcagcagatccgagaggatgaagagagagagggctccgagctcacactcaattcgcgggagggggcgcccacgcagcaccccctctccctactgccctccggcagctacgaggaagacccgcagacgatactggacgatcacctgtccagggtcctcaagacccctggctgccagtctccaggcgtaggccgctatagcccccgctcccgctccccggaccaccaccaccaccaccattcgcagtaccactccctgctcccgcccggtggcaagctgcctcccgcggccgcctcgccgggcgcctgccccctcctcgggggcaaaggctttgtgaccaagcagacgacgaagcatgtccaccaccactacatccaccaccatgccgtccccaagaccaaggaggagatcgaggcggaggccacgcagcgggtgcactgcttctgccctgggggcagcgagtattactgctactcgaaatgcaaaagccactccaaggctccggaaaccatgcccagcgagcagtttggtgcccaaagcacaaaaaaggcctaccccttggagtctgcccgctcgtctccaggcgaacgagccagccggcaccatctgtgggggggcaacagcgggcacccccgcaccaccccccgtgcccacctgttcacccaggaccctgcgatgcctcccctgaccccacccaacacgctggctcagctggaggaggcctgtcgcaggctagctgaggtgtcgaagcccccaaagcagcggtgctgtgtggccagtcagcagagggacaggaatcattcggccactgttcagacgggagccacacccttctccaatccaagcctggctccagaagatcacaaagagccaaagaaactggcaggtgtccacgcgctccaggccagtgagttggttgtcacttactttttctgtggggaagaaattccataccggaggatgctgaaggctcagagcttgaccctgggccactttaaagagcagctcagcaaaaagggaaattataggtattacttcaaaaaagcaagcgatgagtttgcctgtggagcggtgtttgaggagatctgggaggatgagacggtgctcccgatgtatgaaggccggattctgggcaaagtggagcggatcgattgagccctggggtctggctttggtgaactgttggagcccgaagctcttgtgaactgtcttggctgtgagcaactgcgacaaaacattttgaaggaaaattaaaccaatgaagaagacaaagtctaaggaagaatcggccagtgggccttcgggagggcggggggaggttgattttcatgattcatgagctgggtactgactgagataagaaaagcctgaactatttattaaaaacatgaccactcttggctattgaagatgctgcctgtatttgagagactgccatacataatatatgacttcctagggatctgaaatccataaactaagagaaactgtgtatagcttacctgaacaggaatccttactgatatttatagaacagttgatttcccccatccccagtttatggatatgctgctttaaacttggaagggggagacaggaagttttaattgttctgactaaacttaggagttgagctaggagtgcgttcatggtttcttcactaacagaggaattatgctttgcactacgtccctccaagtgaagacagactgttttagacagactttttaaaatggtgccctaccattgacacatgcagaaattggtgcgttttgtttttttttttcctatgctgctctgttttgtcttaaaggtcttgagggttgaccatgttgcgtcatcatcaacattttgggggttgtgttggatgggatgatctgttgcagagggagaggcagggaaccctgctccttcgggccccaggttgatcctgtgactgaggctccccctcatgtagcctccccaggcccagggccctgaggcctgctagaatcactgccgctgtgctttcgtggaaatgacagttccttgttttttttgtttctgtttttgttttacattagtcattggaccacagccattcaggaactaccccctgccccacaaagaaatgaacagttgtagggagacccagcagcacctttcctccacacaccttcattttgatgttcgggtttttgtgttaagttaatctgtacattctgtttgccattgttacttgtactatacatctgtatatagtgtacggcaaaagagtattaatccactatctctagtgcttgactttaaatcagtacagtacctgtacctgcacggtcacccgctccgtgtgtcgccctatattgagggctcaagctttcccttgttttttgaaaggggtttatgtataaatatattttatgcctttttattacaagtcttgtactcaatgacttttgtcatgacattttgttctacttatactgtaaattatgcattataaagagttcatttaaggaaaattacttggtacaataattattgtaattaagagatgtagcctttattaaaattttatatttttc

SEQ ID NO: 110567 - DNA, 1019 bp, Homo sapiens
  Payload ID: 1683
  Gene Symbol: AXIN2
  Gene Name: axin 2
  ENST ID: ENST00000611991
  CDS Start-End: 490-972
cggaggctcagtctgcgcgcaggaccggcccaagtccggggcgcccgtgtccctcgcgtccctcctcccggcccgggcccctcgcccgtggccgccccggccccttttgcggagaggcagagactccgcgcgtcgccatttctggactaggctgctgctttctgtgctttttctgcgggcgcctctgcaaacggcggcgccggggaccgaccccccgcccgggctcggggcgctgctggcgtgtcccggggttccggcctcgaggtgtgcccgccagggctctggaggcgttcagttgcatttgggccgggggaccgggccggaggggctcggaggacatgagagcctggcttcggcggccttcgtcttccagagaggaggttcagatgagcccctgctgacttgagagagacagagagaccacgccgattgctgagaggaactggaagaagaaaaattcccagactcagtgggaagagctccctcaccatgagtagcgctatgttggtgacttgcctcccggaccccagcagcagcttccgtgaggatgccccgcggcccccagtgccaggggaagaaggggagaccccaccgtgtcagccaggggtgggcaagggccaggtcaccaaacccatgcctgtctcttccaacaccaggcggaacgaagatgggttgggggagccggaggggcgggcatctccggattcccctctgacccggtggaccaagtccttacactccttattgggcgatcaagacggtgcttacctgttccgaactttcctggagagggagaaatgcgtggataccttagacttctggtttgcctgcaatggattcaggcagatgaacctgaaggataccaaaactttacgagtagccaaagacttttgtcatgacattttgttctacttatactgtaaattatgcattataaagagttcatttaaggaaaattacttggtacaataattattgtaattaagagatgtagcctttattaaaattttatatttttc

SEQ ID NO: 110568 - DNA, 3008 bp, Homo sapiens
  Payload ID: 1684
  Gene Symbol: AIDA
  Gene Name: axin interactor, dorsalization associated
  Uniprot ID: Q96BJ3
  ENST ID: ENST00000340020
  CDS Start-End: 208-1128
cggggtctcggcggggcggtcgctttggagccgcaaagtttggctgtggcggcaaatgggcttgggcggctcctcggcgggtggcggtggtggccgtagcggttcctcctggccctgttaatgtcggggccaggccgggggaggatggcgccctagaacccggccttgctggggtaggggcgggaggggacggggtggggaccggccatgtcggaggtgacccggagtctgctgcagcgctggggcgccagttttaggagaggcgccgacttcgactcttggggccagctggtggaggcgatagacgagtatcagatattagcaagacatctacaaaaggaggcccaagctcaacacaataattctgaattcacagaagaacaaaagaaaaccataggcaaaattgcaacatgcttggaattgcgaagtgcagctttacagtccacacagtctcaagaagaatttaaactggaggacctgaagaagctagaaccaatcctaaagaatattcttacatataataaagaattcccatttgatgttcagcctgtcccattaagaagaattttggcacctggtgaagaagagaatttggaatttgaagaagatgaagaagagggtggtgctggagcagggtctcctgattcttttcctgctagagttcccggtactttattaccaaggttgccatcggaaccaggaatgacattactcactatcagaattgagaaaattggtttgaaagatgctgggcagtgcatcgatccctatattacagttagtgtaaaggatctgaatggcatagacttaactcctgtgcaagatactcctgtggcttcaagaaaagaagatacatatgttcattttaatgtggacattgagctccagaagcatgttgaaaaattaaccaaaggtgcagctatcttctttgaattcaaacactacaagcctaaaaaaaggtttaccagcaccaagtgttttgctttcatggagatggatgaaattaaacctgggccaattgtaatagaactatacaagaaacccactgactttaaaagaaagaaattgcaattattgaccaagaaaccactttatcttcatctacatcaaactttgcacaaggaatgatcctgacatgatgaacctggaacttctgtgaattttaccactcagtagaaaccatcatagctctgtgtagcatattcacccttcaacaggcaggaagcaagccgtacccagaccagtaggccggacggagtccaatgcaaagctgtaccacagaattcagagtccagcacatcacactgacgtataggactccttgggatacaggtttattgtagattttgaaacatgtttttacttttctattaattgtgcaattaatagtctattttctaatttaccactactcctaccctgcttcctggaacaatactgttgtgggtaggatgtgctcatcttcagacttaatacagcaataagaatgtgctagagtttacacatctgttcacttttgctccaatatgctcttttgacttaacgtcaagctttgggttgatgtgggtagggtagtgtcaaactgctttgagaggaatgggaccagttctgctgcctaagaaggtctgtctggatgtttataggcagcacctctgaagtggcctaaattcaccctgatctgatagttttcctgcttagaaagtgtgccttggccagatcagtatcccacatgggagtgttccctaggttgtagctgtgattgtttccagatgaccagattgtttttctgaaaatgagcatatttttagtcatgtcgattagctgttcttctacatcacattgttactctttctgatgatgattctagggttaacattggaaccatctcaaaataattacaaagttttagatgggtttacaatgtcttctaaacaatgtaatctaaaaataattgagtcagatgctaacgagatactgcaggcataactgctgtttttctgacaactgattgtgaaaccttaaaacctgcatacctcttcttacagtgaggagtatgcaaaatctggaaagatattctattttttttatataggtagataggatcgccatttatttcctatttagatatactgacattcatccatatgaaaatatgcaggtcattagcttactataatttacttttgacttaatggggcataaataaaactttcatagtacacatgaggtggatatttgatacacagaacatttgcggtgggctttctgtgggttagatgtaaagcccacatattttaatattcactattttaaatgagcaatgcatgaggggaatgcagtgtcagtacctggcctatttttaaactagtgtaatcaccctagtcataccattcagtatgtttgctttttaaaataagtaaccacaactaagttgttgtagcccttgcacttcaagagatctagtctttactttcagttgtctgttaggtccattctgtttactagacggatgttaataaaaactatgcgagcctgaatgaattctcagccaaatttagtcttgtctctcatcttgattggattaattccaaattctaaaatgattcagtccacaatagctctaggggatgaagaatttgccttactttgcccagttcctaagactgtgagttgtcaaatccctagactgtaagctcttcaaggagcaagaggcgcattttctccgtgtcatgtaatttttctaaggtgcttggcagcactctgtaccctgtggagtactcagtaccttttgtttgatgttgctgacaagacctgaaaaaaaatcccttaaaaaaaaaacccattaaagtgtagcaaaaccgatgtattattttttctcttttctcataaaccataagatatgtatatcaaaatgataatttatatgaagcatctgctatccttcacataagtatagtttatatgaactacaaatacctttcatcaacattaaagaagcttaaattgaa

SEQ ID NO: 110569 - DNA, 1072 bp, Homo sapiens
  Payload ID: 1684
  Gene Symbol: AIDA
  Gene Name: axin interactor, dorsalization associated
  Uniprot ID: Q96BJ3
  ENST ID: ENST00000355727
  CDS Start-End: 112-786
tagcggttcctcctggccctgttaatgtcggggccaggccgggggaggatggcgccctagaacccggccttgctggggtaggggcgggaggggacggggtggggaccggccatgtcggaggtgacccggagtctgctgcagcgctggggcgccagttttaggagaggcgccgacttcgactcttggggccagctggtggaggcgatagacgagtatcagatattagcaagacatctacaaaaggaggcccaagctcaacacaataattctgaattcacagaagaacaaaagaaaaccataggcaaaattgcaacatgcttggaattgcgaagtgcagctttacagtccacacagtctcaagaagaatttaaactggaggacctgaagaagctagaaccaatcctaaagaatattcttacatataataaagaattcccatttgatgttcagcctgtcccattaagaagaattttggcacctggtgaagaagagaatttggaatttgaagaagatgaagaagagggtggtgctggagcagggtctcctgattcttttcctgctagagttcccggtgcagctatcttctttgaattcaaacactacaagcctaaaaaaaggtttaccagcaccaagtgttttgctttcatggagatggatgaaattaaacctgggccaattgtaatagaactatacaagaaacccactgactttaaaagaaagaaattgcaattattgaccaagaaaccactttatcttcatctacatcaaactttgcacaaggaatgatcctgacatgatgaacctggaacttctgtgaattttaccactcagtagaaaccatcatagctctgtgtagcatattcacccttcaacaggcaggaagcaagccgtacccagaccagtaggccggacggagtccaatgcaaagctgtaccacagaattcagagtccagcacatcacactgacgtataggactccttgggatacaggtttattgtagattttgaaacatgtttttacttttctattaattgtgcaattaatagtctattttctaatttaccactactc

SEQ ID NO: 110570 - DNA, 4737 bp, Homo sapiens
  Payload ID: 1685
  Gene Symbol: AXL
  Gene Name: AXL receptor tyrosine kinase
  Uniprot ID: P30530
  ENST ID: ENST00000301178
  CDS Start-End: 191-2875
gggaaggaggcaggggtgctgagaaggcggctgctgggcagagccggtggcaagggcctcccctgccgctgtgccaggcaggcagtgccaaatccggggagcctggagctggggggagggccggggacagcccggccctgccccctcccccgctgggagcccaacaacttctgaggaaagtttggcacccatggcgtggcggtgccccaggatgggcagggtcccgctggcctggtgcttggcgctgtgcggctgggcgtgcatggcccccaggggcacgcaggctgaagaaagtcccttcgtgggcaacccagggaatatcacaggtgcccggggactcacgggcacccttcggtgtcagctccaggttcagggagagccccccgaggtacattggcttcgggatggacagatcctggagctcgcggacagcacccagacccaggtgcccctgggtgaggatgaacaggatgactggatagtggtcagccagctcagaatcacctccctgcagctttccgacacgggacagtaccagtgtttggtgtttctgggacatcagaccttcgtgtcccagcctggctatgttgggctggagggcttgccttacttcctggaggagcccgaagacaggactgtggccgccaacacccccttcaacctgagctgccaagctcagggacccccagagcccgtggacctactctggctccaggatgctgtccccctggccacggctccaggtcacggcccccagcgcagcctgcatgttccagggctgaacaagacatcctctttctcctgcgaagcccataacgccaagggggtcaccacatcccgcacagccaccatcacagtgctcccccagcagccccgtaacctccacctggtctcccgccaacccacggagctggaggtggcttggactccaggcctgagcggcatctaccccctgacccactgcaccctgcaggctgtgctgtcagacgatgggatgggcatccaggcgggagaaccagaccccccagaggagcccctcacctcgcaagcatccgtgcccccccatcagcttcggctaggcagcctccatcctcacaccccttatcacatccgcgtggcatgcaccagcagccagggcccctcatcctggacccactggcttcctgtggagacgccggagggagtgcccctgggcccccctgagaacattagtgctacgcggaatgggagccaggccttcgtgcattggcaagagccccgggcgcccctgcagggtaccctgttagggtaccggctggcgtatcaaggccaggacaccccagaggtgctaatggacatagggctaaggcaagaggtgaccctggagctgcagggggacgggtctgtgtccaatctgacagtgtgtgtggcagcctacactgctgctggggatggaccctggagcctcccagtacccctggaggcctggcgcccagggcaagcacagccagtccaccagctggtgaaggaaccttcaactcctgccttctcgtggccctggtggtatgtactgctaggagcagtcgtggccgctgcctgtgtcctcatcttggctctcttccttgtccaccggcgaaagaaggagacccgttatggagaagtgtttgaaccaacagtggaaagaggtgaactggtagtcaggtaccgcgtgcgcaagtcctacagtcgtcggaccactgaagctaccttgaacagcctgggcatcagtgaagagctgaaggagaagctgcgggatgtgatggtggaccggcacaaggtggccctggggaagactctgggagagggagagtttggagctgtgatggaaggccagctcaaccaggacgactccatcctcaaggtggctgtgaagacgatgaagattgccatctgcacgaggtcagagctggaggatttcctgagtgaagcggtctgcatgaaggaatttgaccatcccaacgtcatgaggctcatcggtgtctgtttccagggttctgaacgagagagcttcccagcacctgtggtcatcttacctttcatgaaacatggagacctacacagcttcctcctctattcccggctcggggaccagccagtgtacctgcccactcagatgctagtgaagttcatggcagacatcgccagtggcatggagtatctgagtaccaagagattcatacaccgggacctggcggccaggaactgcatgctgaatgagaacatgtccgtgtgtgtggcggacttcgggctctccaagaagatctacaatggggactactaccgccagggacgtatcgccaagatgccagtcaagtggattgccattgagagtctagctgaccgtgtctacaccagcaagagcgatgtgtggtccttcggggtgacaatgtgggagattgccacaagaggccaaaccccatatccgggcgtggagaacagcgagatttatgactatctgcgccagggaaatcgcctgaagcagcctgcggactgtctggatggactgtatgccttgatgtcgcggtgctgggagctaaatccccaggaccggccaagttttacagagctgcgggaagatttggagaacacactgaaggccttgcctcctgcccaggagcctgacgaaatcctctatgtcaacatggatgagggtggaggttatcctgaaccccctggagctgcaggaggagctgaccccccaacccagccagaccctaaggattcctgtagctgcctcactgcggctgaggtccatcctgctggacgctatgtcctctgcccttccacaacccctagccccgctcagcctgctgataggggctccccagcagccccagggcaggaggatggtgcctgagacaaccctccacctggtactccctctcaggatccaagctaagcactgccactggggaaaactccaccttcccactttcccaccccacgccttatccccacttgcagccctgtcttcctacctatcccacctccatcccagacaggtccctccccttctctgtgcagtagcatcaccttgaaagcagtagcatcaccatctgtaaaaggaaggggttggattgcaatatctgaagccctcccaggtgttaacattccaagactctagagtccaaggtttaaagagtctagattcaaaggttctaggtttcaaagatgctgtgagtctttggttctaaggacctgaaattccaaagtctctaattctattaaagtgctaaggttctaaggcctactttttttttttttttttttttttttttttttgcgatagagtctcactgtgtcacccaggctggagtgcagtggtgcaatctcgcctcactgcaaccttcacctaccgagttcaagtgattttcctgccttggcctcccaagtagctgggattacaggtgtgtgccaccacacccggctaatttttatatttttagtagagacagggtttcaccatgttggccaggctggtctaaaactcctgacctcaagtgatctgcccacctcagcctcccaaagtgctgagattacaggcatgagccactgcactcaaccttaagacctactgttctaaagctctgacattatgtggttttagattttctggttctaacatttttgataaagcctcaaggttttaggttctaaagttctaagattctgattttaggagctaaggctctatgagtctagatgtttattcttctagagttcagagtccttaaaatgtaagattatagattctaaagattctatagttctagacatggaggttctaaggcctaggattctaaaatgtgatgttctaaggctctgagagtctagattctctggctgtaaggctctagatcataaggcttcaaaatgttatcttctcaagttctaagattctaatgatgatcaattatagtttctgaggctttatgataatagattctcttgtataagatcctagatcctaagggtcgaaagctctagaatctgcaattcaaaagttccaagagtctaaagatggagtttctaaggtccggtgttctaagatgtgatattctaagacttactctaagatcttagattctctgtgtctaagattctagatcagatgctccaagattctagatgattaaataagattctaacggtctgttctgtttcaaggcactctagattccattggtccaagattccggatcctaagcatctaagttataagactctcacactcagttgtgactaactagacaccaaagttctaataatttctaatgttggacacctttaggttctttgctgcattctgcctctctaggaccatggttaagagtccaagaatccacatttctaaaatcttatagttctaggcactgtagttctaagactcaaatgttctaagtttctaagattctaaaggtccacaggtctagactattaggtgcaatttcaaggttctaaccctatactgtagtattctttggggtgcccctctccttcttagctatcattgcttcctcctccccaactgtgggggtgtgcccccttcaagcctgtgcaatgcattagggatgcctcctttcccgcaggggatggacgatctcccacctttcgggccatgttgcccccgtgagccaatccctcaccttctgagtacagagtgtggactctggtgcctccagaggggctcaggtcacataaaactttgtatatcaacga

SEQ ID NO: 110571 - DNA, 3206 bp, Homo sapiens
  Payload ID: 1685
  Gene Symbol: AXL
  Gene Name: AXL receptor tyrosine kinase
  Uniprot ID: P30530
  ENST ID: ENST00000359092
  CDS Start-End: 159-2816
gctgggcagagccggtggcaagggcctcccctgccgctgtgccaggcaggcagtgccaaatccggggagcctggagctggggggagggccggggacagcccggccctgccccctcccccgctgggagcccaacaacttctgaggaaagtttggcacccatggcgtggcggtgccccaggatgggcagggtcccgctggcctggtgcttggcgctgtgcggctgggcgtgcatggcccccaggggcacgcaggctgaagaaagtcccttcgtgggcaacccagggaatatcacaggtgcccggggactcacgggcacccttcggtgtcagctccaggttcagggagagccccccgaggtacattggcttcgggatggacagatcctggagctcgcggacagcacccagacccaggtgcccctgggtgaggatgaacaggatgactggatagtggtcagccagctcagaatcacctccctgcagctttccgacacgggacagtaccagtgtttggtgtttctgggacatcagaccttcgtgtcccagcctggctatgttgggctggagggcttgccttacttcctggaggagcccgaagacaggactgtggccgccaacacccccttcaacctgagctgccaagctcagggacccccagagcccgtggacctactctggctccaggatgctgtccccctggccacggctccaggtcacggcccccagcgcagcctgcatgttccagggctgaacaagacatcctctttctcctgcgaagcccataacgccaagggggtcaccacatcccgcacagccaccatcacagtgctcccccagcagccccgtaacctccacctggtctcccgccaacccacggagctggaggtggcttggactccaggcctgagcggcatctaccccctgacccactgcaccctgcaggctgtgctgtcagacgatgggatgggcatccaggcgggagaaccagaccccccagaggagcccctcacctcgcaagcatccgtgcccccccatcagcttcggctaggcagcctccatcctcacaccccttatcacatccgcgtggcatgcaccagcagccagggcccctcatcctggacccactggcttcctgtggagacgccggagggagtgcccctgggcccccctgagaacattagtgctacgcggaatgggagccaggccttcgtgcattggcaagagccccgggcgcccctgcagggtaccctgttagggtaccggctggcgtatcaaggccaggacaccccagaggtgctaatggacatagggctaaggcaagaggtgaccctggagctgcagggggacgggtctgtgtccaatctgacagtgtgtgtggcagcctacactgctgctggggatggaccctggagcctcccagtacccctggaggcctggcgcccagtgaaggaaccttcaactcctgccttctcgtggccctggtggtatgtactgctaggagcagtcgtggccgctgcctgtgtcctcatcttggctctcttccttgtccaccggcgaaagaaggagacccgttatggagaagtgtttgaaccaacagtggaaagaggtgaactggtagtcaggtaccgcgtgcgcaagtcctacagtcgtcggaccactgaagctaccttgaacagcctgggcatcagtgaagagctgaaggagaagctgcgggatgtgatggtggaccggcacaaggtggccctggggaagactctgggagagggagagtttggagctgtgatggaaggccagctcaaccaggacgactccatcctcaaggtggctgtgaagacgatgaagattgccatctgcacgaggtcagagctggaggatttcctgagtgaagcggtctgcatgaaggaatttgaccatcccaacgtcatgaggctcatcggtgtctgtttccagggttctgaacgagagagcttcccagcacctgtggtcatcttacctttcatgaaacatggagacctacacagcttcctcctctattcccggctcggggaccagccagtgtacctgcccactcagatgctagtgaagttcatggcagacatcgccagtggcatggagtatctgagtaccaagagattcatacaccgggacctggcggccaggaactgcatgctgaatgagaacatgtccgtgtgtgtggcggacttcgggctctccaagaagatctacaatggggactactaccgccagggacgtatcgccaagatgccagtcaagtggattgccattgagagtctagctgaccgtgtctacaccagcaagagcgatgtgtggtccttcggggtgacaatgtgggagattgccacaagaggccaaaccccatatccgggcgtggagaacagcgagatttatgactatctgcgccagggaaatcgcctgaagcagcctgcggactgtctggatggactgtatgccttgatgtcgcggtgctgggagctaaatccccaggaccggccaagttttacagagctgcgggaagatttggagaacacactgaaggccttgcctcctgcccaggagcctgacgaaatcctctatgtcaacatggatgagggtggaggttatcctgaaccccctggagctgcaggaggagctgaccccccaacccagccagaccctaaggattcctgtagctgcctcactgcggctgaggtccatcctgctggacgctatgtcctctgcccttccacaacccctagccccgctcagcctgctgataggggctccccagcagccccagggcaggaggatggtgcctgagacaaccctccacctggtactccctctcaggatccaagctaagcactgccactggggaaaactccaccttcccactttcccaccccacgccttatccccacttgcagccctgtcttcctacctatcccacctccatcccagacaggtccctccccttctctgtgcagtagcatcaccttgaaagcagtagcatcaccatctgtaaaaggaaggggttggattgcaatatctgaagccctcccaggtgttaacattccaagactctagagtccaaggtttaaagagtctagattcaaaggttctaggtttcaaagatgctgtgagtctttggttctaaggacctgaaattccaaagtctctaattctattaaagtgctaaggttctaaggc

SEQ ID NO: 110572 - DNA, 2557 bp, Homo sapiens
  Payload ID: 1685
  Gene Symbol: AXL
  Gene Name: AXL receptor tyrosine kinase
  ENST ID: ENST00000593513
  CDS Start-End: 377-2257
agcacacgcgtaaacaacacgcagaactgcagtcgcacttacaagacttggtcccagggccgggcaccgagtggctctgcctgcgatccagcactttgggaggccgaggcgggaggatcgcttggggccagaagtttgagagcagcctgggcaacgtgggctgaacaagacatcctctttctcctgcgaagcccataacgccaagggggtcaccacatcccgcacagccaccatcacagtgctcccccagcagccccgtaacctccacctggtctcccgccaacccacggagctggaggtggcttggactccaggcctgagcggcatctaccccctgacccactgcaccctgcaggctgtgctgtcagacgatgggatgggcatccaggcgggagaaccagaccccccagaggagcccctcacctcgcaagcatccgtgcccccccatcagcttcggctaggcagcctccatcctcacaccccttatcacatccgcgtggcatgcaccagcagccagggcccctcatcctggacccactggcttcctgtggagacgccggagggagtgcccctgggcccccctgagaacattagtgctacgcggaatgggagccaggccttcgtgcattggcaagagccccgggcgcccctgcagggtaccctgttagggtaccggctggcgtatcaaggccaggacaccccagaggtgctaatggacatagggctaaggcaagaggtgaccctggagctgcagggggacgggtctgtgtccaatctgacagtgtgtgtggcagcctacactgctgctggggatggaccctggagcctcccagtacccctggaggcctggcgcccagggcaagcacagccagtccaccagctggtgaaggaaccttcaactcctgccttctcgtggccctggtggtatgtactgctaggagcagtcgtggccgctgcctgtgtcctcatcttggctctcttccttgtccaccggcgaaagaaggagacccgttatggagaagtgtttgaaccaacagtggaaagaggtgaactggtagtcaggtaccgcgtgcgcaagtcctacagtcgtcggaccactgaagctaccttgaacagcctgggcatcagtgaagagctgaaggagaagctgcgggatgtgatggtggaccggcacaaggtggccctggggaagactctgggagagggagagtttggagctgtgatggaaggccagctcaaccaggacgactccatcctcaaggtggctgtgaagacgatgaagattgccatctgcacgaggtcagagctggaggatttcctgagtgaagcggtctgcatgaaggaatttgaccatcccaacgtcatgaggctcatcggtgtctgtttccagggttctgaacgagagagcttcccagcacctgtggtcatcttacctttcatgaaacatggagacctacacagcttcctcctctattcccggctcggggaccagccagtgtacctgcccactcagatgctagtgaagttcatggcagacatcgccagtggcatggagtatctgagtaccaagagattcatacaccgggacctggcggccaggaactgcatgctgaatgagaacatgtccgtgtgtgtggcggacttcgggctctccaagaagatctacaatggggactactaccgccagggacgtatcgccaagatgccagtcaagtggattgccattgagagtctagctgaccgtgtctacaccagcaagagcgatgtgtggtccttcggggtgacaatgtgggagattgccacaagaggccaaaccccatatccgggcgtggagaacagcgagatttatgactatctgcgccagggaaatcgcctgaagcagcctgcggactgtctggatggactgtatgccttgatgtcgcggtgctgggagctaaatccccaggaccggccaagttttacagagctgcgggaagatttggagaacacactgaaggccttgcctcctgcccaggagcctgacgaaatcctctatgtcaacatggatgagggtggaggttatcctgaaccccctggagctgcaggaggagctgaccccccaacccagccagaccctaaggattcctgtagctgcctcactgcggctgaggtccatcctgctggacgctatgtcctctgcccttccacaacccctagccccgctcagcctgctgataggggctccccagcagccccagggcaggaggatggtgcctgagacaaccctccacctggtactccctctcaggatccaagctaagcactgccactggggaaaactccaccttcccactttcccaccccacgccttatccccacttgcagccctgtcttcctacctatcccacctccatcccagacaggtccctccccttctctgtgcagtagcatcaccttgaaagcagtagcatcaccatctgtaaaaggaaggggttggattgcaatatctgaagccctcccaggtgttaacattccaagactctagagtccaaggtttaaagagtctagattcaaaggt

SEQ ID NO: 110573 - DNA, 3642 bp, Homo sapiens
  Payload ID: 1686
  Gene Symbol: AXDND1
  Gene Name: axonemal dynein light chain domain containing 1
  Uniprot ID: Q5T1B0
  ENST ID: ENST00000367618
  CDS Start-End: 388-3426
actggcctggcccgcggcaggaagccccggcgtgagacactttcggattccgtgacaacggcgggattaaacgtttttcttctcctttgctactgaacctatgctgtgacttagaacataagaaactccaagagggtgtagggattgtcttagctgtctccctcctccgccggcaccgctgaaggcagcccctatggagggcgctaaacctcggggccctgggtttctatgacgacaaacaggcgttccagcaaaggaggaagtgagcggatgctgggcgggactatgtggcagcctgcaagtcccagtgcggcgctgatttgtgtctaaattagctttccggaggactatttcaaattactaaagagataggaggcattgtttattatgtctctcccgaaaacgccctccaccccgctaaactctacatcaacatctgagagcaaaaagttaaaagtgtctgtagccaaggaagggacaagaggacttcctgagctaaaggagaaaaaaaatatggtggatcgttcaaaactccttcctacttcccttcagaatgagttcattcccaaagaagttcttctttctctgacctatgcggccaatgctggtccttgtcctgaaaacttactacctcctaagaaaattaaaaccccaaagggcactcttccacgccttgtagaccatgtctggcatcaccctgttcgaaggaataaattcaaatacctgattgaccatcccgtctccctcacaggagctggaagggatatttcttttctgtacgatgtaacatatgccaaaggacagactagggagaaggcagtttgtcccccacatttggcccgttcattacagtcacatgatggtgtcattgtgccccataagccaaagacactaacagatactttgattcctgaagaatttcatattgtgtcaagtacaggagtttcaggtttggagtgttatgatgacaaatacactactctcctcacagatagtgaaaacaggctattgctcttcccatccatgaaacctaataaaagagtagaagtggcccagctgaatgatgtgatggatactatgctagagagggctggtgtggaaaatcaggaatatacaggaccaacgaagatgcacaaactactacatatattgaagaaggaacagaccatttacaacatgatatttcatgaacttattcgacaagtcagtgtggactgtgcagacagaggagaacttctgtctaaagtcagagagaggtatgtgcaaatgcttgaccagattgctcggcagatgattgatttctacaaagacttggtaactcagcgagtgatggaccagcgcattttagaagaattgtataatttcaagcatgttattgaagaactgaccagggaactgtgtctagttcgggcacatgatgtgaaattaacaaaggaaacagaaaaagcccacaaggatttggcacaagctcttttaaatgcggaaaagaatgccaaaatagtagaagaatatcatgacttatatacattacaaagagaaaggatggagaatgatatgaaaaagttagtggcagaaagagatatctggagctcagccacatatgaattggccctgaaggtgattgaaagaaatagagtcatattggctagaagactttaccttaatgaaaaaggctggaataaatacactaagcatttcatcatactgctatcaaacaaggacactgaagaccttgcactgttgcagaagttgacacaaaaatggagaaacttagtgaataaacttaaacaagaggtagaacaaatggaagagtctacaagcgagacactgaaaattgttaaggatgggcttatcaaatggcaggagttcttcaatgaaaaagacattttatcccctaataagggaaatatatttaattcagttcttttagacttcaaacagtggcagaagatcctgaatgagaaaaaagaagagtttactggggatgttctactgtcaaaatacgatactctcaagattattaaacatttacaggaaaactgggcagatattgggcttgggatatttaatcggcataaaagtttggagggggagatgccatcagagcgacagtacatggaggaaattatcaaaaacatacaaaaactctacaaagaatatgaaataagaataaatggggacaatggttactccaaaattcttccaagtttgattagttctcttgacttctgttctttcaagttggaaaacctggagtttcctgatacgcctcttgaagaatggcaggaaatagatgaaaaaattaatgaaatgaaatcacacttggatatattgttaaaccttactggtattgttccacagcacatagatgtggattctgtttcggtactccaagcgtatatatttaacatgattcaacaatggcttttgaagataggcaatgaaattaacaacggtaacattgaacttcagcaccacatggatgagttacatatatctatgatccagtggatggtaaacttgctgattttaatgatacccaactttactgaccaagactgtctcctaaagttggaggaggaaagtgctgagaaacatgatataggagttgcgcgattggagctagatgcgattgaactgacaaggaagttgtaccaatactccagctatttgagcagttgttgcaaagggatggtaacagcaatggctctgagtaaatccactaactcacacaaaaatgctactgaagacctttatgaggtggataagttgaagaaagaatgttatgaatggatcaacacatgctcttgcctcctttctaatatcaaaggcagaaaaattacattattgacatatgaagaaatagagcggctacttgaagaggaggctgtaaaagaattcattgagcctgaaatagacgagtcttttaaagaagatgaagaagaaagtaaggaggataggaaacttcaggaggaaaataaagagagagcagaagaacaaccttcaacatctacagagaaggaaaaactcattcgattcattggagaagatgaaaatgttcattccaaacctctatttgaaacagatgtgttgtcttcctggagagagtcagctaagcaaggtacattggcccaaaaatatcttgaagcaatggctgtaattgaacatatgcaggagaagttactggaggttgaaaatagagccagacaggcagaggagaagtttgaagatgcatatgagaaacttcatcatacccttataaaaaataaagatctagaggaattagtcatgacatcaagaaaggagtctaaagaagagaaagaaaatcaagatgaaagagaagtaaaagaagaagaagaacaacaagaagaagaagaagtcaggtcagcagaaaattcctcaaaatctccaaagaaaggtcactgaatccaaggcaacctgtggaaagaagaattcagatgtcagtgggagcctccaggtgggaggagagcatgcctaaaccctggtggccattgttctgtactaaggaacaacattccctttgaaaggacattatttgcctgttgtatttaacttcacagtgccttgcaaagagttgtttaacttgcatggtgccacccaataaatatctgtgcaattgaa

SEQ ID NO: 110574 - DNA, 2835 bp, Homo sapiens
  Payload ID: 1686
  Gene Symbol: AXDND1
  Gene Name: axonemal dynein light chain domain containing 1
  ENST ID: ENST00000434088
  CDS Start-End: 1-2619
ctgacctatgcggccaatgctggtccttgtcctgaaaacttactacctcctaagaaaattaaaaccccaaagggcactcttccacgccttgtagaccatgtctggcatcaccctgttcgaaggaataaattcaaatacctgattgaccatcccgtctccctcacaggagctggaagggatatttcttttctgtacgatgtaacatatgccaaaggacagactagggagaaggcagtttgtcccccacatttggcccgttcattacagtcacatgatggtgtcattgtgccccataagccaaagacactaacagatactttgattcctgaagaatttcatattgtgtcaagtacaggagtttcaggtttggagtgttatgatgacaaatacactactctcctcacagatagtgaaaacaggctattgctcttcccatccatgaaacctaataaaagagtagaagtggcccagctgaatgatgtgatggatactatgctagagagggctggtgtggaaaatcaggaatatacaggaccaacgaagatgcacaaactactacatatattgaagaaggaacagaccatttacaacatgatatttcatgaacttattcgacaagtcagtgtggactgtgcagacagaggagaacttctgtctaaagtcagagagaggtatgtgcaaatgcttgaccagattgctcggcagatgattgatttctacaaagacttggtaactcagcgagtgatggaccagcgcattttagaagaattgtataatttcaagcatgttattgaagaactgaccagggaactgtgtctagttcgggcacatgatgtgaaattaacaaaggaaacagaaaaagcccacaaggatttggcacaagctcttttaaatgcggaaaagaatgccaaaatagtagaagaatatcatgacttatatacattacaaagagaaaggatggagaatgatatgaaaaagttagtggcagaaagagatatctggagctcagccacatatgaattggccctgaaggtgattgaaagaaatagagtcatattggctagaagactttaccttaatgaaaaaggctggaataaatacactaagcatttcatcatactgctatcaaacaaggacactgaagaccttgcactgttgcagaagttgacacaaaaatggagaaacttagtgaataaacttaaacaagaggtagaacaaatggaagagtctacaagcgagacactgaaaattgttaaggatgggcttatcaaatggcaggagttcttcaatgaaaaagacattttatcccctaataagggaaatatatttaattcagttcttttagacttcaaacagtggcagaagatcctgaatgagaaaaaagaagagtttactggggatgttctactgtcaaaatacgatactctcaagattattaaacatttacaggaaaactgggcagatattgggcttgggatatttaatcggcataaaagtttggagggggagatgccatcagagcgacagtacatggaggaaattatcaaaaacatacaaaaactctacaaagaatatgaaataagaataaatggggacaatggttactccaaaattcttccaagtttgattagttctcttgacttctgttctttcaagttggaaaacctggagtttcctgatacgcctcttgaagaatggcaggaaatagatgaaaaaattaatgaaatgaaatcacacttggatatattgttaaaccttactggtattgttccacagcacatagatgtggattctgtttcggtactccaagcgtatatatttaacatgattcaacaatggcttttgaagataggcaatgaaattaacaacggtaacattgaacttcagcaccacatggatgagttacatatatctatgatccagtggatggtaaacttgctgattttaatgatacccaactttactgaccaagactgtctcctaaagttggaggaggaaagtgctgagaaacatgatataggagttgcgcgattggagctagatgcgattgaactgacaaggaagttgtaccaatactccagctatttgagcagttgttgcaaagggatggtaacagcaatggctctgagtaaatccactaactcacacaaaaatgctactgaagacctttatgaggtggataagttgaagcaaccttcaacatctacagagaaggaaaaactcattcgattcattggagaagatgaaaatgttcattccaaacctctatttgaaacagatgtgttgtcttcctggagagagtcagctaagcaaggtacattggcccaaaaatatcttgaagcaatggctgtaattgaacatatgcaggagaagttactggaggttgaaaatagagccagacaggcagaggagaagtttgaagatgcatatgagaaacttcatcatacccttataaaaaataaagatctagaggaattagtcatgacatcaagaaaggagtctaaagaagagaaagaaaatcaagatgaaagagaagtaaaagaagaagaagaacaacaagaagaagaagaagtcaggtcagcagaaaattcctcaaaatctccaaagaaaggtcactgaatccaaggcaacctgtggaaagaagaattcagatgtcagtgggagcctccaggtgggaggagagcatgcctaaaccctggtggccattgttctgtactaaggaacaacattccctttgaaaggacattatttgcctgttgtatttaacttcacagtgccttgcaaagagttgtttaacttgcatggtgccacccaataaatatctgtgcaattgaa

SEQ ID NO: 110575 - DNA, 3638 bp, Homo sapiens
  Payload ID: 1686
  Gene Symbol: AXDND1
  Gene Name: axonemal dynein light chain domain containing 1
  ENST ID: ENST00000457238
  CDS Start-End: 388-2406
actggcctggcccgcggcaggaagccccggcgtgagacactttcggattccgtgacaacggcgggattaaacgtttttcttctcctttgctactgaacctatgctgtgacttagaacataagaaactccaagagggtgtagggattgtcttagctgtctccctcctccgccggcaccgctgaaggcagcccctatggagggcgctaaacctcggggccctgggtttctatgacgacaaacaggcgttccagcaaaggaggaagtgagcggatgctgggcgggactatgtggcagcctgcaagtcccagtgcggcgctgatttgtgtctaaattagctttccggaggactatttcaaattactaaagagataggaggcattgtttattatgtctctcccgaaaacgccctccaccccgctaaactctacatcaacatctgagagcaaaaagttaaaagtgtctgtagccaaggaagggacaagaggacttcctgagctaaaggagaaaaaaaatatggtggatcgttcaaaactccttcctacttcccttcagaatgagttcattcccaaagaagttcttctttctctgacctatgcggccaatgctggtccttgtcctgaaaacttactacctcctaagaaaattaaaaccccaaagggcactcttccacgccttgtagaccatgtctggcatcaccctgttcgaaggaataaattcaaatacctgattgaccatcccgtctccctcacaggagctggaagggatatttcttttctgtacgatgtaacatatgccaaaggacagactagggagaaggcagtttgtcccccacatttggcccgttcattacagtcacatgatggtgtcattgtgccccataagccaaagacactaacagatactttgattcctgaagaatttcatattgtgtcaagtacaggagtttcaggtttggagtgttatgatgacaaatacactactctcctcacagatagtgaaaacaggctattgctcttcccatccatgaaacctaataaaagagtagaagtggcccagctgaatgatgtgatggatactatgctagagagggctggtgtggaaaatcaggaatatacaggaccaacgaagatgcacaaactactacatatattgaagaaggaacagaccatttacaacatgatatttcatgaacttattcgacaagtcagtgtggactgtgcagacagaggagaacttctgtctaaagtcagagagaggtatgtgcaaatgcttgaccagattgctcggcagatgattgatttctacaaagacttggtaactcagcgagtgatggaccagcgcattttagaagaattgtataatttcaagcatgttattgaagaactgaccagggaactgtgtctagttcgggcacatgatgtgaaattaacaaaggaaacagaaaaagcccacaaggatttggcacaagctcttttaaatgcggaaaagaatgccaaaatagtagaagaatatcatgacttatatacattacaaagagaaaggatggagaatgatatgaaaaagttagtggcagaaagagatatctggagctcagccacatatgaattggccctgaaggtgattgaaagaaatagagtcatattggctagaagactttaccttaatgaaaaaggctggaataaatacactaagcatttcatcatactgctatcaaacaaggacactgaagaccttgcactgttgcagaagttgacacaaaaatggagaaacttagtgaataaacttaaacaagaggtagaacaaatggaagagtctacaagcgagacactgaaaattgttaaggatgggcttatcaaatggcaggagttcttcaatgaaaaagacattttatcccctaataagggaaatatatttaattcagttcttttagacttcaaacagtggcagaagatcctgaatgagaaaaaagaagagtttactggggatgttctactgtcaaaatacgatactctcaagattattaaacatttacaggaaaactgggcagatattgggcttgggatatttaatcggcataaaagtttggagggggagatgccatcagagcgacagtacatggaggaaattatcaaaaacatacaaaaactctacaaagaatatgaaataagaataaatggggacaatggttactccaaaattcttccaagtttgattagttctcttgacttctgttctttcaagttggaaaacctggagtttcctgatacgcctcttgaagaatggcaggaaatagatgaaaaaattaatgaaatgaaatcacacttggatatattgttaaaccttactggttgttccacagcacatagatgtggattctgtttcggtactccaagcgtatatatttaacatgattcaacaatggcttttgaagataggcaatgaaattaacaacggtaacattgaacttcagcaccacatggatgagttacatatatctatgatccagtggatggtaaacttgctgattttaatgatacccaactttactgaccaagactgtctcctaaagttggaggaggaaagtgctgagaaacatgatataggagttgcgcgattggagctagatgcgattgaactgacaaggaagttgtaccaatactccagctatttgagcagttgttgcaaagggatggtaacagcaatggctctgagtaaatccactaactcacacaaaaatgctactgaagacctttatgaggtggataagttgaagaaagaatgttatgaatggatcaacacatgctcttgcctcctttctaatatcaaaggcagaaaaattacattattgacatatgaagaaatagagcggctacttgaagaggaggctgtaaaagaattcattgagcctgaaatagacgagtcttttaaagaagatgaagaagaaagtaaggaggataggaaacttcaggaggaaaataaagagagagcagaagaacaaccttcaacatctacagagaaggaaaaactcattcgattcattggagaagatgaaaatgttcattccaaacctctatttgaaacagatgtgttgtcttcctggagagagtcagctaagcaaggtacattggcccaaaaatatcttgaagcaatggctgtaattgaacatatgcaggagaagttactggaggttgaaaatagagccagacaggcagaggagaagtttgaagatgcatatgagaaacttcatcatacccttataaaaaataaagatctagaggaattagtcatgacatcaagaaaggagtctaaagaagagaaagaaaatcaagatgaaagagaagtaaaagaagaagaagaacaacaagaagaagaagaagtcaggtcagcagaaaattcctcaaaatctccaaagaaaggtcactgaatccaaggcaacctgtggaaagaagaattcagatgtcagtgggagcctccaggtgggaggagagcatgcctaaaccctggtggccattgttctgtactaaggaacaacattccctttgaaaggacattatttgcctgttgtatttaacttcacagtgccttgcaaagagttgtttaacttgcatggtgccacccaataaatatctgtgcaattg

SEQ ID NO: 110576 - DNA, 586 bp, Homo sapiens
  Payload ID: 1686
  Gene Symbol: AXDND1
  Gene Name: axonemal dynein light chain domain containing 1
  ENST ID: ENST00000508229
  CDS Start-End: 351-586
aggaagccccggcgtgagacactttcggattccgtgacaacggcgggattaaacgtttttcttctcctttgctactgaacctatgctgtgacttagaacataagaaactccaagagggtgtagggattgtcttagctgtctccctcctccgccggcaccgctgaaggcagcccctatggagggcgctaaacctcggggccctgggtttctatgacgacaaacaggcgttccagcaaaggaggaagactatgtggcagcctgcaagtcccagtgcggcgctgatttgtgtctaaattagctttccggaggactatttcaaattactaaagagataggaggcattgtttattatgtctctcccgaaaacgccctccaccccgctaaactctacatcaacatctgagagcaaaaagttaaaagtgtctgtagccaaggaagggacaagaggacttcctgagctaaaggagaaaaaaaatatggtggatcgttcaaaactccttcctacttcccttcagaatgagttcattcccaaagaagttcttctttctctgacctatgcggccaatgctggtccttgtcctgaaaa

SEQ ID NO: 110577 - DNA, 3375 bp, Homo sapiens
  Payload ID: 1686
  Gene Symbol: AXDND1
  Gene Name: axonemal dynein light chain domain containing 1
  ENST ID: ENST00000511157
  CDS Start-End: 262-1851
aaaggaggaagtgagcggatgctgggcgggtacgcaatgtgtgggtaggatcgcgggtgtccctttcccgtcattttaaaccaagaagcagtgcgaggcctgcccaactcgcgagtttgtggaactggcgcgcgagagcgctgcctgtggggaaggactatgtggcagcctgcaagtcccagtgcggcgctgatttgtgtctaaattagctttccggaggactatttcaaattactaaagagataggaggcattgtttattatgtctctcccgaaaacgccctccaccccgctaaactctacatcaacatctgagagcaaaaagttaaaagtgtctgtagccaaggaagggacaagaggacttcctgagctaaaggagaaaaaaaatatggtggatcgttcaaaactccttcctacttcccttcagaatgagttcattcccaaagaagttcttctttctctgacctatgcggccaatgctggtccttgtcctgaaaacttactacctcctaagaaaattaaaaccccaaagggcactcttccacgccttgtagaccatgtctggcatcaccctgttcgaaggaataaattcaaatacctgattgaccatcccgtctccctcacaggagctggaagggatatttcttttctgtacgatgtaacatatgccaaaggacagactagggagaaggcagtttgtcccccacatttggcccgttcattacagtcacatgatggtgtcattgtgccccataagccaaagacactaacagatactttgattcctgaagaatttcatattgtgtcaagtacaggagtttcaggtttggagtgttatgatgacaaatacactactctcctcacagatagtgaaaacaggctattgctcttcccatccatgaaacctaataaaagagtagaagtggcccagctgaatgatgtgatggatactatgctagagagggctggtgtggaaaatcaggaatatacaggaccaacgaagatgcacaaactactacatatattgaagaaggaacagaccatttacaacatgatatttcatgaacttattcgacaagtcagtgtggactgtgcagacagaggagaacttctgtctaaagtcagagagaggtatgtgcaaatgcttgaccagattgctcggcagatgattgatttctacaaagacttggtaactcagcgagtgatggaccagcgcattttagaagaattgtataatttcaagcatgttattgaagaactgaccagggaactgtgtctagttcgggcacatgatgtgaaattaacaaaggaaacagaaaaagcccacaaggatttggcacaagctcttttaaatgcggaaaagaatgccaaaatagtagaagaatatcatgacttatatacattacaaagagaaaggatggagaatgatatgaaaaagttagtggcagaaagagatatctggagctcagccacatatgaattggccctgaaggtgattgaaagaaatagagtcatattggctagaagactttaccttaatgaaaaaggctggaataaatacactaagcatttcatcatactgctatcaaacaaggacactgaagaccttgcactgttgcagaagttgacacaaaaatggagaaacttagtgaataaacttaaacaagaggtagaacaaatggaagagtctacaagcgagacactgaaaattgttaaggatgggcttatcaaatggcaggagttcttcaatgaaaaagacattttatcccctaataagggaaatatatttaattcagttcttttagacttcaaacagtggcagaaggttactccaaaattcttccaagtttgattagttctcttgacttctgttctttcaagttggaaaacctggagtttcctgatacgcctcttgaagaatggcaggaaatagatgaaaaaattaatgaaatgaaatcacacttggatatattgttaaaccttactggtattgttccacagcacatagatgtggattctgtttcggtactccaagcgtatatatttaacatgattcaacaatggcttttgaagataggcaatgaaattaacaacggtaacattgaacttcagcaccacatggatgagttacatatatctatgatccagtggatggtaaacttgctgattttaatgatacccaactttactgaccaagactgtctcctaaagttggaggaggaaagtgctgagaaacatgatataggagttgcgcgattggagctagatgcgattgaactgacaaggaagttgtaccaatactccagctatttgagcagttgttgcaaagggatggtaacagcaatggctctgagtaaatccactaactcacacaaaaatgctactgaagacctttatgaggtggataagttgaagagatagcactgccggttccaggatttggtcctccaaaaggactatgactgaagatggtggtagtaggaatcttactctcaagatgttttagcagaaagaatgttatgaatggatcaacacatgctcttgcctcctttctaatatcaaaggcagaaaaattacattattgacatatgaagaaatagagcggctacttgaagaggaggctgtaaaagaattcattgagcctgaaatagacgagtcttttaaagaagatgaagaagaaagtaaggaggataggaaacttcaggaggaaaataaagagagagcagaagaacaaccttcaacatctacagagaaggaaaaactcattcgattcattggagaagatgaaaatgttcattccaaacctctatttgaaacagatgtgttgtcttcctggagagagtcagctaagcaaggtacattggcccaaaaatatcttgaagcaatggctgtaattgaacatatgcaggagaagttactggaggttgaaaatagagccagacaggcagaggagaagtttgaagatgcatatgagaaacttcatcatacccttataaaaaataaagatctagaggaattagtcatgacatcaagaaaggagtctaaagaagagaaagaaaatcaagatgaaagagaagtaaaagaagaagaagaacaacaagaagaagaagaagtcaggtcagcagaaaattcctcaaaatctccaaagaaaggtcactgaatccaaggcaacctgtggaaagaagaattcagatgtcagtgggagcctccaggtgggaggagagcatgcctaaaccctggtggccattgttctgtactaaggaacaacattccctttgaaaggacattatttgcctgttgtatttaacttcacagtgccttgcaaagagttgtttaacttgcatggtgccacccaataaatatctgtgcaattgaa

SEQ ID NO: 110578 - DNA, 765 bp, Homo sapiens
  Payload ID: 1686
  Gene Symbol: AXDND1
  Gene Name: axonemal dynein light chain domain containing 1
  ENST ID: ENST00000509175
  CDS Start-End: 311-765
actggcctggcccgcggcaggaagccccggcgtgagacactttcggattccgtgacaacggcgggattaaacgtttttcttctcctttgctactgaacctatgctgtgacttagaacataagaaactccaagagggtgtagggattgtcttagctgtctccctcctccgccggcaccgctgaaggcagcccctatggagggcgctaaacctcggggccctgggtttctatgacgacaaacaggcgttccagcaaaggaggaagtgagcggatgctgggcgggacttcctgagctaaaggagaaaaaaaatatggtggatcgttcaaaactccttcctacttcccttcagaatgagttcattcccaaagaagttcttctttctctgacctatgcggccaatgctggtccttgtcctgaaaacttactacctcctaagaaaattaaaaccccaaagggcactcttccacgccttgtagaccatgtctggcatcaccctgttcgaaggaataaattcaaatacctgattgaccatcccgtctccctcacaggagctggaagggatatttcttttctgtacgatgtaacatatgccaaaggacagactagggagaaggcagtttgtcccccacatttggcccgttcattacagtcacatgatggtgtcattgtgccccataagccaaagacactaacagatactttgattcctgaagaatttcatattgtgtcaagtacaggagtttcaggtttggagtgttatgatga

SEQ ID NO: 110579 - DNA, 553 bp, Homo sapiens
  Payload ID: 1686
  Gene Symbol: AXDND1
  Gene Name: axonemal dynein light chain domain containing 1
  ENST ID: ENST00000511889
  CDS Start-End: 185-553
aaaggaggaagtgagcggatgctgggcgggtacgcaatgtgtgggtaggatcgcgggtgtccctttcccgtcattttaaaccaagaagcagtgcgaggcctgcccaactcgcgagtttgtggaactggcgcgcgagagcgctgcctgtggggaaggacttcctgagctaaaggagaaaaaaaatatggtggatcgttcaaaactccttcctacttcccttcagaatgagttcattcccaaagaagttcttctttctctgacctatgcggccaatgctggtccttgtcctgaaaacttactacctcctaagaaaattaaaaccccaaagggcactcttccacgccttgtagaccatgtctggcatcaccctgttcgaaggaataaattcaaatacctgattgaccatcccgtctccctcacaggagctggaagggatatttcttttctgtacgatgtaacatatgccaaaggacagactagggagaaggcagtttgtcccccacatttggcccgttcattacagtcacatgatggtgtcattgtgccccataag

SEQ ID NO: 110580 - DNA, 3405 bp, Homo sapiens
  Payload ID: 1686
  Gene Symbol: AXDND1
  Gene Name: axonemal dynein light chain domain containing 1
  ENST ID: ENST00000617277
  CDS Start-End: 388-1977
actggcctggcccgcggcaggaagccccggcgtgagacactttcggattccgtgacaacggcgggattaaacgtttttcttctcctttgctactgaacctatgctgtgacttagaacataagaaactccaagagggtgtagggattgtcttagctgtctccctcctccgccggcaccgctgaaggcagcccctatggagggcgctaaacctcggggccctgggtttctatgacgacaaacaggcgttccagcaaaggaggaagtgagcggatgctgggcgggactatgtggcagcctgcaagtcccagtgcggcgctgatttgtgtctaaattagctttccggaggactatttcaaattactaaagagataggaggcattgtttattatgtctctcccgaaaacgccctccaccccgctaaactctacatcaacatctgagagcaaaaagttaaaagtgtctgtagccaaggaagggacaagaggacttcctgagctaaaggagaaaaaaaatatggtggatcgttcaaaactccttcctacttcccttcagaatgagttcattcccaaagaagttcttctttctctgacctatgcggccaatgctggtccttgtcctgaaaacttactacctcctaagaaaattaaaaccccaaagggcactcttccacgccttgtagaccatgtctggcatcaccctgttcgaaggaataaattcaaatacctgattgaccatcccgtctccctcacaggagctggaagggatatttcttttctgtacgatgtaacatatgccaaaggacagactagggagaaggcagtttgtcccccacatttggcccgttcattacagtcacatgatggtgtcattgtgccccataagccaaagacactaacagatactttgattcctgaagaatttcatattgtgtcaagtacaggagtttcaggtttggagtgttatgatgacaaatacactactctcctcacagatagtgaaaacaggctattgctcttcccatccatgaaacctaataaaagagtagaagtggcccagctgaatgatgtgatggatactatgctagagagggctggtgtggaaaatcaggaatatacaggaccaacgaagatgcacaaactactacatatattgaagaaggaacagaccatttacaacatgatatttcatgaacttattcgacaagtcagtgtggactgtgcagacagaggagaacttctgtctaaagtcagagagaggtatgtgcaaatgcttgaccagattgctcggcagatgattgatttctacaaagacttggtaactcagcgagtgatggaccagcgcattttagaagaattgtataatttcaagcatgttattgaagaactgaccagggaactgtgtctagttcgggcacatgatgtgaaattaacaaaggaaacagaaaaagcccacaaggatttggcacaagctcttttaaatgcggaaaagaatgccaaaatagtagaagaatatcatgacttatatacattacaaagagaaaggatggagaatgatatgaaaaagttagtggcagaaagagatatctggagctcagccacatatgaattggccctgaaggtgattgaaagaaatagagtcatattggctagaagactttaccttaatgaaaaaggctggaataaatacactaagcatttcatcatactgctatcaaacaaggacactgaagaccttgcactgttgcagaagttgacacaaaaatggagaaacttagtgaataaacttaaacaagaggtagaacaaatggaagagtctacaagcgagacactgaaaattgttaaggatgggcttatcaaatggcaggagttcttcaatgaaaaagacattttatcccctaataagggaaatatatttaattcagttcttttagacttcaaacagtggcagaaggttactccaaaattcttccaagtttgattagttctcttgacttctgttctttcaagttggaaaacctggagtttcctgatacgcctcttgaagaatggcaggaaatagatgaaaaaattaatgaaatgaaatcacacttggatatattgttaaaccttactggtattgttccacagcacatagatgtggattctgtttcggtactccaagcgtatatatttaacatgattcaacaatggcttttgaagataggcaatgaaattaacaacggtaacattgaacttcagcaccacatggatgagttacatatatctatgatccagtggatggtaaacttgctgattttaatgatacccaactttactgaccaagactgtctcctaaagttggaggaggaaagtgctgagaaacatgatataggagttgcgcgattggagctagatgcgattgaactgacaaggaagttgtaccaatactccagctatttgagcagttgttgcaaagggatggtaacagcaatggctctgagtaaatccactaactcacacaaaaatgctactgaagacctttatgaggtggataagttgaagaaagaatgttatgaatggatcaacacatgctcttgcctcctttctaatatcaaaggcagaaaaattacattattgacatatgaagaaatagagcggctacttgaagaggaggctgtaaaagaattcattgagcctgaaatagacgagtcttttaaagaagatgaagaagaaagtaaggaggataggaaacttcaggaggaaaataaagagagagcagaagaacaaccttcaacatctacagagaaggaaaaactcattcgattcattggagaagatgaaaatgttcattccaaacctctatttgaaacagatgtgttgtcttcctggagagagtcagctaagcaaggtacattggcccaaaaatatcttgaagcaatggctgtaattgaacatatgcaggagaagttactggaggttgaaaatagagccagacaggcagaggagaagtttgaagatgcatatgagaaacttcatcatacccttataaaaaataaagatctagaggaattagtcatgacatcaagaaaggagtctaaagaagagaaagaaaatcaagatgaaagagaagtaaaagaagaagaagaacaacaagaagaagaagaagtcaggtcagcagaaaattcctcaaaatctccaaagaaaggtcactgaatccaaggcaacctgtggaaagaagaattcagatgtcagtgggagcctccaggtgggaggagagcatgcctaaaccctggtggccattgttctgtactaaggaacaacattccctttgaaaggacattatttgcctgttgtatttaacttcacagtgccttgcaaagagttgtttaacttgcatggtgccacccaataaatatctgtgcaattg

SEQ ID NO: 110581 - DNA, 908 bp, Homo sapiens
  Payload ID: 1687
  Gene Symbol: AZU1
  Gene Name: azurocidin 1
  Uniprot ID: P20160
  ENST ID: ENST00000233997
  CDS Start-End: 12-767
cctgccccgccatgacccggctgacagtcctggccctgctggctggtctgctggcgtcctcgagggccggctccagcccccttttggacatcgttggcggccggaaggcgaggccccgccagttcccgttcctggcctccattcagaatcaaggcaggcacttctgcgggggtgccctgatccatgcccgcttcgtgatgaccgcggccagctgcttccaaagccagaaccccggggttagcaccgtggtgctgggtgcctatgacctgaggcggcgggagaggcagtcccgccagacgttttccatcagcagcatgagcgagaatggctacgacccccagcagaacctgaacgacctgatgctgcttcagctggaccgtgaggccaacctcaccagcagcgtgacgatactgccactgcctctgcagaacgccacggtggaagccggcaccagatgccaggtggccggctgggggagccagcgcagtggggggcgtctctcccgttttcccaggtttgtcaacgtgactgtgacccccgaggaccagtgtcgccccaacaacgtgtgcaccggtgtgctcacccgccgcggtggcatctgcaatggggacgggggcacccccctcgtctgcgagggcctggcccacggcgtggcctccttttccctggggccctgtggccgaggccctgacttcttcacccgagtggcgctcttccgagactggatcgatggtgttctcaacaacccgggaccggggccagcctaggggggcctgtgacctcccatggagcccagccccgccctccacacctccggcgctccgcacccacctcccacggccccgcccctgcccccgctccggccagaggggccctggctgtaataaagaagccgatctctcctctgc

SEQ ID NO: 110582 - DNA, 908 bp, Homo sapiens; identical to SEQ ID NO: 110581
  Payload ID: 1687
  Gene Symbol: AZU1
  Gene Name: azurocidin 1
  Uniprot ID: P20160
  ENST ID: ENST00000620695
  CDS Start-End: 12-767

SEQ ID NO: 110583 - DNA, 1713 bp, Homo sapiens
  Payload ID: 1687
  Gene Symbol: AZU1
  Gene Name: azurocidin 1
  ENST ID: ENST00000592205
  CDS Start-End: 230-682
ggcagaggggaaatggggcctggcccacgggagagctgaggcccacgtttggccaggacagggtggatggaggctggggcctccgcagggaagatggacaggctccagcccccttttggacatcgttggcggccggaaggcgaggccccgccagttcccgttcctggcctccattcagaatcaaggcaggcacttctgcgggggtgccctgatccatgcccgcttcgtgatgaccgcggccagctgcttccaaagccagaaccccggggttagcaccgtggtgctgggtgcctatgacctgaggcggcgggagaggcagtcccgccagacgttttccatcagcagcatgagcgagaatggctacgacccccagcagaacctgaacgacctgatgctgcttcagctggaccgtgaggccaacctcaccagcagcgtgacgatactgccactgcctctgcagaacgccacggtggaagccggcaccagatgccaggtggccggctgggggagccagcgcagtggggggcgtctctcccgttttcccaggtttgtcaacgtgactgtgacccccgaggaccagtgtcgccccaacaacgtgtgcaccggtgtgctcacccgccgcggtggcatctgcaatgtgagtgctccctgtggcgggaggaggggtcctgagaggtactgagctctccgtggcaggagaaagcaagtgcaggctgagggcggcacagcaggggggccccaggattgagcattttcacggtaggagaaacagtatctttttttttttttttgagacagagtctcgctctgtcgcccaggctggagtgtagtggcgtgatctcggcggctcactgcaacctccgcctcctgggttcaagcgattctcctgcctcagcctcctaagtagctgggattacaggcatgcgccaccacgcccggctaattttgtatttttagtagagacagggtttctccatgtgggtcaggctggtctcgaactcctgacctcatgatcgacccaccttggcctcccaaagtgttaggataacaggcatgagccaccgtgcctggctgagaaacagtagctatcaaacgccggctgtgagccacgtctgtgctgggggttggggacccagcaggcatggtagagccggtcactgagggactcaggcgtgtgattgccaggggaggggcacctggcccagcctggaggtgccaggaagctccagaaagcaactgatcccaaagtccactagcagttaaccagggcagagaaagagaagagccatgcaaaggccctggggctggatcaggacttgtaggttccaggggcagcaagaggcctctgcagttctggggtggcgtgggagccaggccctgggacgccctgacacagctgctgcctgcccagggggacgggggcacccccctcgtctgcgagggcctggcccacggcgtggcctccttttccctggggccctgtggccgaggccctgacttcttcacccgagtggcgctcttccgagactggatcgatggtgttctcaacaacccgggaccggggccagcctaggggggcctgtgacctcccatggagcccagccccgccctccacacctccggcgctccgcacccacctcccacggccccgcccctgcccccgctccggccagaggggccctggctgtaataaagaagccgatctctcctctg

SEQ ID NO: 110584 - DNA, 1713 bp, Homo sapiens; identical to SEQ ID NO: 110583
  Payload ID: 1687
  Gene Symbol: AZU1
  Gene Name: azurocidin 1
  ENST ID: ENST00000633060
  CDS Start-End: 230-682

SEQ ID NO: 110585 - DNA, 3213 bp, Homo sapiens
  Payload ID: 1688
  Gene Symbol: BTLA
  Gene Name: B and T lymphocyte associated
  Uniprot ID: Q7Z6A9
  ENST ID: ENST00000334529
  CDS Start-End: 204-1073
gtctttctgttcactttttttcacaaaatcatccaggctcttcctactctcctctcttaccacctctctcttcttttttttttttttttagttatttcacagatgccactggggtaggtaaactgacccaactctgcagcactcagaagacgaagcaaagccttctacttgagcagtttttccatcactgatatgtgcaggaaatgaagacattgcctgccatgcttggaactgggaaattattttgggtcttcttcttaatcccatatctggacatctggaacatccatgggaaagaatcatgtgatgtacagctttatataaagagacaatctgaacactccatcttagcaggagatccctttgaactagaatgccctgtgaaatactgtgctaacaggcctcatgtgacttggtgcaagctcaatggaacaacatgtgtaaaacttgaagatagacaaacaagttggaaggaagagaagaacatttcatttttcattctacattttgaaccagtgcttcctaatgacaatgggtcataccgctgttctgcaaattttcagtctaatctcattgaaagccactcaacaactctttatgtgacagatgtaaaaagtgcctcagaacgaccctccaaggacgaaatggcaagcagaccctggctcctgtatcgtttacttcctttggggggattgcctctactcatcactacctgtttctgcctgttctgctgcctgagaaggcaccaaggaaagcaaaatgaactctctgacacagcaggaagggaaattaacctggttgatgctcaccttaagagtgagcaaacagaagcaagcaccaggcaaaattcccaagtactgctatcagaaactggaatttatgataatgaccctgacctttgtttcaggatgcaggaagggtctgaagtttattctaatccatgcctggaagaaaacaaaccaggcattgtttatgcttccctgaaccattctgtcattggaccgaactcaagactggcaagaaatgtaaaagaagcaccaacagaatatgcatccatatgtgtgaggagttaagtctgtttctgactccaacagggaccattgaatgatcagcatgttgacatcattgtctgggctcaacaggatgtcaaataatatttctcaatttgagaatttttactttagaaatgttcatgttagtgcttgggtcttaagggtccataggataaatgattaaaatttctctcagaaacttatttgggagctttttatattatagccttgaataacaaaatctctccaaaactggttgacatcatgagtagcagaatagtagaacgtttaaacttagctacattttacccaatatacaaactcgatcttgcctttgaagctattggaaagacttgtagggaaaagaggtttgtgttacctgcatcagttcactacacactcttgaaaacaaaatgtcccaatttgactaaccaaccataaatacagtaatgattgtatatttcaagtcagtcttccaaaataagaaatttttgctgtgtcagtctaagaatggtgtttcttaaatgcaaaggagaaatcattttaggcttgatgtaagaaaatgaaaataataaatggtgcaataaaaatatagaatataccaattggatatagggtagatgttccacatacctggcaaacaaatgcttatatctactctgttagattgataagcaaatataggtattaatggagcagtcaacgtatagcacatttatgaggaaagtagagactcactgggtcacatagactaatggataggaatgtgacataatgctgctgaattaatatacttatgggcatctgaatagtttaaaagttagtcagaataggtatcactgggcaagtgaagatagcttaaactgcttcatgcttgacttgatagcaagttaaagtgcaattaatggaatggaggaaaacccagaatatttaattggtctgtaggggtcaatttgctttcattcaccacatctgcatcttgctgttcttcttactaaggaatcagggcaaatcatctgtagtgacatattttagtttgctaatcatttattttaaaatactgaggttgcagccacttaagagtatagcaaaagatggattcagatttttggactttccaaagtacttgagttaaactatttcaaaaatagcctataattttattcaacagtttgaggctattcgaattctcaggtgctgctactgaataatgtaatagtcttcatacaaagtggatagcaaaggttaaaatccatttcaacaaatatgtgagctgagctgctgcacaaaggaatgtgatgtgtgtgtgtgtgtgtgtgtgtgtgtgtgttaggtggggtgggtgacaacagaaatggtgcacgagaaactgatcaaattgacattatattttcagtttgcttatgaagctcaaaatactagagtaaatgggtcattaaagaaaataatatgtgaaattatggagtttagaatacaagtggggtatatatacaaaaagacaaaactgaggttttgtggtggagagattttcttaagtaacactggcattaagttttagctccttagatttgggggtgcaaatattcttttgagtcactgttattttgccaattacacctagaatttcaagcaaccaattcgagataggctgttttagccaggctgcatttgtggacaacttatgtaagaaagacatgttagaatagctgcttgtggtattcttaaaaatagaaacaggaaatatggggaggatacatttagctgtcctcttatcagatgaacacacgaaattgaacagttccttcatgattctctcaaacttaaaagcaaaatatttctgtcttatttaaaatatccttagtatgtcttatagtaaagataatgctgataatgatttcatctctaagatgtattaatatatttgtactgtttgccaaaatcacaaatcatttatgtttttattccttttcaaaatggtgtcagagacatacatgcattttcccaaatgactctacttcactattatttacatggcttatttcattagtttatagagggtttgagaaaaagaatatgtagataatttaatggtttttcacaaattttaagcttgtgattgtgctcaatgagaaggtaaagttattaaaacttatttgaaatc

SEQ ID NO: 110586 - DNA, 726 bp, Homo sapiens
  Payload ID: 1688
  Gene Symbol: BTLA
  Gene Name: B and T lymphocyte associated
  Uniprot ID: Q7Z6A9
  ENST ID: ENST00000383680
  CDS Start-End: 1-726
atgaagacattgcctgccatgcttggaactgggaaattattttgggtcttcttcttaatcccatatctggacatctggaacatccatgggaaagaatcatgtgatgtacagctttatataaagagacaatctgaacactccatcttagcaggagatccctttgaactagaatgccctgtgaaatactgtgctaacaggcctcatgtgacttggtgcaagctcaatggaacaacatgtgtaaaacttgaagatagacaaacaagttggaaggaagagaagaacatttcatttttcattctacattttgaaccagtgcttcctaatgacaatgggtcataccgctgttctgcaaattttcagtctaatctcattgaaagccactcaacaactctttatgtgacaggaaagcaaaatgaactctctgacacagcaggaagggaaattaacctggttgatgctcaccttaagagtgagcaaacagaagcaagcaccaggcaaaattcccaagtactgctatcagaaactggaatttatgataatgaccctgacctttgtttcaggatgcaggaagggtctgaagtttattctaatccatgcctggaagaaaacaaaccaggcattgtttatgcttccctgaaccattctgtcattggaccgaactcaagactggcaagaaatgtaaaagaagcaccaacagaatatgcatccatatgtgtgaggagttaa

SEQ ID NO: 110587 - DNA, 11073 bp, Homo sapiens
  Payload ID: 1689
  Gene Symbol: BDP1
  Gene Name: B double prime 1, subunit of RNA polymerase III transcription initiation factor IIIB
  Uniprot ID: A6H8Y1
  ENST ID: ENST00000358731
  CDS Start-End: 264-8138
agttgcggcgtcctgtgagcgcggggatgctgggaggagggtgaaatttagccatcggtgtgtggcagggtcatgaaaaagcggcggcggcgggagagaggaggaggcggcggcggggcagtgaaactacggtagctgccccctgagctggtggtgtggctttgtggggagggcgtagttcctaatcccctttccgggcagccgccggggctcggggctgtgagcggccgtgaggctgcctccccgggccccctgcctccgccatgttccgcagggcacgccttagcgtgaagccgaatgtcaggcctggtgtaggcgccaggggctccacagcttccaatccccagcgtggacgggagtctcccaggccgccggatcctgccacggactctgcttccaagcccgcggagcccacagatgtgcccacagtcgatttcggtggagcggagccccaagaaaaggctcctaggagcagtactgaaaagactggtggtgacaatgatgttgaagaatccagtagatcttcctctactgtttcacagagaagaaagcgaatatcaagtacttctagcctggttaagtctagtgtcagtgttccttcagaatctcatcccttatctacaattaatcaagaggctccacagccaactgccacttcaacaaaagagaaacagccatgctcagacagataccgaatatacaaagcccagaaactgagggaaatgttaaaagaagaattgagaaaagagaagaaacaatggaaaaacaaatatgctataaatgaaagtcagaggccaccagatcgttcaaaaatgactatgagagacttcatatattatctaccagataataatccaatgacttcttcactggaacaagaaaagaaaactgaaaagccatcgactccagtccagacaagagagcaagaaggtaagagtactcctaatgctgaagataatgaaatggaagaagagacagatgatgggccattactggttcctcgagtaaaagtggcagaagatggttccattattttggatgaagaaagtttaactgtagaagttttaagaacaaaaggcccttgtgttgttgaagaaaatgaccccatatttgagcgcggttctacaactacatactccagctttaggaaaaactattactctaaaccatggtcaaataaagaaacagatatgttttttttagccatcagcatggtaggaactgacttttctatgatcggacaactttttcctcacagagcaaggatagaaattaagaataaatttaaacgggaagagaaaacaaatggatggagaatagacaaagcattccaggaaaagcgcccttttgacttcgatttttttgctcatttgcttcagaaagttcttgctgaagaagagaaaagaaaacaaaaatctgttaaaaatcacagtttaaaggagaagaaatccaccaaaccacggaaaaatgtaaaagtgaaaaaagttgcctgtgaaggagtgaataatgatccagatgagtctatgagttctagaatttcagacacggaaagatctcagaaggatgctcagacagttgaagaagagtctctgaccttatcaagggaggatgcagagcaggttgcattagaagtagacctaaatcaaaagaaaagaaggaggaagaagcaagatggagctaatgaactgggagtaaacaatcttttagaaaatgccactgttcaggcgggtccttctaaaggagaaaaacacaagaataaatgtcaggctataaggcctgagctaaaggaaggtgaatgcagtaaggagcagatgctttcctgcacacaaaacatagatggcattgtgggttttgcctccactgaaaaagttgagaaaagaactgaccccatcctttcattaagtaatcaacaagatgccacatcagtagcaactgagtcttcagaatcaagcacttcagatttgccttcattcgaagttggaattagagcattgtgtgaggtgaataatgctgagggtagttgtatagaagaaagaaatgttgacctaaaaaataattcactggaaattgatcaaacagaaaatgttaaaccaatgttgagaggtcgcttccaaagacctaaacccaatttgtcaagggctgggaagaaatcagttctttcacaaggcaaaacagagtcagagagcaagaattcacattcaaaaacttcagttgaaaagaaccacgtggaaaaagataaaatgaatacattggacattttgagaatggagactacagagagagagaatccagaagctgaaactgtatctgttttgggtgaaaaaaattgtctgcaggaagggagtcaactaaaggctttaagacctgtacaagtgaggggccgattgcaaaagccaaagccaaatgcaggtaaagctgctgaaagaaaagaaattctcatatcacaggaagaaattggggccaatgtagagaagaatgaaaatgaatcctgtgctgatagagatactcctcaacacatggaagatcaatcgcgtaaagattttgaagaggaagatgtcatattacagcctgagaaaaatgattcttttcaaaatgtgcagccagatgagcccaaggttcttaatgaatgtctaagcgttcaagagaataataaggcaaataaacttaaccaagtcccaattctaaggactcgatttcagaaaccaaagccaaatataggaagaggaactggaaggagagaaatttcctcaaaggaagaggtactagagaagattcttgtctctggggaaatggcggcagcattgagagaaactgtaagactagacacctcaccaaaggagatggtaccagcagagattaatactaaagaaatgcagtcagatttaaaagaaactggaagaagagccatttctcccagggagaagattctagatgtgattgatgacaccatagaaatggagacaggtctgaaagcaatgggaagagagatttgtctaagggagaagacgccagaggtgattgatgccactgaggaaatagacaaagatttggaagaagctggaagaagagaaatatccccacagaaaaatggcccagaggaggttaagcctctaggtgaagtggagacagatttgaaagcaactggaaatgagagttccccaagggagaagacaccagaggtgactgatgccactgaggaaatagacaaaaatttggaagaaactggaagaagaaaaatatccccaagggaaaatggcccagaggaggtcaagcctgtagatgaaatggagacagatttgaacgcaactggaagagagagttctccaagggagaagacaccagaggtgattgatgctactgaggaaatagatttggaagaaactgaaagagaagtatccccacaggaaaatggactagaggaggtcaagcctctaggtgaaatggagacggatttgaaagcaactggaagagacagtttcccaagggggaagacaccagaggtgattgatgccattgaggaaatagagatagatttggaagaaactgaaagagaaatatccccacaggaaaatggcctagaggaggttaagcctctaggtgaaatgcaaacagatttgaaagcaaccggaagggagatttccccaagggagaagacaccagaggtgattgatgccactgaggaaatagacaaagatctggaagaaactggaagaagagaaatatccccagaggaaaatggcccagaggaggtcaagcctgtagatgaaatggagacagacttgaaaacaactggaagagagggttcctcaagggagaagacacgagaggtgattgatgctgctgaggtaatagagacagatttggaagaaactgaaagagaaatatcgccacaggaaaatggcccagaggaggtcaagcctgtaggtaaaatggagacagatttgaaagaaattagagaagaaatttcccaaagggaaaaggtgctagcagagttcagtgctataagggaaaaggagattgatttgaaagaaactggaaaaagagacattcccatcatggagaaagtatcaggaaagatggctgttgttgaagaaatggaggcagatttgaaagaaactggaaaagaaaattttagagagagaggatctgaagagatctgtgttactgaggaaaaggtggcagaattgaaacaaactggaaaaacagacatttctccaagggaaaacgagctagaggagaccagtacctcaagacaaactgacacacatttaatgcagagcggtagcaatgacttcagtgctgtgccttcactagatattcagaacattagcagtgaagtactgtcgatgatgcatacacctgtagaagaaaaaagaaattctgaaaaagaagtatcaagtcacttcagtcatttcaagatttcttcacagactcatgaatctgataaaacagaagtccaggggattcaatctccagatgttccagagcagttttcagatattaatttaagcaaatctcttcctcaagaacagaagccacttgaaattaaaccagcaccttttgtgaggagccgattcaaaagaccaaaaccaaacttagcaagagcagctttgaagagagagactacagaatcagaaaaatatatatatgagaagaaatcagaaaccaagaaaatggagactattgtgatgcaagaaaataatgaacaaactgatactctcccttctcaacatgatgaagcttccctaatgatatcaagagaaaaagacacattaggtcacaggaatgaggaggctgtgatattgccatgtacacagactgaaaggaacctttcaccttcaaattcttgtgaacctaaagaggagtctcagtcagcaccagtccagaaaaatgactcagttgtttctgtggggactaataatgtaaacactttccagcaagaaatgaaggaaagtgttatccaaactgctcgacaagtaaggggccgacttcagagaccgagaccaaatataagaaagacaggacagaggcaaatagtagacaaaggtgaagccaaaggcataattaaggaaggaagaacgatattaccaaaagatgaaactgaaaagaaagtcttaactgtgtcaaattctcaaattgaaactgaaattgaagttccatcgtccgcagttccagaacacagaatgtatgaaaatcaaagtcaggtggttcttgtagaaaaccttcatgttaacaaaacaaatgaaacaatcagacatgaaaataaaccgtatgttcctagttcagcacaaatgacaagaaggaaattccaaaaggctaagccaaatttgggaagagcacacagtaagaaagaggaaccagttttagaaaaagtcacaacagatcagagcaaggaaggcaagccagaagatcatttgctgcagaaaggagcttccaacacccagctccttctaaaagaaaaagctgagcttctgacatctctggaggtttcagcaagaaaagattgtgtaggttccaaagagtctgctttggcaaaaatagatgcggaattagaagaagttggaccatcaagaagggttggagaggaaactgtaggagataattcaccatcttcagttgttgaagagcaatatctcaataaactaacaagctgtccacaaccgttaaacgaaacaagttactctaaaattgccctggatgggaaaacaactatctcttctacatctgagtatgagagaaatcgtggtgaaaggagaagtcataaaaagttcaaaccaaatgtcaccagaggtcgtggatcaaaacgagttcggggtaagacctctaagaaggaacctagagcttccaaggccatgctggtgactcttcgggcttcccaggaagaagatgatgatgctgacgattttgagtctgactatgaggaagaaagctatcatcttgctcccgaagaagtaaacaaagctccagtatttgtacctgttggtctcagatctcctgaacctgtttctgctcagattgaggaaacaatggaagagcttgaaataactgtgaatgtcccagatgtaggatgcatagctgttgttgaacatgagctaccaaacacagatgtgactactgaagaaatgaaacaagaagaaaatttgagtgtaccgtttgaaatgaccacaagtgaacatatccaagatgaaccaggtaccaatgatggaagcaccgaagctgcaataactttacttacaatgggagatctagtattgcagtcagagatcagtagtgaacagggtgatgtaggagtatgtataattcctcatgttcattcaaaggataaaagccatattccttctagcctagataatgtaaatcacaaaattgttcatgaatgtcaggaactttcttcacctgtcattactacatctcctgcatcatttgaagaaaacaagattgtattggaggaacaaagttccagagaagaaataagtttaatggagaaagtaaaggagaatgctacaccaaccaggaatacaatttctaaagtgaccagtaatttgagaataagaagtaggcttgctaagcctaaaccaaatcttgagaagactttagggaccaacaggcttgatgattatcaggaagtttccagtttgtgtgtaaccaaaggggcagaaatggaaactcaaagagaaacagagaaaaatgcttccaaagcaacagaattggaaaataaaaacctcggaccagttacaacagcagagaataaggatcagagcaaattggcatgtgtacatggtatcaaagggaccagtatttcttcagaagtaaacctaactgaaagaaacgaaaatcaagaagagagctctcaggaggttcacatgttgtcagttgctccagttgcttcctctgagacagggccctgcacacttggtttggataggggtcttggtgaaaattctgttgaagagccccagataaaggactctaaaggagacagtgtgcttacacttcctgtgccagagtatacaccaacaagtattccagaagtccaacaagagaatataatcaatcctcaagacctaacagtgaatctagttgctaatgtacctcaagatggagaagatgaacaagcctttattttaactctggtggaaatcccagccaatgcagtagaagaatttactgatgccactgcacagttcatgccaaaccctttactgccagctcccatattggtcaaatcagtgaataccgaagaaaggggtgacatgagtatttgtttaccagcaacttcagttggtcaagatgccatgggtttatctatttctggaagagataattctaaaaagccgcctgataatttggatcttgtatctaggaagagatttcaatgcaggcttgataaaaatgaccacattcctcctgccaaaaaacgttcactcactttaagagatgactgtcaagaatataccactgaggtgcactcaaaggaattaacaaatgtttttgaggaaacaggggagtctcacaagggacaagatatttttcttacctcaggaagcacactgacaactccagaacctcaaagacagcaagttgaagcagcttttcagagtagaggatctagatctcctgatgcatgcatggacaagaatgtgcctcagttacctcaggatgaaatgattgtgtctgataaggaagaaagaactgatgctgctcctaagtctcagcaaatggatagcagaacatcgtcttctaaagcctcactatccagacctggcagaagacccctgggatttttatctttaatatgctcaaagaatagtttggagtctgatgaacctatgcaagtccatagtaagaaacgcctaaaacctcttatacctggattaagaaagaaattgaaaagatctaatccattcaatgaaagccaggaaaaaaatcgagagtcctctgatctgcttccatctccaagtgttattactactcaatctgagaatattagcagctcagcaactcaggtttcttgtgatcagcccttactgaaagaaggatataaaagtgcccaaaagcgggcccctcaaggggaggcaaccacagtctctgaatatttcttcaatgatatcttcattgaagtggatgaaacagaataaaacaatcttttctctttttcttttttaaattaggtctaggatttccagagtcaattacatcaacaaaacagtatttagagcaaaatatcactgtcttatttttctttaggttgattttgaatacttaatgagcttgatttgaagcttttataatcagtggaaaacatttctgaggttcctttcattctgactgattcagcattttgcaaatagcaagcaattaagactgctttctcagacagaaataacaactcttgtttacattttgactcttcctgtgctaagcacacatggacatttgggaatgttgtggatatatgtctctgtatgaattgcagtgcagacagatttgggggttaattgtatcatatttaacatttagcaacttcttttgtgaagattttttatttttagggggagatgatgaaggatgaaggctttttcatttgcttctaagtacagtcatgtatcacataatgaagtttaagtcaatgatggaccacatatattacagtggtcccatgcaattaaaatggagataaattcctatcaactagtgacattatagccatcataacacagtgcattgcttttttatgtttagatatgtttagatacacaaatacttactattgtgttacaactgcctacagtattcagcatagtaacacattgtagaggtttgtagccgaggagcaataggctataccacatagcctcagtctgtacggtgtgtagcagcctgtaccatctcagtgtttgtaagtacactctgcgttgtttcacacaagatcacctaacaaggcaattcttagaacatgtagttaagggacacgtgactatatgtgaaaacaaattgtcaaacttcactttagtatggcaaatgttaaagaacttttctattatcagctgtttgtctgactgaaaaatacatatttttctaattcatggtgatgtaacattagtcctaattgaaaaactagtatttaaacataattatttataaagatgacacatcaaagggcttatttatttttaaattttttatttaaaaggatattcagttttagctatttttacccctcagattgtagataaagaaggcattaaatttatgtttgtctcctttttctgtttaattttaaagatatttaaaatgatataactaaaaatgtttagctggtgtatatgttttgaatacctttttcccctcagtttagtatattgactttgtactgtaaatttttctgcttttcttggataatctcaggattttcatgaggatagggggaactcaactttatttatgagacaaaatttccatacaaagctcaatctcctttatacacccacagacataatattagtttttaaaaagccaatttcttcatagttttttcccattaaattctcaaggaacacttggatctttaagcacggaacataatcatgatgttaaaaacagagaaaataaggctttataaagttaatgattatcatcagtatgaatttaaggtttgttttaatttcaagatttgattttttatacgtgtaattctattatctacccaagcagatctgtagtggttccaattagacttctcaaacagcaaatttatcctgattttatttgaaaagcctcttggattgatagtatagtagctcaggcattggaaactttctgcaaactgttttgggtttgcaggccagatggtctctgtggcagctactcagctctgcaatttcagtgtgaaagaagccatagacagtacttgaatgaaggactgtggctggattggccttttagtttgaccccctacattaggccccaaattttcttaccctgaggtgctgatatctgtatggatgagttatttgtcactaaagttatgagttgtgcctaaaagttaaaactgttgactgtattatgtaatgatcagtatttcagttgggaagatattttagagtctagataattatgtttgtatattgaaaaaatggtggccagtttttaagttccttaatagaagagaattatgtctcagcacatataacagtaatgctaatttattgaaactactgctgttagagcacttcttattcattgtcttttagtgaaatttatggcgtaacactttgtcagagaggaggctatataattcggagcggaaattgtctataagtaggcatttatttcatgattgatatgtcacagaaatcatggtagtaaatcacattgctatttgaataccctgtttttgtaagtttttaaaactcatattctgaaaagatttcattctcttagtgttagcttgggagttagattgccatgattaaactattatttatccttgtgtaatattagtttttaactttaacatctgtttctttttaatctataatgagctagttttatggaaaatggaatttcttactatataaagaatacagagactcattgtattagagaatcaagtcagccagctaaagtatcctactgttaaatccttaaacctaattttggaaaagagaaagttaatcaatgtatttaccttacatgttggaaagaactatgttaggtctgattcatgtgaagaagatgttgcaaaggatttatttcacaaattttaaaggagatatgagtaaaagtttttatcttttcttgactttttctcctgaacacttatgtcttagcaagtggtcaacatgaggatttgaacgcctaattgttggtaaatggttgaggcatgacaaaaatattaatatccactgtttaccatcatgttatttgaaacaaaagtgaccatgtatactatcttgcttgaagaagtctttgacagaaaaagcaatatcatgtcatttataaattttcttgttctaaagaaagcagttatatatatatataaattatgtaaataaaagttattttatatca

SEQ ID NO: 110588 - DNA, 2861 bp, Homo sapiens
  Payload ID: 1689
  Gene Symbol: BDP1
  Gene Name: B double prime 1, subunit of RNA polymerase III transcription initiation factor IIIB
  ENST ID: ENST00000380675
  CDS Start-End: 220-2760
aatttagccatcggtgtgtggcagggtcatgaaaaagcggcggcggcgggagagaggaggaggcggcggcggggcagtgaaactacggtagctgccccctgagctggtggtgtggctttgtggggagggcgtagttcctaatcccctttccgggcagccgccggggctcggggctgtgagcggccgtgaggctgcctccccgggccccctgcctccgccatgttccgcagggcacgccttagcgtgaagccgaatgtcaggcctggtgtaggcgccaggggctccacagcttccaatccccagcgtggacgggagtctcccaggccgccggatcctgccacggactctgcttccaagcccgcggagcccacagatgtgcccacagtcgatttcggtggagcggagccccaagaaaaggctcctaggagcagtactgaaaagactggtggtgacaatgatgttgaagaatccagtagatcttcctctactgtttcacagagaagaaagcgaatatcaagtacttctagcctggttaagtctagtgtcagtgttccttcagaatctcatcccttatctacaattaatcaagaggctccacagccaactgccacttcaacaaaagagaaacagccatgctcagacagataccgaatatacaaagcccagaaactgagggaaatgttaaaagaagaattgagaaaagagaagaaacaatggaaaaacaaatatgctataaatgaaagtcagaggccaccagatcgttcaaaaatgactatgagagacttcatatattatctaccagataataatccaatgacttcttcactggaacaagaaaagaaaactgaaaagccatcgactccagtccagacaagagagcaagaaggtaagagtactcctaatgctgaagataatgaaatggaagaagagacagatgatgggccattactggttcctcgagtaaaagtggcagaagatggttccattattttggatgaagaaagtttaactgtagaagttttaagaacaaaaggcccttgtgttgttgaagaaaatgaccccatatttgagcgcggttctacaactacatactccagctttaggaaaaactattactctaaaccatggtcaaataaagaaacagatatgttttttttagccatcagcatggtaggaactgacttttctatgatcggacaactttttcctcacagagcaaggatagaaattaagaataaatttaaacgggaagagaaaacaaatggatggagaatagacaaagcattccaggaaaagcgcccttttgacttcgatttttttgctcatttgcttcagaaagttcttgctgaagaagagaaaagaaaacaaaaatctgttaaaaatcacagtttaaaggagaagaaatccaccaaaccacggaaaaatgtaaaagtgaaaaaagttgcctgtgaaggagtgaataatgatccagatgagtctatgagttctagaatttcagacacggaaagatctcagaaggatgctcagacagttgaagaagagtctctgaccttatcaagggaggatgcagagcaggttgcattagaagtagacctaaatcaaaagaaaagaaggaggaagaagcaagatggagctaatgaactgggagtaaacaatcttttagaaaatgccactgttcaggcgggtccttctaaaggagaaaaacacaagaataaatgtcaggctataaggcctgagctaaaggaaggtgaatgcagtaaggagcagatgctttcctgcacacaaaacatagatggcattgtgggttttgcctccactgaaaaagttgagaaaagaactgaccccatcctttcattaagtaatcaacaagatgccacatcagtagcaactgagtcttcagaatcaagcacttcagatttgccttcattcgaagttggaattagagcattgtgtgaggtgaataatgctgagggtagttgtatagaagaaagaaatgttgacctaaaaaataattcactggaaattgatcaaacagaaaatgttaaaccaatgttgagaggtcgcttccaaagacctaaacccaatttgtcaagggctgggaagaaatcagttctttcacaaggcaaaacagagtcagagagcaagaattcacattcaaaaacttcagttgaaaagaaccacgtggaaaaagataaaatgaatacattggacattttgagaatggagactacagagagagagaatccagaagctgaaactgtatctgttttgggtgaaaaaaattgtctgcaggaagggagtcaactaaaggctttaagacctgtacaagtgaggggccgattgcaaaagccaaagccaaatgcaggtaaagctgctgaaagaaaagaaattctcatatcacaggaagaaattggggccaatgtagagaagaatgaaaatgaatcctgtgctgatagagatactcctcaacacatggaagatcaatcgcgtaaagattttgaagaggaagatgtcatattacagcctgagaaaaatgattcttttcaaaatgtgcagccagatgagcccaaggttcttaatgaatgtctaagcgttcaagagaataataaggcaaataaacttaaccaagtcccaattctaaggactcgatttcagaaaccaaagccaaatataggaagaggaactggaaggagagaaatttcctcaaaggaagaggtactagagaagattttgtctctggggaaatggcggcagcattgagagaaactgtaagactagacacctcaccaaaggagatggtaccagcagagattaatactaaagaaatgcagtcagatttaaaagaaactggaagaagagcc

SEQ ID NO: 110589 - DNA, 5511 bp, Homo sapiens
  Payload ID: 1689
  Gene Symbol: BDP1
  Gene Name: B double prime 1, subunit of RNA polymerase III transcription initiation factor IIIB
  ENST ID: ENST00000514903
  CDS Start-End: 1-1751
caagaaaagattgtgtaggttccaaagagtctgctttggcaaaaatagatgcggaattagaagaagttggaccatcaagaagggttggagaggaaactgtaggagataattcaccatcttcagttgttgaagagcaatatctcaataaactaacaagctgtccacaaccgttaaacgaaacaagttactctaaaattgccctggatgggaaaacaactatctcttctacatctgagtatgagagaaatcgtggtgaaaggagaagtcataaaaagttcaaaccaaatgtcaccagaggtcgtggatcaaaacgagttcggggtaagacctctaagaaggaacctagagcttccaaggccatgctggtgactcttcgggcttcccaggaagaagatgatgatgctgacgattttgagtctgactatgaggaagaaagctatcatcttgctcccgaagaagtaaacaaagctccagtatttgtacctgttggtctcagatctcctgaacctgtttctgctcagattgaggaaacaatggaagagcttgaaataactgtgaatgtcccagatgtaggatgcatagctgttgttgaacatgagctaccaaacacagatgtgactactgaagaaatgaaacaagaagaaaatttgagtgtaccgtttgaaatgaccacaagtgaacatatccaagatgaaccaggtaccaatgatggaagcaccgaagctgcaataactttacttacaatgggagatctagtattgcagtcagagatcagtagtgaacagggtgatggagtatgtataattcctcatgttcattcaaaggataaaagccatattccttctagcctagataatgtaaatcacaaaattgttcatgaatgtcaggaactttcttcacctgtcattactacatctcctgcatcatttgaagaaaacaagattgtattggaggaacaaagttccagagaagaaataagtttaatggagaaagtaaaggagaatgctacaccaaccaggaatacaatttctaaagtgaccagtaatttgagaataagaagtaggcttgctaagcctaaaccaaatcttgagaagactttagggaccaacaggcttgatgattatcaggaagtttccagtttgtgtgtaaccaaaggggcagaaatggaaactcaaagagaaacagagaaaaatgcttccaaagcaacagaattggaaaataaaaacctcggaccagttacaacagcagagaataaggatcagagcaaattggcatgtgtacatggtatcaaagggaccagtatttcttcagaagtaaacctaactgaaagaaacgaaaatcaagaagagagctctcaggaggttcacatgttgtcagttgctccagttgcttcctctgagacagggccctgcacacttggtttggataggggtcttggtgaaaattctgttgaagagccccagataaaggactctaaaggagacagtgtgcttacacttcctgtgccagagtatacaccaacaagtattccagaagtccaacaagagaatataatcaatcctcaagacctaacagtatttgtttaccagcaacttcagttggtcaagatgccatgggtttatctatttctggaagagataattctaaaaagccgcctgataatttggatcttgtatctaggaagagatttcaatgcaggcttgataaaaatgaccacattcctcctgccaaaaaacgttcactcactttaagagatgactgtcaagaatataccactgaggtgcactcaaaggaattaacaaatgtttttgaggaaacaggggagtctcacaagggacaagatatttttcttacctcaggaagcacactgacaactccagaacctcaaagacagcaagttgaagcagcttttcagagtagaggatctagatctcctgatgcatgcatggacaagaatgtgcctcagttacctcaggatgaaatgattgtgtctgataaggaagaaagaactgatgctgctcctaagtctcagcaaatggatagcagaacatcgtcttctaaagcctcactatccagacctggcagaagacccctgggatttttatctttaatatgctcaaagaatagtttggagtctgatgaacctatgcaagtccatagtaagaaacgcctaaaacctcttatacctggattaagaaagaaattgaaaagatctaatccattcaatgaaagccaggaaaaaaatcgagagtcctctgatctgcttccatctccaagtgttattactactcaatctgagaatattagcagctcagcaactcagagacccttctgacttgtggaagcaaaaggaagcagtgctgacacccacaagaatttaaggaactgtaaaactagaatttgttcacatgtttcatttctatgtctcctgaagctgtccaatggtttcttgtgatcagcccttactgaaagaaggatataaaagtgcccaaaagcgggcccctcaaggggaggcaaccacagtctctgaatatttcttcaatgatatcttcattgaagtggatgaaacagaataaaacaatcttttctctttttcttttttaaattaggtctaggatttccagagtcaattacatcaacaaaacagtatttagagcaaaatatcactgtcttatttttctttaggttgattttgaatacttaatgagcttgatttgaagcttttataatcagtggaaaacatttctgaggttcctttcattctgactgattcagcattttgcaaatagcaagcaattaagactgctttctcagacagaaataacaactcttgtttacattttgactcttcctgtgctaagcacacatggacatttgggaatgttgtggatatatgtctctgtatgaattgcagtgcagacagatttgggggttaattgtatcatatttaacatttagcaacttcttttgtgaagattttttatttttagggggagatgatgaaggatgaaggctttttcatttgcttctaagtacagtcatgtatcacataatgaagtttaagtcaatgatggaccacatatattacagtggtcccatgcaattaaaatggagataaattcctatcaactagtgacattatagccatcataacacagtgcattgcttttttatgtttagatatgtttagatacacaaatacttactattgtgttacaactgcctacagtattcagcatagtaacacattgtagaggtttgtagccgaggagcaataggctataccacatagcctcagtctgtacggtgtgtagcagcctgtaccatctcagtgtttgtaagtacactctgcgttgtttcacacaagatcacctaacaaggcaattcttagaacatgtagttaagggacacgtgactatatgtgaaaacaaattgtcaaacttcactttagtatggcaaatgttaaagaacttttctattatcagctgtttgtctgactgaaaaatacatatttttctaattcatggtgatgtaacattagtcctaattgaaaaactagtatttaaacataattatttataaagatgacacatcaaagggcttatttatttttaaattttttatttaaaaggatattcagttttagctatttttacccctcagattgtagataaagaaggcattaaatttatgtttgtctcctttttctgtttaattttaaagatatttaaaatgatataactaaaaatgtttagctggtgtatatgttttgaatacctttttcccctcagtttagtatattgactttgtactgtaaatttttctgcttttcttggataatctcaggattttcatgaggatagggggaactcaactttatttatgagacaaaatttccatacaaagctcaatctcctttatacacccacagacataatattagtttttaaaaagccaatttcttcatagttttttcccattaaattctcaaggaacacttggatctttaagcacggaacataatcatgatgttaaaaacagagaaaataaggctttataaagttaatgattatcatcagtatgaatttaaggtttgttttaatttcaagatttgattttttatacgtgtaattctattatctacccaagcagatctgtagtggttccaattagacttctcaaacagcaaatttatcctgattttatttgaaaagcctcttggattgatagtatagtagctcaggcattggaaactttctgcaaactgttttgggtttgcaggccagatggtctctgtggcagctactcagctctgcaatttcagtgtgaaagaagccatagacagtacttgaatgaaggactgtggctggattggccttttagtttgaccccctacattaggccccaaattttcttaccctgaggtgctgatatctgtatggatgagttatttgtcactaaagttatgagttgtgcctaaaagttaaaactgttgactgtattatgtaatgatcagtatttcagttgggaagatattttagagtctagataattatgtttgtatattgaaaaaatggtggccagtttttaagttccttaatagaagagaattatgtctcagcacatataacagtaatgctaatttattgaaactactgctgttagagcacttcttattcattgtcttttagtgaaatttatggcgtaacactttgtcagagaggaggctatataattcggagcggaaattgtctataagtaggcatttatttcatgattgatatgtcacagaaatcatggtagtaaatcacattgctatttgaataccctgtttttgtaagtttttaaaactcatattctgaaaagatttcattctcttagtgttagcttgggagttagattgccatgattaaactattatttatccttgtgtaatattagtttttaactttaacatctgtttctttttaatctataatgagctagttttatggaaaatggaatttcttactatataaagaatacagagactcattgtattagagaatcaagtcagccagctaaagtatcctactgttaaatccttaaacctaattttggaaaagagaaagttaatcaatgtatttaccttacatgttggaaagaactatgttaggtctgattcatgtgaagaagatgttgcaaaggatttatttcacaaattttaaaggagatatgagtaaaagtttttatcttttcttgactttttctcctgaacacttatgtcttagcaagtggtcaacatgaggatttgaacgcctaattgttggtaaatggttgaggcatgacaaaaatattaatatccactgtttaccatcatgttatttgaaacaaaagtgaccatgtatactatcttgcttgaagaagtctttgacagaaaaagcaatatcatgtcatttataaattttcttgttctaaagaaagcagttatatatatatataaattatgtaaataaaagttattttatatca

SEQ ID NO: 110590 - DNA, 4997 bp, Homo sapiens
  Payload ID: 1689
  Gene Symbol: BDP1
  Gene Name: B double prime 1, subunit of RNA polymerase III transcription initiation factor IIIB
  ENST ID: ENST00000525844
  CDS Start-End: 1-1821
acagatgtgactactgaagaaatgaaacaagaagaaaatttgagtgtaccgtttgaaatgaccacaagtgaacatatccaagatgaaccaggagtatgtataattcctcatgttcattcaaaggataaaagccatattccttctagcctagataatgtaaatcacaaaattgttcatgaatgtcaggaactttcttcacctgtcattactacatctcctgcatcatttgaagaaaacaagattgtattggaggaacaaagttccagagaagaaataagtttaatggagaaagtaaaggagaatgctacaccaaccaggaatacaatttctaaagtgaccagtaatttgagaataagaagtaggcttgctaagcctaaaccaaatcttgagaagactttagggaccaacaggcttgatgattatcaggaagtttccagtttgtgtgtaaccaaaggggcagaaatggaaactcaaagagaaacagagaaaaatgcttccaaagcaacagaattggaaaataaaaacctcggaccagttacaacagcagagaataaggatcagagcaaattggcatgtgtacatggtatcaaagggaccagtatttcttcagaagtaaacctaactgaaagaaacgaaaatcaagaagagagctctcaggaggttcacatgttgtcagttgctccagttgcttcctctgagacagggccctgcacacttggtttggataggggtcttggtgaaaattctgttgaagagccccagataaaggactctaaaggagacagtgtgcttacacttcctgtgccagagtatacaccaacaagtattccagaagtccaacaagagaatataatcaatcctcaagacctaacagtgaatctagttgctaatgtacctcaagatggagaagatgaacaagcctttattttaactctggtggaaatcccagccaatgcagtagaagaatttactgatgccactgcacagttcatgccaaaccctttactgccagctcccatattggtcaaatcagtgaataccgaagaaaggggtgacatgagtatttgtttaccagcaacttcagttggtcaagatgccatgggtttatctatttctggaagagataattctaaaaagccgcctgataatttggatcttgtatctaggaagagatttcaatgcaggcttgataaaaatgaccacattcctcctgccaaaaaacgttcactcactttaagagatgactgtcaagaatataccactgaggtgcactcaaaggaattaacaaatgtttttgaggaaacaggggagtctcacaagggacaagatatttttcttacctcaggaagcacactgacaactccagaacctcaaagacagcaagttgaagcagcttttcagagtagaggatctagatctcctgatgcatgcatggacaagaatgtgcctcagttacctcaggatgaaatgattgtgtctgataaggaagaaagaactgatgctgctcctaagtctcagcaaatggatagcagaacatcgtcttctaaagcctcactatccagacctggcagaagacccctgggatttttatctttaatatgctcaaagaatagtttggagtctgatgaacctatgcaagtccatagtaagaaacgcctaaaacctcttatacctggattaagaaagaaattgaaaagatctaatccattcaatgaaagccaggaaaaaaatcgagagtcctctgatctgcttccatctccaagtgttattactactcaatctgagaatattagcagctcagcaactcagagacccttctgacttgtggaagcaaaaggaagcagtgctgacacccacaagaatttaaggaactgtaaaactagaatttgttcacatgtttcatttctatgtctcctgaagctgtccaatggtttcttgtgatcagcccttactgaaagaaggatataaaagtgcccaaaagcgggcccctcaaggggaggcaaccacagtctctgaatatttcttcaatgatatcttcattgaagtggatgaaacagaataaaacaatcttttctctttttcttttttaaattaggtctaggatttccagagtcaattacatcaacaaaacagtatttagagcaaaatatcactgtcttatttttctttaggttgattttgaatacttaatgagcttgatttgaagcttttataatcagtggaaaacatttctgaggttcctttcattctgactgattcagcattttgcaaatagcaagcaattaagactgctttctcagacagaaataacaactcttgtttacattttgactcttcctgtgctaagcacacatggacatttgggaatgttgtggatatatgtctctgtatgaattgcagtgcagacagatttgggggttaattgtatcatatttaacatttagcaacttcttttgtgaagattttttatttttagggggagatgatgaaggatgaaggctttttcatttgcttctaagtacagtcatgtatcacataatgaagtttaagtcaatgatggaccacatatattacagtggtcccatgcaattaaaatggagataaattcctatcaactagtgacattatagccatcataacacagtgcattgcttttttatgtttagatatgtttagatacacaaatacttactattgtgttacaactgcctacagtattcagcatagtaacacattgtagaggtttgtagccgaggagcaataggctataccacatagcctcagtctgtacggtgtgtagcagcctgtaccatctcagtgtttgtaagtacactctgcgttgtttcacacaagatcacctaacaaggcaattcttagaacatgtagttaagggacacgtgactatatgtgaaaacaaattgtcaaacttcactttagtatggcaaatgttaaagaacttttctattatcagctgtttgtctgactgaaaaatacatatttttctaattcatggtgatgtaacattagtcctaattgaaaaactagtatttaaacataattatttataaagatgacacatcaaagggcttatttatttttaaattttttatttaaaaggatattcagttttagctatttttacccctcagattgtagataaagaaggcattaaatttatgtttgtctcctttttctgtttaattttaaagatatttaaaatgatataactaaaaatgtttagctggtgtatatgttttgaatacctttttcccctcagtttagtatattgactttgtactgtaaatttttctgcttttcttggataatctcaggattttcatgaggatagggggaactcaactttatttatgagacaaaatttccatacaaagctcaatctcctttatacacccacagacataatattagtttttaaaaagccaatttcttcatagttttttcccattaaattctcaaggaacacttggatctttaagcacggaacataatcatgatgttaaaaacagagaaaataaggctttataaagttaatgattatcatcagtatgaatttaaggtttgttttaatttcaagatttgattttttatacgtgtaattctattatctacccaagcagatctgtagtggttccaattagacttctcaaacagcaaatttatcctgattttatttgaaaagcctcttggattgatagtatagtagctcaggcattggaaactttctgcaaactgttttgggtttgcaggccagatggtctctgtggcagctactcagctctgcaatttcagtgtgaaagaagccatagacagtacttgaatgaaggactgtggctggattggccttttagtttgaccccctacattaggccccaaattttcttaccctgaggtgctgatatctgtatggatgagttatttgtcactaaagttatgagttgtgcctaaaagttaaaactgttgactgtattatgtaatgatcagtatttcagttgggaagatattttagagtctagataattatgtttgtatattgaaaaaatggtggccagtttttaagttccttaatagaagagaattatgtctcagcacatataacagtaatgctaatttattgaaactactgctgttagagcacttcttattcattgtcttttagtgaaatttatggcgtaacactttgtcagagaggaggctatataattcggagcggaaattgtctataagtaggcatttatttcatgattgatatgtcacagaaatcatggtagtaaatcacattgctatttgaataccctgtttttgtaagtttttaaaactcatattctgaaaagatttcattctcttagtgttagcttgggagttagattgccatgattaaactattatttatccttgtgtaatattagtttttaactttaacatctgtttctttttaatctataatgagctagttttatggaaaatggaatttcttactatataaagaatacagagactcattgtattagagaatcaagtcagccagctaaagtatcctactgttaaatccttaaacctaattttggaaaagagaaagttaatcaatgtatttaccttacatgttggaaagaactatgttaggtctgattcatgtgaagaagatgttgcaaaggatttatttcacaaattttaaaggagatatgagtaaaagtttttatcttttcttgactttttctcctgaacacttatgtcttagcaagtggtcaacatgaggatttgaacgcctaattgttggtaaatggttgaggcatgacaaaaatattaatatccactgtttaccatcatgttatttgaaacaaaagtgaccatgtatactatcttgcttgaagaagtctttgacagaaaaagcaatatcatgtcatttataaattttcttgttctaaagaaagcagttatatatatatataaattatgtaaataaaagttattttatatca

SEQ ID NO: 110591 - DNA, 5511 bp, Homo sapiens; identical to SEQ ID NO: 110589
  Payload ID: 1689
  Gene Symbol: BDP1
  Gene Name: B double prime 1, subunit of RNA polymerase III transcription initiation factor IIIB
  ENST ID: ENST00000612125
  CDS Start-End: 1-1751

SEQ ID NO: 110592 - DNA, 4997 bp, Homo sapiens; identical to SEQ ID NO: 110590
  Payload ID: 1689
  Gene Symbol: BDP1
  Gene Name: B double prime 1, subunit of RNA polymerase III transcription initiation factor IIIB
  ENST ID: ENST00000614425
  CDS Start-End: 1-1821

SEQ ID NO: 110593 - DNA, 2861 bp, Homo sapiens; identical to SEQ ID NO: 110588
  Payload ID: 1689
  Gene Symbol: BDP1
  Gene Name: B double prime 1, subunit of RNA polymerase III transcription initiation factor IIIB
  ENST ID: ENST00000616093
  CDS Start-End: 220-2760

SEQ ID NO: 110594 - DNA, 2861 bp, Homo sapiens
  Payload ID: 1689
  Gene Symbol: BDP1
  Gene Name: B double prime 1, subunit of RNA polymerase III transcription initiation factor IIIB
  ENST ID: ENST00000613844
  CDS Start-End: 220-2760
aatttagccatcggtgtgtggcagggtcatgaaaaagcggcggcggcgggagagaggaggaggcggcggcggggcagtgaaactacggtagctgccccctgagctggtggtgtggctttgtggggagggcgtagttcctaatcccctttccgggcagccgccggggctcggggctgtgagcggccgtgaggctgcctccccgggccccctgcctccgccatgttccgcagggcacgccttagcgtgaagccgaatgtcaggcctggtgtaggcgccaggggctccacagcttccaatccccagcgtggacgggagtctcccaggccgccggagcctgccacggactctgcttccaagcccgcggagcccacagatgtgcccacagtcgatttcggtggagcggagccccaagaaaaggctcctaggagcagtactgaaaagactggtggtgacaatgatgttgaagaatccagtagatcttcctctactgtttcacagagaagaaagcgaatatcaagtacttctagcctggttaagtctagtgtcagtgttccttcagaatctcatcccttatctacaattaatcaagaggctccacagccaactgccacttcaacaaaagagaaacagccatgctcagacagataccgaatatacaaagcccagaaactgagggaaatgttaaaagaagaattgagaaaagagaagaaacaatggaaaaacaaatatgctataaatgaaagtcagaggccaccagatcgttcaaaaatgactatgagagacttcatatattatctaccagataataatccaatgacttcttcactggaacaagaaaagaaaactgaaaagccatcgactccagtccagacaagagagcaagaaggtaagagtactcctaatgctgaagataatgaaatggaagaagagacagatgatgggccattactggttcctcgagtaaaagtggcagaagatggttccattattttggatgaagaaagtttaactgtagaagttttaagaacaaaaggcccttgtgttgttgaagaaaatgaccccatatttgagcgcggttctacaactacatactccagctttaggaaaaactattactctaaaccatggtcaaataaagaaacagatatgttttttttagccatcagcatggtaggaactgacttttctatgatcggacaactttttcctcacagagcaaggatagaaattaagaataaatttaaacgggaagagaaaacaaatggatggagaatagacaaagcattccaggaaaagcgcccttttgacttcgatttttttgctcatttgcttcagaaagttcttgctgaagaagagaaaagaaaacaaaaatctgttaaaaatcacagtttaaaggagaagaaatccaccaaaccacggaaaaatgtaaaagtgaaaaaagttgcctgtgaaggagtgaataatgatccagatgagtctatgagttctagaatttcagacacggaaagatctcagaaggatgctcagacagttgaagaagagtctctgaccttatcaagggaggatgcagagcaggttgcattagaagtagacctaaatcaaaagaaaagaaggaggaagaagcaagatggagctaatgaactgggagtaaacaatcttttagaaaatgccactgttcaggcgggtccttctaaaggagaaaaacacaagaataaatgtcaggctataaggcctgagctaaaggaaggtgaatgcagtaaggagcagatgctttcctgcacacaaaacatagatggcattgtgggttttgcctccactgaaaaagttgagaaaagaactgaccccatcctttcattaagtaatcaacaagatgccacatcagtagcaactgagtcttcagaatcaagcacttcagatttgccttcattcgaagttggaattagagcattgtgtgaggtgaataatgctgagggtagttgtatagaagaaagaaatgttgacctaaaaaataattcactggaaattgatcaaacagaaaatgttaaaccaatgttgagaggtcgcttccaaagacctaaacccaatttgtcaagggctgggaagaaatcagttctttcacaaggcaaaacagagtcagagagcaagaattcacattcaaaaacttcagttgaaaagaaccacgtggaaaaagataaaatgaatacattggacattttgagaatggagactacagagagagagaatccagaagctgaaactgtatctgttttgggtgaaaaaaattgtctgcaggaagggagtcaactaaaggctttaagacctgtacaagtgaggggccgattgcaaaagccaaagccaaatgcaggtaaagctgctgaaagaaaagaaattctcatatcacaggaagaaattggggccaatgtagagaagaatgaaaatgaatcctgtgctgatagagatactcctcaacacatggaagatcaatcgcgtaaagattttgaagaggaagatgtcatattacagcctgagaaaaatgattcttttcaaaatgtgcagccagatgagcccaaggttcttaatgaatgtctaagcgttcaagagaataataaggcaaataaacttaaccaagtcccaattctaaggactcgatttcagaaaccaaagccaaatataggaagaggaactggaaggagagaaatttcctcaaaggaagaggtactagagaagattttgtctctggggaaatggcggcagcattgagagaaactgtaagactagacacctcaccaaaggagatggtaccagcagagattaatactaaagaaatgcagtcagatttaaaagaaactggaagaagagcc

SEQ ID NO: 110595 - DNA, 11073 bp, Homo sapiens
  Payload ID: 1689
  Gene Symbol: BDP1
  Gene Name: B double prime 1, subunit of RNA polymerase III transcription initiation factor IIIB
  ENST ID: ENST00000611966
  CDS Start-End: 264-8138
agttgcggcgtcctgtgagcgcggggatgctgggaggagggtgaaatttagccatcggtgtgtggcagggtcatgaaaaagcggcggcggcgggagagaggaggaggcggcggcggggcagtgaaactacggtagctgccccctgagctggtggtgtggctttgtggggagggcgtagttcctaatcccctttccgggcagccgccggggctcggggctgtgagcggccgtgaggctgcctccccgggccccctgcctccgccatgttccgcagggcacgccttagcgtgaagccgaatgtcaggcctggtgtaggcgccaggggctccacagcttccaatccccagcgtggacgggagtctcccaggccgccggagcctgccacggactctgcttccaagcccgcggagcccacagatgtgcccacagtcgatttcggtggagcggagccccaagaaaaggctcctaggagcagtactgaaaagactggtggtgacaatgatgttgaagaatccagtagatcttcctctactgtttcacagagaagaaagcgaatatcaagtacttctagcctggttaagtctagtgtcagtgttccttcagaatctcatcccttatctacaattaatcaagaggctccacagccaactgccacttcaacaaaagagaaacagccatgctcagacagataccgaatatacaaagcccagaaactgagggaaatgttaaaagaagaattgagaaaagagaagaaacaatggaaaaacaaatatgctataaatgaaagtcagaggccaccagatcgttcaaaaatgactatgagagacttcatatattatctaccagataataatccaatgacttcttcactggaacaagaaaagaaaactgaaaagccatcgactccagtccagacaagagagcaagaaggtaagagtactcctaatgctgaagataatgaaatggaagaagagacagatgatgggccattactggttcctcgagtaaaagtggcagaagatggttccattattttggatgaagaaagtttaactgtagaagttttaagaacaaaaggcccttgtgttgttgaagaaaatgaccccatatttgagcgcggttctacaactacatactccagctttaggaaaaactattactctaaaccatggtcaaataaagaaacagatatgttttttttagccatcagcatggtaggaactgacttttctatgatcggacaactttttcctcacagagcaaggatagaaattaagaataaatttaaacgggaagagaaaacaaatggatggagaatagacaaagcattccaggaaaagcgcccttttgacttcgatttttttgctcatttgcttcagaaagttcttgctgaagaagagaaaagaaaacaaaaatctgttaaaaatcacagtttaaaggagaagaaatccaccaaaccacggaaaaatgtaaaagtgaaaaaagttgcctgtgaaggagtgaataatgatccagatgagtctatgagttctagaatttcagacacggaaagatctcagaaggatgctcagacagttgaagaagagtctctgaccttatcaagggaggatgcagagcaggttgcattagaagtagacctaaatcaaaagaaaagaaggaggaagaagcaagatggagctaatgaactgggagtaaacaatcttttagaaaatgccactgttcaggcgggtccttctaaaggagaaaaacacaagaataaatgtcaggctataaggcctgagctaaaggaaggtgaatgcagtaaggagcagatgctttcctgcacacaaaacatagatggcattgtgggttttgcctccactgaaaaagttgagaaaagaactgaccccatcctttcattaagtaatcaacaagatgccacatcagtagcaactgagtcttcagaatcaagcacttcagatttgccttcattcgaagttggaattagagcattgtgtgaggtgaataatgctgagggtagttgtatagaagaaagaaatgttgacctaaaaaataattcactggaaattgatcaaacagaaaatgttaaaccaatgttgagaggtcgcttccaaagacctaaacccaatttgtcaagggctgggaagaaatcagttctttcacaaggcaaaacagagtcagagagcaagaattcacattcaaaaacttcagttgaaaagaaccacgtggaaaaagataaaatgaatacattggacattttgagaatggagactacagagagagagaatccagaagctgaaactgtatctgttttgggtgaaaaaaattgtctgcaggaagggagtcaactaaaggctttaagacctgtacaagtgaggggccgattgcaaaagccaaagccaaatgcaggtaaagctgctgaaagaaaagaaattctcatatcacaggaagaaattggggccaatgtagagaagaatgaaaatgaatcctgtgctgatagagatactcctcaacacatggaagatcaatcgcgtaaagattttgaagaggaagatgtcatattacagcctgagaaaaatgattcttttcaaaatgtgcagccagatgagcccaaggttcttaatgaatgtctaagcgttcaagagaataataaggcaaataaacttaaccaagtcccaattctaaggactcgatttcagaaaccaaagccaaatataggaagaggaactggaaggagagaaatttcctcaaaggaagaggtactagagaagattcttgtctctggggaaatggcggcagcattgagagaaactgtaagactagacacctcaccaaaggagatggtaccagcagagattaatactaaagaaatgcagtcagatttaaaagaaactggaagaagagccatttctcccagggagaagattctagatgtgattgatgacaccatagaaatggagacaggtctgaaagcaatgggaagagagatttgtctaagggagaagacgccagaggtgattgatgccactgaggaaatagacaaagatttggaagaagctggaagaagagaaatatccccacagaaaaatggcccagaggaggttaagcctctaggtgaagtggagacagatttgaaagcaactggaaatgagagttccccaagggagaagacaccagaggtgactgatgccactgaggaaatagacaaaaatttggaagaaactggaagaagaaaaatatccccaagggaaaatggcccagaggaggtcaagcctgtagatgaaatggagacagatttgaacgcaactggaagagagagttctccaagggagaagacaccagaggtgattgatgctactgaggaaatagatttggaagaaactgaaagagaagtatccccacaggaaaatggactagaggaggtcaagcctctaggtgaaatggagacggatttgaaagcaactggaagagacagtttcccaagggggaagacaccagaggtgattgatgccattgaggaaatagagatagatttggaagaaactgaaagagaaatatccccacaggaaaatggcctagaggaggttaagcctctaggtgaaatgcaaacagatttgaaagcaaccggaagggagatttccccaagggagaagacaccagaggtgattgatgccactgaggaaatagacaaagatctggaagaaactggaagaagagaaatatccccagaggaaaatggcccagaggaggtcaagcctgtagatgaaatggagacagacttgaaaacaactggaagagagggttcctcaagggagaagacacgagaggtgattgatgctgctgaggtaatagagacagatttggaagaaactgaaagagaaatatcgccacaggaaaatggcccagaggaggtcaagcctgtaggtaaaatggagacagatttgaaagaaattagagaagaaatttcccaaagggaaaaggtgctagcagagttcagtgctataagggaaaaggagattgatttgaaagaaactggaaaaagagacattcccatcatggagaaagtatcaggaaagatggctgttgttgaagaaatggaggcagatttgaaagaaactggaaaagaaaattttagagagagaggatctgaagagatctgtgttactgaggaaaaggtggcagaattgaaacaaactggaaaaacagacatttctccaagggaaaacgagctagaggagaccagtacctcaagacaaactgacacacatttaatgcagagcggtagcaatgacttcagtgctgtgccttcactagatattcagaacattagcagtgaagtactgtcgatgatgcatacacctgtagaagaaaaaagaaattctgaaaaagaagtatcaagtcacttcagtcatttcaagatttcttcacagactcatgaatctgataaaacagaagtccaggggattcaatctccagatgttccagagcagttttcagatattaatttaagcaaatctcttcctcaagaacagaagccacttgaaattaaaccagcaccttttgtgaggagccgattcaaaagaccaaaaccaaacttagcaagagcagctttgaagagagagactacagaatcagaaaaatatatatatgagaagaaatcagaaaccaagaaaatggagactattgtgatgcaagaaaataatgaacaaactgatactctcccttctcaacatgatgaagcttccctaatgatatcaagagaaaaagacacattaggtcacaggaatgaggaggctgtgatattgccatgtacacagactgaaaggaacctttcaccttcaaattcttgtgaacctaaagaggagtctcagtcagcaccagtccagaaaaatgactcagttgtttctgtggggactaataatgtaaacactttccagcaagaaatgaaggaaagtgttatccaaactgctcgacaagtaaggggccgacttcagagaccgagaccaaatataagaaagacaggacagaggcaaatagtagacaaaggtgaagccaaaggcataattaaggaaggaagaacgatattaccaaaagatgaaactgaaaagaaagtcttaactgtgtcaaattctcaaattgaaactgaaattgaagttccatcgtccgcagttccagaacacagaatgtatgaaaatcaaagtcaggtggttcttgtagaaaaccttcatgttaacaaaacaaatgaaacaatcagacatgaaaataaaccgtatgttcctagttcagcacaaatgacaagaaggaaattccaaaaggctaagccaaatttgggaagagcacacagtaagaaagaggaaccagttttagaaaaagtcacaacagatcagagcaaggaaggcaagccagaagatcatttgctgcagaaaggagcttccaacacccagctccttctaaaagaaaaagctgagcttctgacatctctggaggtttcagcaagaaaagattgtgtaggttccaaagagtctgctttggcaaaaatagatgcggaattagaagaagttggaccatcaagaagggttggagaggaaactgtaggagataattcaccatcttcagttgttgaagagcaatatctcaataaactaacaagctgtccacaaccgttaaacgaaacaagttactctaaaattgccctggatgggaaaacaactatctcttctacatctgagtatgagagaaatcgtggtgaaaggagaagtcataaaaagttcaaaccaaatgtcaccagaggtcgtggatcaaaacgagttcggggtaagacctctaagaaggaacctagagcttccaaggccatgctggtgactcttcgggcttcccaggaagaagatgatgatgctgacgattttgagtctgactatgaggaagaaagctatcatcttgctcccgaagaagtaaacaaagctccagtatttgtacctgttggtctcagatctcctgaacctgtttctgctcagattgaggaaacaatggaagagcttgaaataactgtgaatgtcccagatgtaggatgcatagctgttgttgaacatgagctaccaaacacagatgtgactactgaagaaatgaaacaagaagaaaatttgagtgtaccgtttgaaatgaccacaagtgaacatatccaagatgaaccaggtaccaatgatggaagcaccgaagctgcaataactttacttacaatgggagatctagtattgcagtcagagatcagtagtgaacagggtgatgtaggagtatgtataattcctcatgttcattcaaaggataaaagccatattccttctagcctagataatgtaaatcacaaaattgttcatgaatgtcaggaactttcttcacctgtcattactacatctcctgcatcatttgaagaaaacaagattgtattggaggaacaaagttccagagaagaaataagtttaatggagaaagtaaaggagaatgctacaccaaccaggaatacaatttctaaagtgaccagtaatttgagaataagaagtaggcttgctaagcctaaaccaaatcttgagaagactttagggaccaacaggcttgatgattatcaggaagtttccagtttgtgtgtaaccaaaggggcagaaatggaaactcaaagagaaacagagaaaaatgcttccaaagcaacagaattggaaaataaaaacctcggaccagttacaacagcagagaataaggatcagagcaaattggcatgtgtacatggtatcaaagggaccagtatttcttcagaagtaaacctaactgaaagaaacgaaaatcaagaagagagctctcaggaggttcacatgttgtcagttgctccagttgcttcctctgagacagggccctgcacacttggtttggataggggtcttggtgaaaattctgttgaagagccccagataaaggactctaaaggagacagtgtgcttacacttcctgtgccagagtatacaccaacaagtattccagaagtccaacaagagaatataatcaatcctcaagacctaacagtgaatctagttgctaatgtacctcaagatggagaagatgaacaagcctttattttaactctggtggaaatcccagccaatgcagtagaagaatttactgatgccactgcacagttcatgccaaaccctttactgccagctcccatattggtcaaatcagtgaataccgaagaaaggggtgacatgagtatttgtttaccagcaacttcagttggtcaagatgccatgggtttatctatttctggaagagataattctaaaaagccgcctgataatttggatcttgtatctaggaagagatttcaatgcaggcttgataaaaatgaccacattcctcctgccaaaaaacgttcactcactttaagagatgactgtcaagaatataccactgaggtgcactcaaaggaattaacaaatgtttttgaggaaacaggggagtctcacaagggacaagatatttttcttacctcaggaagcacactgacaactccagaacctcaaagacagcaagttgaagcagcttttcagagtagaggatctagatctcctgatgcatgcatggacaagaatgtgcctcagttacctcaggatgaaatgattgtgtctgataaggaagaaagaactgatgctgctcctaagtctcagcaaatggatagcagaacatcgtcttctaaagcctcactatccagacctggcagaagacccctgggatttttatctttaatatgctcaaagaatagtttggagtctgatgaacctatgcaagtccatagtaagaaacgcctaaaacctcttatacctggattaagaaagaaattgaaaagatctaatccattcaatgaaagccaggaaaaaaatcgagagtcctctgatctgcttccatctccaagtgttattactactcaatctgagaatattagcagctcagcaactcaggtttcttgtgatcagcccttactgaaagaaggatataaaagtgcccaaaagcgggcccctcaaggggaggcaaccacagtctctgaatatttcttcaatgatatcttcattgaagtggatgaaacagaataaaacaatcttttctctttttcttttttaaattaggtctaggatttccagagtcaattacatcaacaaaacagtatttagagcaaaatatcactgtcttatttttctttaggttgattttgaatacttaatgagcttgatttgaagcttttataatcagtggaaaacatttctgaggttcctttcattctgactgattcagcattttgcaaatagcaagcaattaagactgctttctcagacagaaataacaactcttgtttacattttgactcttcctgtgctaagcacacatggacatttgggaatgttgtggatatatgtctctgtatgaattgcagtgcagacagatttgggggttaattgtatcatatttaacatttagcaacttcttttgtgaagattttttatttttagggggagatgatgaaggatgaaggctttttcatttgcttctaagtacagtcatgtatcacataatgaagtttaagtcaatgatggaccacatatattacagtggtcccatgcaattaaaatggagataaattcctatcaactagtgacattatagccatcataacacagtgcattgcttttttatgtttagatatgtttagatacacaaatacttactattgtgttacaactgcctacagtattcagcatagtaacacattgtagaggtttgtagccgaggagcaataggctataccacatagcctcagtctgtacggtgtgtagcagcctgtaccatctcagtgtttgtaagtacactctgcgttgtttcacacaagatcacctaacaaggcaattcttagaacatgtagttaagggacacgtgactatatgtgaaaacaaattgtcaaacttcactttagtatggcaaatgttaaagaacttttctattatcagctgtttgtctgactgaaaaatacatatttttctaattcatggtgatgtaacattagtcctaattgaaaaactagtatttaaacataattatttataaagatgacacatcaaagggcttatttatttttaaattttttatttaaaaggatattcagttttagctatttttacccctcagattgtagataaagaaggcattaaatttatgtttgtctcctttttctgtttaattttaaagatatttaaaatgatataactaaaaatgtttagctggtgtatatgttttgaatacctttttcccctcagtttagtatattgactttgtactgtaaatttttctgcttttcttggataatctcaggattttcatgaggatagggggaactcaactttatttatgagacaaaatttccatacaaagctcaatctcctttatacacccacagacataatattagtttttaaaaagccaatttcttcatagttttttcccattaaattctcaaggaacacttggatctttaagcacggaacataatcatgatgttaaaaacagagaaaataaggctttataaagttaatgattatcatcagtatgaatttaaggtttgttttaatttcaagatttgattttttatacgtgtaattctattatctacccaagcagatctgtagtggttccaattagacttctcaaacagcaaatttatcctgattttatttgaaaagcctcttggattgatagtatagtagctcaggcattggaaactttctgcaaactgttttgggtttgcaggccagatggtctctgtggcagctactcagctctgcaatttcagtgtgaaagaagccatagacagtacttgaatgaaggactgtggctggattggccttttagtttgaccccctacattaggccccaaattttcttaccctgaggtgctgatatctgtatggatgagttatttgtcactaaagttatgagttgtgcctaaaagttaaaactgttgactgtattatgtaatgatcagtatttcagttgggaagatattttagagtctagataattatgtttgtatattgaaaaaatggtggccagtttttaagttccttaatagaagagaattatgtctcagcacatataacagtaatgctaatttattgaaactactgctgttagagcacttcttattcattgtcttttagtgaaatttatggcgtaacactttgtcagagaggaggctatataattcggagcggaaattgtctataagtaggcatttatttcatgattgatatgtcacagaaatcatggtagtaaatcacattgctatttgaataccctgtttttgtaagtttttaaaactcatattctgaaaagatttcattctcttagtgttagcttgggagttagattgccatgattaaactattatttatccttgtgtaatattagtttttaactttaacatctgtttctttttaatctataatgagctagttttatggaaaatggaatttcttactatataaagaatacagagactcattgtattagagaatcaagtcagccagctaaagtatcctactgttaaatccttaaacctaattttggaaaagagaaagttaatcaatgtatttaccttacatgttggaaagaactatgttaggtctgattcatgtgaagaagatgttgcaaaggatttatttcacaaattttaaaggagatatgagtaaaagtttttatcttttcttgactttttctcctgaacacttatgtcttagcaagtggtcaacatgaggatttgaacgcctaattgttggtaaatggttgaggcatgacaaaaatattaatatccactgtttaccatcatgttatttgaaacaaaagtgaccatgtatactatcttgcttgaagaagtctttgacagaaaaagcaatatcatgtcatttataaattttcttgttctaaagaaagcagttatatatatatataaattatgtaaataaaagttattttatatca

SEQ ID NO: 110596 - DNA, 11073 bp, Homo sapiens; identical to SEQ ID NO: 110587
  Payload ID: 1689
  Gene Symbol: BDP1
  Gene Name: B double prime 1, subunit of RNA polymerase III transcription initiation factor IIIB
  Uniprot ID: A6H8Y1
  ENST ID: ENST00000617085
  CDS Start-End: 264-8138

SEQ ID NO: 110597 - DNA, 5511 bp, Homo sapiens; identical to SEQ ID NO: 110589
  Payload ID: 1689
  Gene Symbol: BDP1
  Gene Name: B double prime 1, subunit of RNA polymerase III transcription initiation factor IIIB
  ENST ID: ENST00000628099
  CDS Start-End: 1-1751

SEQ ID NO: 110598 - DNA, 4997 bp, Homo sapiens; identical to SEQ ID NO: 110590
  Payload ID: 1689
  Gene Symbol: BDP1
  Gene Name: B double prime 1, subunit of RNA polymerase III transcription initiation factor IIIB
  ENST ID: ENST00000627715
  CDS Start-End: 1-1821

SEQ ID NO: 110599 - DNA, 120 bp, Homo sapiens
  Payload ID: 1690
  Gene Symbol:
  Gene Name: B melanoma antigen family, member 5 [Source:EntrezGene
  Acc:85316]
  ENST ID: ENST00000624155
  CDS Start-End: 1-120
atggcagccggagcggtttttctggcattgtctgcccagctgctccaagccagactgatgaaggaggagtccccagtggtgagctggaggttggagcctgaagatggcacagctctgtga

SEQ ID NO: 110600 - DNA, 908 bp, Homo sapiens
  Payload ID: 1691
  Gene Symbol: B9D1
  Gene Name: B9 protein domain 1
  Uniprot ID: Q9UPM9
  ENST ID: ENST00000261499
  CDS Start-End: 145-759
cgcgcactcgcgtggccttcgcgaaggtgtcgctgccaagaaacgtgtcctgcgcgctacgccgtctgtttctagggcaacgccggcgtctcttagcaaccgcgcgcggcctaggtgggtccccccggcacccccagacctgccatggcgaccgcgagtcctagcgtctttctactcatggtcaacgggcaggtggagagcgcccagtttccagagtatgatgacctctactgcaagtactgctttgtgtacggccaggactgggcccccacagcgggtctggaggaggggatctcacagatcacatccaagagccaagatgtgcggcaagcactggtgtggaacttccccattgatgtcacctttaaaagcaccaacccctacggctggccacagatcgtgctcagcgtgtatggaccagatgtgttcgggaacgatgtggttcgaggctatggggccgtgcacgtgcccttctcacctggccggcacaaaaggaccatccccatgtttgtcccagaatctacgtctaaactgcagaagtttacaagctggttcatggggcggcggcccgagtacacagaccccaaggtggtggctcagggtgaaggccgggaagtgacccgtgtccgttctcagggctttgtcaccctcctcttcaacgtggtgaccaaggacatgaggaaactgggctatgacactgggccttctgatacacagggtgtgttggggcccagcccaccccagagcttcccccagtgaaggctccacaggctgcacagtctctgataatgaagggctgccttcccgaagtcagccgctgcccatcggcctgaggggcagcctggtggccagagctgggggcacacagaatagttttgtataataaagtctcattttcagagagccta

SEQ ID NO: 110601 - DNA, 755 bp, Homo sapiens
  Payload ID: 1691
  Gene Symbol: B9D1
  Gene Name: B9 protein domain 1
  Uniprot ID: Q9UPM9
  ENST ID: ENST00000268841
  CDS Start-End: 101-562
gtgtcctgcgcgctacgccgtctgtttctagggcaacgccggcgtctcttagcaaccgcgcgcggcctaggtgggtccccccggcacccccagacctgccatggcgaccgcgagtcctagcgtctttctactcatggtcaacgggcaggtggagagcgcccagtttccagagtatgatgacctctactgcaagtactgctttgtgtacggccaggactgggcccccacagcgggtctggaggaggggatctcacagatcacatccaagagccaagatgtgcggcaagcactggtgtggaacttccccattgatgtcacctttaaaagcaccaacccctacggctggccacagatcgtgctcagcgtgtatggaccagatgtgttcgggaacgatgtggttcgaggctatggggccgtgcacgtgcccttctcacctggccggcacaaaaggaccatccccatgtttgtcccagaatctacgtctaaactgcagaagtttacaagtttgtgcctggtcgcctcctcagatctgcaagctgctccacccactgaggacaaatagaaacaggtcccctgggagtgctgagtcacggggctcccttcagccctgttccagcagcagaaggccgggcgattttaccctgtgccctgtgaaaaatctttgtgtctgagggagcagaggaaaaactcttgtcagatgggaaaaatgctcatgacataatgtgacattaaaaggtgggaaacaagaggatata

SEQ ID NO: 110602 - DNA, 805 bp, Homo sapiens
  Payload ID: 1691
  Gene Symbol: B9D1
  Gene Name: B9 protein domain 1
  ENST ID: ENST00000395615
  CDS Start-End: 8-493
acctgccatggcgaccgcgagtcctagcgtctttctactcatggtcaacgggcaggtggagagcgcccagtttccagagtatgatgacctctactgcaagtactgctttgtgtacggccaggactgggcccccacagcgggtctggaggaggggatctcacagatcacatccaagagccaagatgtgcggcaagcactggtgtggaacttccccattgatgtcacctttaaaagcaccaacccctacggctggccacagatcgtgctcagcgtgtatggaccagatgtgttcgggaacgatgtggttcgaggctatggggccgtgcacgtgcccttctcacctggccggcacaaaaggaccatccccatgtttgtcccagaatctacgtctaaactgcagaagtttacaagctggttcatggggcggcggcccgagtacacagaccccaaggtggtggctcagggtgaaggccgggaagcccagcctggctgatgctgcccttctgtccccagtgacccgtgtccgttctcagggctttgtcaccctcctcttcaacgtggtgaccaaggacatgaggaaactgggctatgacactgggccttctgatacacagggtgtgttggggcccagcccaccccagagcttcccccagtgaaggctccacaggctgcacagtctctgataatgaagggctgccttcccgaagtcagccgctgcccatcggcctgaggggcagcctggtggccagagctgggggcacacagaatagttttgtataataaagtctcattttcagagagccta

SEQ ID NO: 110603 - DNA, 733 bp, Homo sapiens
  Payload ID: 1691
  Gene Symbol: B9D1
  Gene Name: B9 protein domain 1
  ENST ID: ENST00000395616
  CDS Start-End: 165-728
ctgcgcctgcgcatgccacacgcgcactcgcgtggccttcgcgaaggtgtcgctgccaagaaacgtgtcctgcgcgctacgccgtctgtttctagggcaacgccggcgtctcttagcaaccgcgcgcggcctaggtgggtccccccggcacccccagacctgccatggcgaccgcgagtcctagcgtctttctactcatggtcaacgggcaggtggagagcgcccagtttccagagtatgatgacctctactgcaagtactgctttgtgtacggccaggactgggcccccacagcgggtctggaggaggggatctcacagatcacatccaagagccaagatgtgcggcaagcactggtgtggaacttccccattgatgtcacctttaaaagcaccaacccctacggctggccacagatcgtgctcagcgtgtatggaccagatgtgttcgggaacgatgtggttcgaggctatggggccgtgcacgtgcccttctcacctggccggcacaaaaggaccatccccatgtttgtcccagaatctacgtctaaactgcagaagtttacaagctggttcatggggcggcggcccgagtacacagaccccaaggtggtggctcagggtgaaggccgggaagatgagaacgctgaggctgagattcccagatcaacctgggtctctctctgccccagcccagcctggctgatgctgcccttctgtccccagtgacccgt

SEQ ID NO: 110604 - DNA, 601 bp, Homo sapiens
  Payload ID: 1691
  Gene Symbol: B9D1
  Gene Name: B9 protein domain 1
  ENST ID: ENST00000440841
  CDS Start-End: 1-402
ctactcatggtcaacgggcaggtggagagcgcccagtttccagagtatgatgacctctactgcaagtactgctttgtgtacggccaggactgggcccccacagcgggtctggaggaggggatctcacagatcacatccaagagccaagatgtgcggcaagcactggtgtggaacttccccattgatgtcacctttaaaagcaccaacccctacggctggccacagatcgtgctcagcgtgtatggaccagatgtgttcgggaacgatgtggttcgaggctatggggccgtgcacgtgcccttctcacctggccggcacaaaaggaccatccccatgtttgtcccagaatctacgtctaaactgcagaagtttacaagatctgcaagctgctccacccactgaggacaaatagaaacaggtcccctgggagtgctgagtcacggggctcccttcagccctgttccagcagcagaaggccgggcgattttaccctgtgccctgtgaaaaatctttgtgtctgagggagcagaggaaaaactcttgtcagatgggaaaaatgctcatgacataatgtgacattaaaaggtgggaaacaagagga

SEQ ID NO: 110605 - DNA, 923 bp, Homo sapiens
  Payload ID: 1691
  Gene Symbol: B9D1
  Gene Name: B9 protein domain 1
  ENST ID: ENST00000461069
  CDS Start-End: 46-606
ccgcgcgcggcctaggtgggtccccccggcacccccagacctgccatggcgaccgcgagtcctagcgtctttctactcatggtcaacgggcaggtggagagcgcccagtttccagagtatgatgacctctactgcaagtactgctttgtgtacggccaggactgggcccccacagcgggtctggaggaggggatctcacagatcacatccaagagccaagatgtgcggcaagcactggtgtggaacttccccattgatgtcacctttaaaagcaccaacccctacggctggccacagatcgtgctcagcgtgtatggaccagatgtgttcgggaacgatgtggttcgaggctatggggccgtgcacgtgcccttctcacctggccggcacaaaaggaccatccccatgtttgtcccagaatctacgtctaaactgcagaagtttacaagctggttcatggggcggcggcccgagtacacagaccccaaggtggtggctcagggtgaaggccgggaagctatcacagctccccggaaagctgtcttctctgtccatggcctcacctcacccagggcactggccttggtccacatcaaggggacctgaagcttccctgaagcctctagcctgtggtgtgcacgtacaagcctcaggccccatttgtccagcctgtcagcagctgggaaatactaagtcaccctcttctggttatgtttaattttccaatttttctcaacattactgaaatgtctaaatgtggaaaagttgacatcattttacagtgaacaccacatacccaccacctagattttaccattaccaatttcctgttccgtacttgtatattcacatatatccaactattcatccctgcttcaatccatcctatttttattgcatttcaaaataaactgtgaaatcag

SEQ ID NO: 110606 - DNA, 553 bp, Homo sapiens
  Payload ID: 1691
  Gene Symbol: B9D1
  Gene Name: B9 protein domain 1
  ENST ID: ENST00000575478
  CDS Start-End: 133-553
atgccacacgcgcactcgcgtggccttcgcgaaggtgtcgctgccaagaaacgtgtcctgcgcgctacgccgtctgtttctagggcaacgccggcgtctcttagcaaccgcgcgcggcctagtttccagagtatgatgacctctactgcaagtactgctttgtgtacggccaggactgggcccccacagcgggtctggaggaggggatctcacagatcacatccaagagccaagatgtgcggcaagcactggtgtggaacttccccattgatgtcacctttaaaagcaccaacccctacggctggccacagatcgtgctcagcgtgtatggaccagatgtgttcgggaacgatgtggttcgaggctatggggccgtgcacgtgcccttctcacctggccggcacaaaaggaccatccccatgtttgtcccagaatctacgtctaaactgcagaagtttacaagctggttcatggggcggcggcccgagtacacagaccccaaggtggtggctcagggtgaaggccgggaaggtaaagctccctcccctctctt

SEQ ID NO: 110607 - DNA, 928 bp, Homo sapiens
  Payload ID: 1691
  Gene Symbol: B9D1
  Gene Name: B9 protein domain 1
  ENST ID: ENST00000575403
  CDS Start-End: 335-778
aacctcatccggccaatcacagctagtcccgtgagctcggggaactgcccggcctgagatgcccaggtctgggactgttaccttggctactggctcccgaagtccccttccgcccagggaattgtgtccgccatttgcttggtcccaggagctctgggaatgtgtcatccccggtagagggtgcccgtcacggccaaccacagagatcccggtcctccgggattctagagcgtccggccgaaccctccactgacttccggtggctgagcctctccgcagcttccggccaagttggactgcagctcgcggtttcctggcttctagtttccagagtatgatgacctctactgcaagtactgctttgtgtacggccaggactgggcccccacagcgggtctggaggaggggatctcacagatcacatccaagagccaagatgtgcggcaagcactggtgtggaacttccccattgatgtcacctttaaaagcaccaacccctacggctggccacagatcgtgctcagcgtgtatggaccagatgtgttcgggaacgatgtggttcgaggctatggggccgtgcacgtgcccttctcacctggccggcacaaaaggaccatccccatgtttgtcccagaatctacgtctaaactgcagaagtttacaagctggttcatggggcggcggcccgagtacacagaccccaaggtggtggctcagggtgaaggccgggaagccaccttcagggctgtctgtcaaagatagcagtgtttcaagatgaaagcggcttgagtccctgagtcactgacttctgtgagaaacttccgcgggaagccgctgagacctggagatgtgttactgcagcgtaaccaagagcatcccacacacccttctttctctcctgtcccctgcactgaacgggcaccccctg

SEQ ID NO: 110608 - DNA, 1353 bp, Homo sapiens
  Payload ID: 1691
  Gene Symbol: B9D1
  Gene Name: B9 protein domain 1
  ENST ID: ENST00000477478
  CDS Start-End: 335-976
aacctcatccggccaatcacagctagtcccgtgagctcggggaactgcccggcctgagatgcccaggtctgggactgttaccttggctactggctcccgaagtccccttccgcccagggaattgtgtccgccatttgcttggtcccaggagctctgggaatgtgtcatccccggtagagggtgcccgtcacggccaaccacagagatcccggtcctccgggattctagagcgtccggccgaaccctccactgacttccggtggctgagcctctccgcagcttccggccaagttggactgcagctcgcggtttcctggcttctagtttccagagtatgatgacctctactgcaagtactgctttgtgtacggccaggactgggcccccacagcgggtctggaggaggggatctcacagatcacatccaagagccaagatgtgcggcaagcactggtgtggaacttccccattgatgtcacctttaaaagcaccaacccctacggctggccacagatcgtgctcagcgtgtatggaccagatgtgttcgggaacgatgtggttcgaggctatggggccgtgcacgtgcccttctcacctggccggcacaaaaggaccatccccatgtttgtcccagaatctacgtctaaactgcagaagtttacaagctggttcatggggcggcggcccgagtacacagaccccaaggtggtggctcagggtgaaggccgggaaggtaaagctccctcccctctcttacccccatcccccatacaggttacagcctgggagtgggtgggcccagggttggggtgaatgccggggacctgccaggcacataggagctagcccacaaatgttcccagatgagggcctggttggagcacagagggtttgtcatgtctgcctgtcccggcagcccctttacctcccagtgaggggcttgggtcaggcactgttgtccccattttacagatgagaacgctgaggctgagattcccagatcaacctgggtctctctctgccccagcccagcctggctgatgctgcccttctgtccccagtgacccgtgtccgttctcagggctttgtcaccctcctcttcaacgtggtgaccaaggacatgaggaaactgggctatgacactgggccttctgatacacagggtgtgttggggcccagcccaccccagagcttcccccagtgaaggctccacaggctgcacagtctctgataatgaagggctgccttcccgaagtcagccgctgcccatcggcctgaggggcagcctggtggccagagctgggggcacacagaatagttttgtataataaagtctcattttcagagagccta

SEQ ID NO: 110609 - DNA, 496 bp, Homo sapiens
  Payload ID: 1691
  Gene Symbol: B9D1
  Gene Name: B9 protein domain 1
  ENST ID: ENST00000574508
  CDS Start-End: 177-496
atctagtggctgaatgtattttaaacactcggcttgctgagggcgtgagtcggagcgctgctccccaggactcagctctcattcgcctctgcgcttcggcggggacggggagccgggccgagtcagagtgaacacacactccctgcgcgtgcaactgagtcgagcgtttccagagtatgatgacctctactgcaagtactgctttgtgtacggccaggactgggcccccacagcgggtctggaggaggggatctcacagatcacatccaagagccaagatgtgcggcaagcactggtgtggaacttccccattgatgtcacctttaaaagcaccaacccctacggctggccacagatcgtgctcagcgtgtatggaccagatgtgttcgggaacgatgtggttcgaggctatggggccgtgcacgtgcccttctcacctggccggcacaaaaggaccatccccatgtttgtcccagaatctacgtctaaactgcag

SEQ ID NO: 110610 - DNA, 495 bp, Homo sapiens
  Payload ID: 1691
  Gene Symbol: B9D1
  Gene Name: B9 protein domain 1
  ENST ID: ENST00000582857
  CDS Start-End: 1-339
agcaaccgcgcgcggcctaggtgggtccccccggcacccccagacctgccatggcgaccgcgagtcctagcgtctttctactcatggtcaacgggcaggtggagagcgcccagtttccagagtatgatgacctctactgcaagtactgctttgtgtacggccaggactgggcccccacagcgggtctggaggaggggatctcacagatcacatccaagagccaagatgtgcggcaagcactggtgtggaacttccccattgatgtcacctttaaaagcaccaacccctacggctgctgtgcagctggccttctggaagttcagagtgcatcagggctagtggccacgcctgtaaaagggccacagatcgtgctcagcgtgtatggaccagatgtgttcgggaacgatgtggttcgaggctatggggccgtgcacgtgcccttctcacctggccggcacaaaaggaccatccccatgtttgtcccagaatctacgt

SEQ ID NO: 110611 - DNA, 295 bp, Homo sapiens
  Payload ID: 1691
  Gene Symbol: B9D1
  Gene Name: B9 protein domain 1
  ENST ID: ENST00000487415
  CDS Start-End: 238-295
tggactgcagctcgcggtttcctggcttctaggggcacctgacacaaggtctggcccttcacccacactgcagcagccgcccttgttaacgctgtccccgctccgcccagtccctgcggtgttccagcagcatcttcagtgtgggtattgcaggcaccaatggaacaggttggggaggagagtttgggaccaagaacacccatgaacccttagaagccaccatagagtttccagagtatgatgacctctactgcaagtactgctttgtgtacggccaggactgggcccccacagc

SEQ ID NO: 110612 - DNA, 1027 bp, Homo sapiens
  Payload ID: 1692
  Gene Symbol: B9D2
  Gene Name: B9 protein domain 2
  Uniprot ID: Q9BPU9
  ENST ID: ENST00000243578
  CDS Start-End: 221-748
aggggaggagcctgctgttgccccagcaacaaccacggaaaccaagacgagcgcggtcgcggaagtatcgcggcttacatatctcgcagccaggcgggtcctgggagaggcgcgagccaggcctggtcggcgcccgcggagaaaagaagcagtcaagcccatgaactacaaccccggttgccgctttctcctctcctaaccgttaagtgcgctaagggccatggctgaggtgcacgtgatcgggcagatcataggggccagcggtttctcggaaagtagcctcttctgcaagtggggcattcacacaggggcggcatggaagctcctgtcaggcgtgcgggagggccaaacgcaagtggacaccccgcagataggggacatggcttactggtcccaccccatcgacctgcacttcgccaccaaaggtcttcaaggctggccccggctccatttccaggtgtggtcccaggacagctttggccgctgccagcttgcaggctatggattttgccatgtgcccagtagcccgggcacccaccagctggcctgccccacgtggcggcccctgggcagttggcgagaacagttggcacgggctttcgtgggtggtgggccgcagctgctgcatggggacaccatctacagtggggccgaccgctatcgcctgcacacagctgctggtggcaccgtgcacctggagatcggcctgctgctccgcaacttcgaccgctacggcgtggagtgctgagggactctgcctccaacgtcaccaccatccacaccccggacacccagtgatgggggaggatggcacagtggtcaagagcacagactctagagactgtcagagctgaccccagctaaggcatggcaccgcttctgtcctttctaggacctcggggtccctctgggcccagtttccctatctgtaaattggggacagtaaatgtatggggtcgcagggtgttgagtgacaggaggctgcttagccacatgggaggtgctcagtaaaggagagcaattctta

SEQ ID NO: 110613 - DNA, 848 bp, Homo sapiens
  Payload ID: 1692
  Gene Symbol: B9D2
  Gene Name: B9 protein domain 2
  ENST ID: ENST00000594416
  CDS Start-End: 213-461
agcctgctgttgccccagcaacaaccacggaaaccaagacgagcgcggtcgcggaagtatcgcggcttacatatctcgcagccaggcgggtcctgggagaggcgcgagccaggcctggtcggcgcccgcggagaaaagaagcagtcaagcccatgaactacaaccccggttgccgctttctcctctcctaaccgttaagtgcgctaagggccatggctgaggtgcacgtgatcgggcagatcataggggccagcggtttctcggaaagtagcctcttctgcaagtggggcattcacacagagacagggtctcgctatgttgcccaggctggtctcgaactcctgcgctcaaacaggccacccacttcagcctctcaaagtgctaggattaaaaacgggcggcatggaagctcctgtcaggcgtgcgggagggccaaacgcaagtggacaccccgcagataggggacatggcttactggtcccaccccatcgacctgcacttcgccaccaaaggtcttcaaggctggccccggctccatttccaggtgtggtcccaggacagctttggccgctgccagcttgcaggctatggattttgccatgtgcccagtagcccgggcacccaccagctggcctgccccacgtggcggcccctgggcagttggcgagaacagttggcacgggctttcgtgggtggtgggccgcagctgctgcatggggacaccatctacagtggggccgaccgctatcgcctgcacacagctgctggtggcaccgtgcacctggagatcggcctgctgctccgcaacttcgaccgctacggcgtggagtgctgagggactctgcctc

SEQ ID NO: 110614 - DNA, 1874 bp, Homo sapiens
  Payload ID: 1693
  Gene Symbol: BPI
  Gene Name: bactericidal/permeability-increasing protein
  Uniprot ID: P17213
  ENST ID: ENST00000262865
  CDS Start-End: 90-1553
acattctactgacttgcatttccccagccgactcttttatagctccctggttcaacctcaaggccttgaggttttggcagctctggaggatgagagagaacatggccaggggcccttgcaacgcgccgagatgggcgtccctgatggtgctggtcgccataggcaccgccgtgacagcggccgtcaaccctggcgtcgtggtcaggatctcccagaagggcctggactacgccagccagcaggggacggccgctctgcagaaggagctgaagaggatcaagattcctgactactcagacagctttaagatcaagcatcttgggaaggggcattatagcttctacagcatggacatccgtgaattccagcttcccagttcccagataagcatggtgcccaatgtgggccttaagttctccatcagcaacgccaatatcaagatcagcgggaaatggaaggcacaaaagagattcttaaaaatgagcggcaattttgacctgagcatagaaggcatgtccatttcggctgatctgaagctgggcagtaaccccacgtcaggcaagcccaccatcacctgctccagctgcagcagccacatcaacagtgtccacgtgcacatctcaaagagcaaagtggggtggctgatccaactcttccacaaaaaaattgagtctgcgcttcgaaacaagatgaacagccaggtctgcgagaaagtgaccaattctgtatcctccgagctgcaaccttatttccagactctgccagtaatgaccaaaatagattctgtggctggaatcaactatggtctggtggcacctccagcaaccacggctgagaccctggatgtacagatgaagggggagttttacagtgagaaccaccacaatccacctccctttgctccaccagtgatggagtttcccgctgcccatgaccgcatggtatacctgggcctctcagactacttcttcaacacagccgggcttgtataccaagaggctggggtcttgaagatgacccttagagatgacatgattccaaaggagtccaaatttcgactgacaaccaagttctttggaaccttcctacctgaggtggccaagaagtttcccaacatgaagatacagatccatgtctcagcctccaccccgccacacctgtctgtgcagcccaccggccttaccttctaccctgccgtggatgtccaggcctttgccgtcctccccaactcctccctggcttccctcttcctgattggcatgcacacaactggttccatggaggtcagcgccgagtccaacaggcttgttggagagctcaagctggataggctgctcctggaactgaagcactcaaatattggccccttcccggttgaattgctgcaggatatcatgaactacattgtacccattcttgtgctgcccagggttaacgagaaactacagaaaggcttccctctcccgacgccggccagagtccagctctacaacgtagtgcttcagcctcaccagaacttcctgctgttcggtgcagacgttgtctataaatgaaggcaccaggggtgccgggggctgtcagccacacctgttcctgatgggctgtggggcaccggctgcctttccccagggaatcctctccagatcttaaccaagagccccttgcaaacttcttcgactcagattcagaaatgatctaaacacgaggaaacattattcattggaaaagtgcatggtgtgtattttagggattatgagcttctttcaagggctaaggctgcagagatatttcctccaggaatcgtgtttcaattgtaaccaagaaatttccatttgtgcttcatgaaaaaaaacttctggtttttttcatgtgga

SEQ ID NO: 110615 - DNA, 2857 bp, Homo sapiens
  Payload ID: 1693
  Gene Symbol: BPI
  Gene Name: bactericidal/permeability-increasing protein
  ENST ID: ENST00000451435
  CDS Start-End: 112-399
aaaaccaccccgtttcagccctcagcctcagggctgagattcaggctcaggtctaggggttggggaatattaaagtttacaagtacaatcttactccatccatacacacacatggagaagccaggagaggacgcggccagagatgggctcctgcccttgaacccctgctggggtggaagcagagatgggggctccctatgttgcccaggctggtctcaaactcctggacccaagccatcctcccaaagtgctgggattacaagtgtgagccaccacgccaagcctgactttaagatttttgccaatccagtggacaagacaggagactggaagaaggggccagaaattcagactcagaagccccctccagaggccacaaggcagcctggtcctctctgaaccagtggctcccactcactggccccttgtctctgcctggactcctgcggatgagtggaaggccaagagggcgccctctggtgcccactagatcgactcccaattaatcacttaactgtgtgaccctgggccaactactcaacctctctgtgcctcgggtcctcctctgaacatggggataaagacagtgcttgcctcgtggggatgttgtgtgtgtatacatgcatacacacgtgtgcaaagagcttagagccacgcctggtaccatttacatgctcagtaaatgtttaggaggattgttgtgataacccagcagactgatgtgtaagcctatggtcccatctcagggcatgtgggtgtcacaggatcgtagtcctaacagcccaaaaataatgttaaaatgactcaaggacttcacttatgcttctgagcatcctgaaggaaataggcacagtctacagaactacttcctaatgctccccttagttcaactgtccacttcctcagcacagtccctgtatgtctttggaggtcccccttctccagacctccttcattcagccaacagcgtttattgagcacctgctctgtgccagccagctgctgttctaggctcttagaataaatcagaaaaccaaatagatgaaaaattctcattgttcacaagtagattctagacgtctccccagagcaaagcccaggcccttggccttcctctcccctgcctctttcttcctcattctgcacccagaacccaagaaaacgctgcagcccttcctgggagggcaggagagaggaaagatctgagttggccaagccaggctctccagcaggcagggctccagcagaggctgggcaccttcagccatcagcaactgtgtcccattacctgtggaaagcaccagccctggcctggaaaacagtaggagttcatcaagagtggctttgttgtacagtggttgtcttgtacccagttggattggcagcagcttcggggcacgaggagcgactgttcactccttggggagcttgcagcacagggcaaggtgcacagtaggcacttggtggctggcagggccctctggggcatcctatgggtgaatatcttgctgagcccatggaaggcccatgtcagaatccagtaatgtgctggggaggcgagctggggtggggttggaagtggtgctcaccagcccagccagggttcctcttaaaagtcacagtgctcgaagccagtacagtgcctcacccctttttatgccctcacctggctcatctcccatccattagtcctcaaggtacatctgtgagtcccatgggtcaggtagtgggtgcaatgggaggagatgagggtgtggacttgtcctcagatctacctcttagtacctatgagaagtcagcaaccaccctgaccctctgtgtcttcatctgtaaaatgcatatattagtctcttctttggtggaaaggattaaatgagatgttgcatatggaggcatgtgagggttttgtaagtgctcattctcccttttgcctcaggaagaaagcctccaccttcagactatcaggcacctggggacagaccccaggacactgccttttgtggctcttgccacccatggtcacctcagttactcaagccacacatgcatgttcgtgcatcccccacatatacacagaaactcacgggcgttatatcaaccagggttcctagctgcaagcaacagaaagcaaccatgactgacttaagcagaaaaggaatttctcaaaagaatattatttgatttatggaatcacaggaaatcatccaggtctctacctggaaggcagaatgaaccttattaaaatcagttgagatgcgcacttagcattgtgccttgcacagagtaactgctcaggaaaggttatccaataataatgaaagcatgtcttatggtgtgacacctctgctcaaaatcctttcatagatccaattgtctaccatggaaacccggcctctgggctgtggatacttgtgatgggagaggtggtgcgggctccgaattctttccaatagtctgcaaacccgcagagccatgaagcattgtctgtaggccagcactcatcctccacccctctgcctgcttctccgctctcctagttccttctccctcctctaggaattcagcattgccactctgattggctggattttgggacattgattgagccttgttttctagtgggcaggaggctctgtgtcttaaaggccactggcccagctgccaatgaatcagtactttgtttccccaggtagagtgggggcagggggcagggaacgggcagggcaagtttggggcattctgctccgaggtccctctagccaaacgttatcaaatctcatccaacatgctcctggctctccatttcagatgtctgtaaactggggactacaaaatgcaaatatgtttaagagttgct

SEQ ID NO: 110616 - DNA, 507 bp, Homo sapiens
  Payload ID: 1693
  Gene Symbol: BPI
  Gene Name: bactericidal/permeability-increasing protein
  ENST ID: ENST00000418004
  CDS Start-End: 138-507
cacagtcagttccaaaacaaacatgcaaaaccaccccgtttcagccctcagcctcagggctgagattcaggctcaggtctaggggttggggaatattaaagtttacaagtacaatcttactccatccatacacacacatggagaagccaggagaggacgcggccagagatgggctcctgcccttgaacccctgctggggtggaagcagagatgggggctccctatgttgcccaggctggtctcaaactcctggacccaagccatcctcccaaagtgctgggattacaagtgtgagccaccacgccaagcctgactttaagatttttgccaatccagtggctccctggttcaacctcaaggccttgaggttttggcagctctggaggatgagagagaacatggccaggggcccttgcaacgcgccgagatgggcgtccctgatggtgctggtcgccataggcaccgccgtgacagcggccgtcaaccctggcgtcgtggtcaggatct

SEQ ID NO: 110617 - DNA, 1082 bp, Homo sapiens
  Payload ID: 1693
  Gene Symbol: BPI
  Gene Name: bactericidal/permeability-increasing protein
  ENST ID: ENST00000417318
  CDS Start-End: 81-941
cccagattctagtggcaagttcacagactccatctcttggtgggggtgtggcaaagccacattacagaagagcaaatggaatggaaaatgtctgcgagaaagtgaccaattctgtatcctccgagctgcaaccttatttccagactctgccagtaatgaccaaaatagattctgtggctggaatcaactatggtctggtggcacctccagcaaccacggctgagaccctggatgtacagatgaagggggagttttacagtgagaaccaccacaatccacctccctttgctccaccagtgatggagtttcccgctgcccatgaccgcatggtatacctgggcctctcagactacttcttcaacacagccgggcttgtataccaagaggctggggtcttgaagatgacccttagagatgacatgattccaaaggagtccaaatttcgactgacaaccaagttctttggaaccttcctacctgaggtggccaagaagtttcccaacatgaagatacagatccatgtctcagcctccaccccgccacacctgtctgtgcagcccaccggccttaccttctaccctgccgtggatgtccaggcctttgccgtcctccccaactcctccctggcttccctcttcctgattggcatgcacacaactggttccatggaggtcagcgccgagtccaacaggcttgttggagagctcaagctggataggctgctcctggaactgaagcactcaaatattggccccttcccggttgaattgctgcaggatatcatgaactacattgtacccattcttgtgctgcccagggttaacgagaaactacagaaaggcttccctctcccgacgccggccagagtccagctctacaacgtagtgcttcagcctcaccagaacttcctgctgttcggtgcagacgttgtctataaatgaaggcaccaggggtgccgggggctgtcagccacacctgttcctgatgggctgtggggcaccggctgcctttccccagggaatcctctccagatcttaaccaagagccccttgcaaacttcttcgactcagattcagaaatga

SEQ ID NO: 110618 - DNA, 794 bp, Homo sapiens
  Payload ID: 1693
  Gene Symbol: BPI
  Gene Name: bactericidal/permeability-increasing protein
  ENST ID: ENST00000489102
  CDS Start-End: 58-225
cagactccatctcttggtgggggtgtggcaaagccacattacagaagagcaaatggaatggaaaatgtctgcgagaaagtgaccaattctgtatcctccgagctgcaaccttatttccagactctgccagtaatgaccaaaatagattctgtggctggaatcaactatggtctggtggcacctccagcaaccacggctgagaccctggatgtacagatgaagtgatggagtttcccgctgcccatgaccgcatggtatacctgggcctctcagactacttcttcaacacagccgggcttgtataccaagaggctggggtcttgaagatgacccttagagatgacatgattccaaaggagtccaaatttcgactgacaaccaagttctttggaaccttcctacctgaggtggccaagaagtttcccaacatgaagatacagatccatgtctcagcctccaccccgccacacctgtctgtgcagcccaccggccttaccttctaccctgccgtggatgtccaggcctttgccgtcctccccaactcctccctggcttccctcttcctgattggcatgcacacaactggttccatggaggtcagcgccgagtccaacaggcttgttggagagctcaagctggataggctgctcctggaactgaagcactcaaatattggccccttcccggttgaattgctgcaggatatcatgaactacattgtacccattcttgtgctgcccagggttaacgagaaactacagaaaggcttccctctcccgacgccggccagagtc

SEQ ID NO: 110619 - DNA, 383 bp, Homo sapiens
  Payload ID: 1693
  Gene Symbol: BPI
  Gene Name: bactericidal/permeability-increasing protein
  ENST ID: ENST00000479646
  CDS Start-End: 81-170
ggctgagattcaggctcaggtctaggggttggggaatattaaagtttacaagtacaatcttactccatccatacacacacatggagaagccaggagaggacgcggccagagatgggctcctgcccttgaacccctgctggggtggaagcaggtgcacaatgcttctttgagtatctccgtgtctgtggctgatatccagatgcaaggcttcttccgggcatccctgggaatgggagtgcatagacatactggtcaaattacagcacagcctctacacctttactgaagatggaaaactgttttccaaagttgacttgcctaacatgatgtaactatcatgcaaaaataaaaataaaattaagaataaaaatttaaaaatgaaa

SEQ ID NO: 110620 - DNA, 3743 bp, Homo sapiens
  Payload ID: 1694
  Gene Symbol: BIRC2
  Gene Name: baculoviral IAP repeat containing 2
  Uniprot ID: Q13490
  ENST ID: ENST00000227758
  CDS Start-End: 1400-3256
ggatggggcggcgggcttcgggagcgcccgggctgatccgagccgagcgggccgtatctccttgtcggcgccgctgattcccggctctgcggaggcctctaggcagccgcgcagcttccgtgtttgctgcgcccgcactgcgatttacaaccctgaagaatctccctatccctattttgtccccctgcagtaataaatcccattatggagatctcgaaactttataaagggatatagtttgaattctatggagtgtaattttgtgtatgaattatatttttaaaacattgaagagttttcagaaagaaggctagtagagttgattactgatactttatgctaagcagtacttttttggtagtacaatattttgttaggcgtttctgataacactagaaaggacaagttttatcttgtgataaattgattaatgtttacaacatgactgataattatagctgaatagtccttaaatgatgaacaggttatttagtttttaaatgcagtgtaaaaagtgtgctgtggaaattttatggctaactaagtttatggagaaaataccttcagttgatcaagaataatagtggtatacaaagttaggaagaaagtcaacatgatgctgcaggaaatggaaacaaatacaaatgatatttaacaaagatagagtttacagtttttgaactttaagccaaattcatttgacatcaagcactatagcaggcacaggttcaacaaagcttgtgggtattgacttcccccaaaagttgtcagctgaagtaatttagcccacttaagtaaatactatgatgataagctgtgtgaacttagcttttaaatagtgtgaccatatgaaggttttaattacttttgtttattggaataaaatgagattttttgggttgtcatgttaaagtgcttatagggaaagaagcctgcatataattttttaccttgtggcataatcagtaattggtctgttattcaggcttcatagcttgtaaccaaatataaataaaaggcataatttaggtattctatagttgcttagaattttgttaatataaatctctgtgaaaaatcaaggagttttaatattttcagaagtgcatccacctttcagggctttaagttagtattactcaagattatgaacaaatagcacttaggttacctgaaagagttactacaaccccaaagagttgtgttctaagtagtatcttggtaattcagagagatactcatcctacctgaatataaactgagataaatccagtaaagaaagtgtagtaaattctacataagagtctatcattgatttctttttgtggtaaaaatcttagttcatgtgaagaaatttcatgtgaatgttttagctatcaaacagtactgtcacctactcatgcacaaaactgcctcccaaagacttttcccaggtccctcgtatcaaaacattaagagtataatggaagatagcacgatcttgtcagattggacaaacagcaacaaacaaaaaatgaagtatgacttttcctgtgaactctacagaatgtctacatattcaactttccccgccggggtgcctgtctcagaaaggagtcttgctcgtgctggtttttattatactggtgtgaatgacaaggtcaaatgcttctgttgtggcctgatgctggataactggaaactaggagacagtcctattcaaaagcataaacagctatatcctagctgtagctttattcagaatctggtttcagctagtctgggatccacctctaagaatacgtctccaatgagaaacagttttgcacattcattatctcccaccttggaacatagtagcttgttcagtggttcttactccagcctttctccaaaccctcttaattctagagcagttgaagacatctcttcatcgaggactaacccctacagttatgcaatgagtactgaagaagccagatttcttacctaccatatgtggccattaacttttttgtcaccatcagaattggcaagagctggtttttattatataggacctggagatagggtagcctgctttgcctgtggtgggaagctcagtaactgggaaccaaaggatgatgctatgtcagaacaccggaggcattttcccaactgtccatttttggaaaattctctagaaactctgaggtttagcatttcaaatctgagcatgcagacacatgcagctcgaatgagaacatttatgtactggccatctagtgttccagttcagcctgagcagcttgcaagtgctggtttttattatgtgggtcgcaatgatgatgtcaaatgcttttgttgtgatggtggcttgaggtgttgggaatctggagatgatccatgggtagaacatgccaagtggtttccaaggtgtgagttcttgatacgaatgaaaggccaagagtttgttgatgagattcaaggtagatatcctcatcttcttgaacagctgttgtcaacttcagataccactggagaagaaaatgctgacccaccaattattcattttggacctggagaaagttcttcagaagatgctgtcatgatgaatacacctgtggttaaatctgccttggaaatgggctttaatagagacctggtgaaacaaacagttcaaagtaaaatcctgacaactggagagaactataaaacagttaatgatattgtgtcagcacttcttaatgctgaagatgaaaaaagagaagaggagaaggaaaaacaagctgaagaaatggcatcagatgatttgtcattaattcggaagaacagaatggctctctttcaacaattgacatgtgtgcttcctatcctggataatcttttaaaggccaatgtaattaataaacaggaacatgatattattaaacaaaaaacacagatacctttacaagcgagagaactgattgataccattttggttaaaggaaatgctgcggccaacatcttcaaaaactgtctaaaagaaattgactctacattgtataagaacttatttgtggataagaatatgaagtatattccaacagaagatgtttcaggtctgtcactggaagaacaattgaggaggttgcaagaagaacgaacttgtaaagtgtgtatggacaaagaagtttctgttgtatttattccttgtggtcatctggtagtatgccaggaatgtgccccttctctaagaaaatgccctatttgcaggggtataatcaagggtactgttcgtacatttctctcttaaagaaaaatagtctatattttaacctgcataaaaaggtctttaaaatattgttgaacacttgaagccatctaaagtaaaaagggaattatgagtttttcaattagtaacattcatgttctagtctgctttggtactaataatcttgtttctgaaaagatggtatcatatatttaatcttaatctgtttatttacaagggaagatttatgtttggtgaactatattagtatgtatgtgtacctaagggagtagtgtcactgcttgttatgcatcatttcaggagttactggatttgttgttctttcagaaagctttgaatactaaattatagtgtagaaaagaactggaaaccaggaactctggagttcatcagagttatggtgccgaattgtctttggtgcttttcacttgtgttttaaaataaggatttttctcttatttctccccctagtttgtgagaaacatctcaataaagtgctttaaaaaga

SEQ ID NO: 110621 - DNA, 1927 bp, Homo sapiens
  Payload ID: 1694
  Gene Symbol: BIRC2
  Gene Name: baculoviral IAP repeat containing 2
  Uniprot ID: Q13490
  ENST ID: ENST00000530675
  CDS Start-End: 165-1874
atcgtgcgtcagagtgagcccggatggggcggcgggcttcgggagcgcccgggctgatccgagccgagcgggccgtatctccttgtcggcgccgctgattcccggctctgcggaggcctctaggcagccgcgcagcttccgtgtttgctgcgcccgcactgcgaatgtctacatattcaactttccccgccggggtgcctgtctcagaaaggagtcttgctcgtgctggtttttattatactggtgtgaatgacaaggtcaaatgcttctgttgtggcctgatgctggataactggaaactaggagacagtcctattcaaaagcataaacagctatatcctagctgtagctttattcagaatctggtttcagctagtctgggatccacctctaagaatacgtctccaatgagaaacagttttgcacattcattatctcccaccttggaacatagtagcttgttcagtggttcttactccagcctttctccaaaccctcttaattctagagcagttgaagacatctcttcatcgaggactaacccctacagttatgcaatgagtactgaagaagccagatttcttacctaccatatgtggccattaacttttttgtcaccatcagaattggcaagagctggtttttattatataggacctggagatagggtagcctgctttgcctgtggtgggaagctcagtaactgggaaccaaaggatgatgctatgtcagaacaccggaggcattttcccaactgtccatttttggaaaattctctagaaactctgaggtttagcatttcaaatctgagcatgcagacacatgcagctcgaatgagaacatttatgtactggccatctagtgttccagttcagcctgagcagcttgcaagtgctggtttttattatgtgggtcgcaatgatgatgtcaaatgcttttgttgtgatggtggcttgaggtgttgggaatctggagatgatccatgggtagaacatgccaagtggtttccaaggtgtgagttcttgatacgaatgaaaggccaagagtttgttgatgagattcaaggtagatatcctcatcttcttgaacagctgttgtcaacttcagataccactggagaagaaaatgctgacccaccaattattcattttggacctggagaaagttcttcagaagatgctgtcatgatgaatacacctgtggttaaatctgccttggaaatgggctttaatagagacctggtgaaacaaacagttcaaagtaaaatcctgacaactggagagaactataaaacagttaatgatattgtgtcagcacttcttaatgctgaagatgaaaaaagagaagaggagaaggaaaaacaagctgaagaaatggcatcagatgatttgtcattaattcggaagaacagaatggctctctttcaacaattgacatgtgtgcttcctatcctggataatcttttaaaggccaatgtaattaataaacaggaacatgatattattaaacaaaaaacacagatacctttacaagcgagagaactgattgataccattttggttaaaggaaatgctgcggccaacatcttcaaaaactgtctaaaagaaattgactctacattgtataagaacttatttgtggataagaatatgaagtatattccaacagaagatgtttcaggtctgtcactggaagaacaattgaggaggttgcaagaagaacgaacttgtaaagtgtgtatggacaaagaagtttctgttgtatttattccttgtggtcatctggtagtatgccaggaatgtgccccttctctaagaaaatgccctatttgcaggggtataatcaagggtactgttcgtacatttctctcttaaagaaaaatagtctatattttaacctgcataaaaaggtctttaaaatattgttg

SEQ ID NO: 110622 - DNA, 505 bp, Homo sapiens
  Payload ID: 1694
  Gene Symbol: BIRC2
  Gene Name: baculoviral IAP repeat containing 2
  ENST ID: ENST00000532832
  CDS Start-End: 269-505
atcgtgcgtcagagtgagcccggatggggcggcgggcttcgggagcgcccgggctgatccgagccgagcgggccgtatctccttgtcggcgccgctgattcccggctctgcggaggcctctaggcagccgcgcagcttccgtgtttgctgcgcccgcactgcgatttacaaccctgaagaatctccctatccctattttgtccccctgcagtaataaatcccattatggagatctcgaaactttataaagggatatagtttgaattctatggagtgtaattttgtagcagttgaagacatctcttcatcgaggactaacccctacagttatgcaatgagtactgaagaagccagatttcttacctaccatatgtggccattaacttttttgtcaccatcagaattggcaagagctggtttttattatataggacctggagatagggtagcctgctttgcctgtggtgggaagctcagtaactgggaaccaaaggatgatgctatg

SEQ ID NO: 110623 - DNA, 720 bp, Homo sapiens
  Payload ID: 1694
  Gene Symbol: BIRC2
  Gene Name: baculoviral IAP repeat containing 2
  ENST ID: ENST00000533742
  CDS Start-End: 173-720
agagtgagcccggatggggcggcgggcttcgggagcgcccgggctgatccgagccgagcgggccgtatctccttgtcggcgccgctgattcccggctctgcggaggcctctaggcagccgcgcagcttccgtgtttgctgcgcccgcactgcggtgtgagttcttgatacgaatgaaaggccaagagtttgttgatgagattcaaggtagatatcctcatcttcttgaacagctgttgtcaacttcagataccactggagaagaaaatgctgacccaccaattattcattttggacctggagaaagttcttcagaagatgctgtcatgatgaatacacctgtggttaaatctgccttggaaatgggctttaatagagacctggtgaaacaaacagttcaaagtaaaatcctgacaactggagagaactataaaacagttaatgatattgtgtcagcacttcttaatgctgaagatgaaaaaagagaagaggagaaggaaaaacaagctgaagaaatggcatcagatgatttgtcattaattcggaagaacagaatggctctctttcaacaattgacatgtgtgcttcctatcctggataatcttttaaaggccaatgtaattaataaacaggaacatgatattattaaacaaaaaacacagatacctttacaagcgagagaactgattgataccattttggttaaaggaaatgctgcggc

SEQ ID NO: 110624 - DNA, 866 bp, Homo sapiens
  Payload ID: 1694
  Gene Symbol: BIRC2
  Gene Name: baculoviral IAP repeat containing 2
  ENST ID: ENST00000528344
  CDS Start-End: 1-789
tatgacttttcctgtgaactctacagaatgtctacatattcaactttccccgccggggtgcctgtctcagaaaggagtcttgctcgtgctggtttttattatactggtgtgaatgacaaggtcaaatgcttctgttgtggcctgatgctggataactggaaactaggagacagtcctattcaaaagcataaacagctatatcctagctgtagctttattcagaatctggtttcagctagtctgggatccacctctaagaatacgtctccaatgagaaacagttttgcacattcattatctcccaccttggaacatagtagcttgttcagtggttcttactccagcctttctccaaaccctcttaattctagagcagttgaagacatctcttcatcgaggactaacccctacagttatgcaatgagtactgaagaagccagatttcttacctaccatatgtggccattaacttttttgtcaccatcagaattggcaagagctggtttttattatataggacctggagatagggtagcctgctttgcctgtggtgggaagctcagtaactgggaaccaaaggatgatgctatgtcagaacaccggaggcattttcccaactgtccatttttggaaaattctctagaaactctgaggtttagcatttcaaatctgagcatgcagacacatgcagctcgaatgagaacatttatgtactggccatctagtgttccagttcagcctgagcagcttgcaagtgctggtttttattatgtgggtgtgagttcttgatacgaatgaaaggccaagagtttgttgatgagattcaaggtagatatcctcatcttcttgaacagctgttgtcaact

SEQ ID NO: 110625 - DNA, 595 bp, Homo sapiens
  Payload ID: 1694
  Gene Symbol: BIRC2
  Gene Name: baculoviral IAP repeat containing 2
  ENST ID: ENST00000527465
  CDS Start-End: 149-595
gatccgagccgagcgggccgtatctccttgtcggcgccgctgattcccggctctgcggaggcctctaggcagccgcgcagcttccgtgtttgctgcgcccgcactgcgacttttcccaggtccctcgtatcaaaacattaagagtataatggaagatagcacgatcttgtcagattggacaaacagcaacaaacaaaaaatgaagtatgacttttcctgtgaactctacagaatgtctacatattcaactttccccgccggggtgcctgtctcagaaaggagtcttgctcgtgctggtttttattatactggtgtgaatgacaaggtcaaatgcttctgttgtggcctgatgctggataactggaaactaggagacagtcctattcaaaagcataaacagctatatcctagctgtagctttattcagaatctggtttcagctagtctgggatccacctctaagaatacgtctccaatgagaaacagttttgcacattcattatctcccaccttggaacatagtagcttgttcagtggttcttactccagcctttctccaaaccctcttaattctagagcagttgaagacatctct

SEQ ID NO: 110626 - DNA, 2617 bp, Homo sapiens
  Payload ID: 1694
  Gene Symbol: BIRC2
  Gene Name: baculoviral IAP repeat containing 2
  ENST ID: ENST00000532672
  CDS Start-End: 338-2131
gggcttcgggagcgcccgggctgatccgagccgagcgggccgtatctccttgtcggcgccgctgattcccggctctgcggaggcctctaggcagccgcgcagcttccgtgtttgctgcgcccgcactgcgatttacaaccctgaagaatctccctatccctattttgtccccctgcagtaataaatcccattatggagatctcgaaactttataaagggatatagtttgaattctatggagtgtaattttgtgtatgaattatatttttaaaacattgaagagttttcagaaagaagacttttcccaggtccctcgtatcaaaacattaagagtataatggaagatagcacgatcttgtcagattggacaaacagcaacaaacaaaaaatgaagtatgacttttcctgtgaactctacagaatgtctacatattcaactttccccgccggggtgcctgtctcagaaaggagtcttgctcgtgctggtttttattatactggtgtgaatgacaaggtcaaatgcttctgttgtggcctgatgctggataactggaaactaggagacagtcctattcaaaagcataaacagctatatcctagctgtagctttattcagaatctggtttcagctagtctgggatccacctctaagaatacgtctccaatgagaaacagttttgcacattcattatctcccaccttggaacatagtagcttgttcagtggttcttactccagcctttctccaaaccctcttaattctagagcagttgaagacatctcttcatcgaggactaacccctacagttatgcaatgagtactgaagaagccagatttcttacctaccatatgtggccattaacttttttgtcaccatcagaattggcaagagctggtttttattatataggacctggagatagggtagcctgctttgcctgtggtgggaagctcagtaactgggaaccaaaggatgatgctatgtcagaacaccggaggcattttcccaactgtccatttttggaaaattctctagaaactctgaggtttagcatttcaaatctgagcatgcagacacatgcagctcgaatgagaacatttatgtactggccatctagtgttccagttcagcctgagcagcttgcaagtgctggtttttattatgtgggtcgcaatgatgatgtcaaatgcttttgttgtgatggtggcttgaggtgttgggaatctggagatgatccatgggtagaacatgccaagtggtttccaaggtgtgagttcttgatacgaatgaaaggccaagagtttgttgatgagattcaaggtagatatcctcatcttcttgaacagctgttgtcaacttcagataccactggagaagaaaatgctgacccaccaattattcattttggacctggagaaagttcttcagaagatgctgtcatgatgaatacacctgtggttaaatctgccttggaaatgggctttaatagagacctggtgaaacaaacagttcaaagtaaaatcctgacaactggagagaactataaaacagttaatgatattgtgtcagcacttcttaatgctgaagatgaaaaaagagaagaggagaaggaaaaacaagctgaagaaatggcatcagatgatttgtcattaattcggaagaacagaatggctctctttcaacaattgacatgtgtgcttcctatcctggataatcttttaaaggccaatgtaattaataaacaggaacatgatattattaaacaaaaaacacagatacctttacaagcgagagaactgattgataccattttggttaaaggaaatgctgcggccaacatcttcaaaaactgtctaaaagaaattgactctacattgtataagaacttatttgtggataagaatatgaagtatattccaacagaagatgtttcaggtctgtcactggaagaacaattgaggaggttgcaagaagaacgaacttgtaaagtgtgtatggacaaagaagtttctgttgtatttattccttgtggtcatctggtagtatgccaggaatgtgccccttctctaagaaaatgccctatttgcaggggtataatcaagggtactgttcgtacatttctctcttaaagaaaaatagtctatattttaacctgcataaaaaggtctttaaaatattgttgaacacttgaagccatctaaagtaaaaagggaattatgagtttttcaattagtaacattcatgttctagtctgctttggtactaataatcttgtttctgaaaagatggtatcatatatttaatcttaatctgtttatttacaagggaagatttatgtttggtgaactatattagtatgtatgtgtacctaagggagtagtgtcactgcttgttatgcatcatttcaggagttactggatttgttgttctttcagaaagctttgaatactaaattatagtgtagaaaagaactggaaaccaggaactctggagttcatcagagttatggtgccgaattgtctttggtgcttttcacttgtgttttaaaataaggatttttctcttatttctccccctagtttgtgagaaacatctcaataaagtgctttaaaaag

SEQ ID NO: 110627 - DNA, 572 bp, Homo sapiens
  Payload ID: 1694
  Gene Symbol: BIRC2
  Gene Name: baculoviral IAP repeat containing 2
  ENST ID: ENST00000531259
  CDS Start-End: 154-572
cgggagcgcccgggctgatccgagccgagcgggccgtatctccttgtcggcgccgctgattcccggctctgcggaggcctctaggcagccgcgcagcttccgtgtttgctgcgcccgcactgcgatgatttgtcattaattcggaagaacagaatggctctctttcaacaattgacatgtgtgcttcctatcctggataatcttttaaaggccaatgtaattaataaacaggaacatgatattattaaacaaaaaacacagatacctttacaagcgagagaactgattgataccattttggttaaaggaaatgctgcggccaacatcttcaaaaactgtctaaaagaaattgactctacattgtataagaacttatttgtggataagaatatgaagtatattccaacagaagatgtttcaggtctgtcactggaagaacaattgaggaggttgcaagaagaacgaacttgtaaagtgtgtatggacaaagaagtttctgttgtatttattccttgtggtcatctggtagtatgccaggaatgtgccccttctctaagaaaatgccctatttg

SEQ ID NO: 110628 - DNA, 4066 bp, Homo sapiens
  Payload ID: 1694
  Gene Symbol: BIRC2
  Gene Name: baculoviral IAP repeat containing 2
  Uniprot ID: Q13490
  ENST ID: ENST00000613397
  CDS Start-End: 1730-3586
gcggtgagtgctgctccttccgggctcgggcggcgtggggcgggtggggacgcgagggcccgcgggggcccacttccctgatgtggcggcgaacgaggaaggacggggcctgaggcccttcggccaagggtcgagggtcgccgggggctctctgctttctactctcgccaaggttttattggattcggaagccccaacttcgagacttgcagtcaaagcgatttttaaaatgacttgttttcaagcctctggccgccgcccactcttctggcccttggactttgaccaagatgttttctcgcagtttttgcaaggttttaaacttagccctcggcgttcttttaatgtaatacattgaaacgaagatatttcggtggcggcgatatttcatatttcatagttgccactgcgctctgtcattccagtagtcgtctgttgtgtattgtgagaagcaactctgggaaattattggatttacaaccctgaagaatctccctatccctattttgtccccctgcagtaataaatcccattatggagatctcgaaactttataaagggatatagtttgaattctatggagtgtaattttgtgtatgaattatatttttaaaacattgaagagttttcagaaagaaggctagtagagttgattactgatactttatgctaagcagtacttttttggtagtacaatattttgttaggcgtttctgataacactagaaaggacaagttttatcttgtgataaattgattaatgtttacaacatgactgataattatagctgaatagtccttaaatgatgaacaggttatttagtttttaaatgcagtgtaaaaagtgtgctgtggaaattttatggctaactaagtttatggagaaaataccttcagttgatcaagaataatagtggtatacaaagttaggaagaaagtcaacatgatgctgcaggaaatggaaacaaatacaaatgatatttaacaaagatagagtttacagtttttgaactttaagccaaattcatttgacatcaagcactatagcaggcacaggttcaacaaagcttgtgggtattgacttcccccaaaagttgtcagctgaagtaatttagcccacttaagtaaatactatgatgataagctgtgtgaacttagcttttaaatagtgtgaccatatgaaggttttaattacttttgtttattggaataaaatgagattttttgggttgtcatgttaaagtgcttatagggaaagaagcctgcatataattttttaccttgtggcataatcagtaattggtctgttattcaggcttcatagcttgtaaccaaatataaataaaaggcataatttaggtattctatagttgcttagaattttgttaatataaatctctgtgaaaaatcaaggagttttaatattttcagaagtgcatccacctttcagggctttaagttagtattactcaagattatgaacaaatagcacttaggttacctgaaagagttactacaaccccaaagagttgtgttctaagtagtatcttggtaattcagagagatactcatcctacctgaatataaactgagataaatccagtaaagaaagtgtagtaaattctacataagagtctatcattgatttctttttgtggtaaaaatcttagttcatgtgaagaaatttcatgtgaatgttttagctatcaaacagtactgtcacctactcatgcacaaaactgcctcccaaagacttttcccaggtccctcgtatcaaaacattaagagtataatggaagatagcacgatcttgtcagattggacaaacagcaacaaacaaaaaatgaagtatgacttttcctgtgaactctacagaatgtctacatattcaactttccccgccggggtgcctgtctcagaaaggagtcttgctcgtgctggtttttattatactggtgtgaatgacaaggtcaaatgcttctgttgtggcctgatgctggataactggaaactaggagacagtcctattcaaaagcataaacagctatatcctagctgtagctttattcagaatctggtttcagctagtctgggatccacctctaagaatacgtctccaatgagaaacagttttgcacattcattatctcccaccttggaacatagtagcttgttcagtggttcttactccagcctttctccaaaccctcttaattctagagcagttgaagacatctcttcatcgaggactaacccctacagttatgcaatgagtactgaagaagccagatttcttacctaccatatgtggccattaacttttttgtcaccatcagaattggcaagagctggtttttattatataggacctggagatagggtagcctgctttgcctgtggtgggaagctcagtaactgggaaccaaaggatgatgctatgtcagaacaccggaggcattttcccaactgtccatttttggaaaattctctagaaactctgaggtttagcatttcaaatctgagcatgcagacacatgcagctcgaatgagaacatttatgtactggccatctagtgttccagttcagcctgagcagcttgcaagtgctggtttttattatgtgggtcgcaatgatgatgtcaaatgcttttgttgtgatggtggcttgaggtgttgggaatctggagatgatccatgggtagaacatgccaagtggtttccaaggtgtgagttcttgatacgaatgaaaggccaagagtttgttgatgagattcaaggtagatatcctcatcttcttgaacagctgttgtcaacttcagataccactggagaagaaaatgctgacccaccaattattcattttggacctggagaaagttcttcagaagatgctgtcatgatgaatacacctgtggttaaatctgccttggaaatgggctttaatagagacctggtgaaacaaacagttcaaagtaaaatcctgacaactggagagaactataaaacagttaatgatattgtgtcagcacttcttaatgctgaagatgaaaaaagagaagaggagaaggaaaaacaagctgaagaaatggcatcagatgatttgtcattaattcggaagaacagaatggctctctttcaacaattgacatgtgtgcttcctatcctggataatcttttaaaggccaatgtaattaataaacaggaacatgatattattaaacaaaaaacacagatacctttacaagcgagagaactgattgataccattttggttaaaggaaatgctgcggccaacatcttcaaaaactgtctaaaagaaattgactctacattgtataagaacttatttgtggataagaatatgaagtatattccaacagaagatgtttcaggtctgtcactggaagaacaattgaggaggttgcaagaagaacgaacttgtaaagtgtgtatggacaaagaagtttctgttgtatttattccttgtggtcatctggtagtatgccaggaatgtgccccttctctaagaaaatgccctatttgcaggggtataatcaagggtactgttcgtacatttctctcttaaagaaaaatagtctatattttaacctgcataaaaaggtctttaaaatattgttgaacacttgaagccatctaaagtaaaaagggaattatgagtttttcaattagtaacattcatgttctagtctgctttggtactaataatcttgtttctgaaaagatggtatcatatatttaatcttaatctgtttatttacaagggaagatttatgtttggtgaactatattagtatgtatgtgtacctaagggagtagtgtcactgcttgttatgcatcatttcaggagttactggatttgttgttctttcagaaagctttgaatactaaattatagtgtagaaaagaactggaaaccaggaactctggagttcatcagagttatggtgccgaattgtctttggtgcttttcacttgtgttttaaaataaggatttttctcttatttctccccctagtttgtgagaaacatctcaataaagtgcttt

SEQ ID NO: 110629 - DNA, 3331 bp, Homo sapiens
  Payload ID: 1694
  Gene Symbol: BIRC2
  Gene Name: baculoviral IAP repeat containing 2
  ENST ID: ENST00000621637
  CDS Start-End: 1730-3331
gcggtgagtgctgctccttccgggctcgggcggcgtggggcgggtggggacgcgagggcccgcgggggcccacttccctgatgtggcggcgaacgaggaaggacggggcctgaggcccttcggccaagggtcgagggtcgccgggggctctctgctttctactctcgccaaggttttattggattcggaagccccaacttcgagacttgcagtcaaagcgatttttaaaatgacttgttttcaagcctctggccgccgcccactcttctggcccttggactttgaccaagatgttttctcgcagtttttgcaaggttttaaacttagccctcggcgttcttttaatgtaatacattgaaacgaagatatttcggtggcggcgatatttcatatttcatagttgccactgcgctctgtcattccagtagtcgtctgttgtgtattgtgagaagcaactctgggaaattattggatttacaaccctgaagaatctccctatccctattttgtccccctgcagtaataaatcccattatggagatctcgaaactttataaagggatatagtttgaattctatggagtgtaattttgtgtatgaattatatttttaaaacattgaagagttttcagaaagaaggctagtagagttgattactgatactttatgctaagcagtacttttttggtagtacaatattttgttaggcgtttctgataacactagaaaggacaagttttatcttgtgataaattgattaatgtttacaacatgactgataattatagctgaatagtccttaaatgatgaacaggttatttagtttttaaatgcagtgtaaaaagtgtgctgtggaaattttatggctaactaagtttatggagaaaataccttcagttgatcaagaataatagtggtatacaaagttaggaagaaagtcaacatgatgctgcaggaaatggaaacaaatacaaatgatatttaacaaagatagagtttacagtttttgaactttaagccaaattcatttgacatcaagcactatagcaggcacaggttcaacaaagcttgtgggtattgacttcccccaaaagttgtcagctgaagtaatttagcccacttaagtaaatactatgatgataagctgtgtgaacttagcttttaaatagtgtgaccatatgaaggttttaattacttttgtttattggaataaaatgagattttttgggttgtcatgttaaagtgcttatagggaaagaagcctgcatataattttttaccttgtggcataatcagtaattggtctgttattcaggcttcatagcttgtaaccaaatataaataaaaggcataatttaggtattctatagttgcttagaattttgttaatataaatctctgtgaaaaatcaaggagttttaatattttcagaagtgcatccacctttcagggctttaagttagtattactcaagattatgaacaaatagcacttaggttacctgaaagagttactacaaccccaaagagttgtgttctaagtagtatcttggtaattcagagagatactcatcctacctgaatataaactgagataaatccagtaaagaaagtgtagtaaattctacataagagtctatcattgatttctttttgtggtaaaaatcttagttcatgtgaagaaatttcatgtgaatgttttagctatcaaacagtactgtcacctactcatgcacaaaactgcctcccaaagacttttcccaggtccctcgtatcaaaacattaagagtataatggaagatagcacgatcttgtcagattggacaaacagcaacaaacaaaaaatgaagtatgacttttcctgtgaactctacagaatgtctacatattcaactttccccgccggggtgcctgtctcagaaaggagtcttgctcgtgctggtttttattatactggtgtgaatgacaaggtcaaatgcttctgttgtggcctgatgctggataactggaaactaggagacagtcctattcaaaagcataaacagctatatcctagctgtagctttattcagaatctggtttcagctagtctgggatccacctctaagaatacgtctccaatgagaaacagttttgcacattcattatctcccaccttggaacatagtagcttgttcagtggttcttactccagcctttctccaaaccctcttaattctagagcagttgaagacatctcttcatcgaggactaacccctacagttatgcaatgagtactgaagaagccagatttcttacctaccatatgtggccattaacttttttgtcaccatcagaattggcaagagctggtttttattatataggacctggagatagggtagcctgctttgcctgtggtgggaagctcagtaactgggaaccaaaggatgatgctatgtcagaacaccggaggcattttcccaactgtccatttttggaaaattctctagaaactctgaggtttagcatttcaaatctgagcatgcagacacatgcagctcgaatgagaacatttatgtactggccatctagtgttccagttcagcctgagcagcttgcaagtgctggtttttattatgtgggtcgcaatgatgatgtcaaatgcttttgttgtgatggtggcttgaggtgttgggaatctggagatgatccatgggtagaacatgccaagtggtttccaaggtgtgagttcttgatacgaatgaaaggccaagagtttgttgatgagattcaaggtagatatcctcatcttcttgaacagctgttgtcaacttcagataccactggagaagaaaatgctgacccaccaattattcattttggacctggagaaagttcttcagaagatgctgtcatgatgaatacacctgtggttaaatctgccttggaaatgggctttaatagagacctggtgaaacaaacagttcaaagtaaaatcctgacaactggagagaactataaaacagttaatgatattgtgtcagcacttcttaatgctgaagatgaaaaaagagaagaggagaaggaaaaacaagctgaagaaatggcatcagatgatttgtcattaattcggaagaacagaatggctctctttcaacaattgacatgtgtgcttcctatcctggataatcttttaaaggccaatgtaattaataaacaggaacatgatattattaaacaaaaaacacagatacctttacaagcgagagaactgattgataccattttggttaaaggaaatgctgcggccaacatcttcaaaaactgtctaaaagtaaaacaaagattt

SEQ ID NO: 110630 - DNA, 5197 bp, Homo sapiens
  Payload ID: 1695
  Gene Symbol: BIRC3
  Gene Name: baculoviral IAP repeat containing 3
  Uniprot ID: Q13489
  ENST ID: ENST00000263464
  CDS Start-End: 2751-4565
ggccaggcgacaggtgtcgcttgaaaagactgggcttgtccttgctggtgcatgcgtcgtcggcctctgggcagcaggtttacaaaggaggaaaacgacttcttctagatttttttttcagtttcttctataaatcaaaacatctcaaaatggagacctaaaatccttaaagggacttagtctaatctcgggaggtagttttgtgcatgggtaaacaaattaagtattaactggtgttttactatccaaagaatgctaattttataaacatgatcgagttatataaggtataccataatgagtttgattttgaatttgatttgtggaaataaaggaaaagtgattctagctggggcatattgttaaagcatttttttcagagttggccaggcagtctcctactggcacattctcccattatgtagaatagaaatagtacctgtgtttgggaaagattttaaaatgagtgacagttatttggaacaaagagctaataatcaatccactgcaaattaaagaaacatgcagatgaaagttttgacacattaaaatacttctacagtgacaaagaaaaatcaagaacaaagctttttgatatgtgcaacaaatttagaggaagtaaaaagataaatgtgatgattggtcaagaaattatccagttatttacaaggccactgatattttaaacgtccaaaagtttgtttaaatgggctgttaccgctgagaatgatgaggatgagaatgatggttgaaggttacattttaggaaatgaagaaacttagaaaattaatataaagacagtgatgaatacaaagaagatttttataacaatgtgtaaaatttttggccagggaaaggaatattgaagttagatacaattacttacctttgagggaaataattgttggtaatgagatgtgatgtttctcctgccacctggaaacaaagcattgaagtctgcagttgaaaagcccaacgtctgtgagatccaggaaaccatgcttgcaaaccactggtaaaaaaaaaaaaaaaaaaaaaaaaaagccacagtgacttgcttattggtcattgctagtattatcgactcagaacctctttactaatggctagtaaatcataattgagaaattctgaattttgacaaggtctctgctgttgaaatggtaaatttattattttttttgtcatgataaattctggttcaaggtatgctatccatgaaataatttctgaccaaaactaaattgatgcaatttgattatccatcttagcctacagatggcatctggtaacttttgactgttttaaaaaataaatccactatcagagtagatttgatgttggcttcagaaacatttagaaaaacaaaagttcaaaaatgttttcaggaggtgataagttgaataactctacaatgttagttctttgagggggacaaaaaatttaaaatctttgaaaggtcttattttacagccatatctaaattatcttaagaaaatttttaacaaagggaatgaaatatatatcatgattctgtttttccaaaagtaacctgaatatagcaatgaagttcagttttgttattggtagtttgggcagagtctctttttgcagcacctgttgtctaccataattacagaggacatttccatgttctagccaagtatactattagaataaaaaaacttaacattgagttgcttcaacagcatgaaactgagtccaaaagaccaaatgaacaaacacattaatctctgattatttattttaaatagaatatttaattgtgtaagatctaatagtatcattatacttaagcaatcatattcctgatgatctatgggaaataactattatttaattaatattgaaaccaggttttaagatgtgttagccagtcctgttactagtaaatctctttatttggagagaaattttagattgttttgttctccttattagaaggattgtagaaagaaaaaaatgactaattggagaaaaattggggatatatcatatttcactgaattcaaaatgtcttcagttgtaaatcttaccattattttacgtacctctaagaaataaaagtgcttctaattaaaatatgatgtcattaattatgaaatacttcttgataacagaagttttaaaatagccatcttagaatcagtgaaatatggtaatgtattattttcctcctttgagttaggtcttgtgcttttttttcctggccactaaatttcacaatttccaaaaagcaaaataaacatattctgaatatttttgctgtgaaacacttgacagcagagctttccaccatgaaaagaagcttcatgagtcacacattacatctttgggttgattgaatgccactgaaacattctagtagcctggagaagttgacctacctgtggagatgcctgccattaaatggcatcctgatggcttaatacacatcactcttctgtgaagggttttaattttcaacacagcttactctgtagcatcatgtttacattgtatgtataaagattatacaaaggtgcaattgtgtatttcttccttaaaatgtatcagtataggatttagaatctccatgttgaaactctaaatgcatagaaataaaaataataaaaaatttttcattttggcttttcagcctagtattaaaactgataaaagcaaagccatgcacaaaactacctccctagagaaaggctagtcccttttcttccccattcatttcattatgaacatagtagaaaacagcatattcttatcaaatttgatgaaaagcgccaacacgtttgaactgaaatacgacttgtcatgtgaactgtaccgaatgtctacgtattccacttttcctgctggggttcctgtctcagaaaggagtcttgctcgtgctggtttctattacactggtgtgaatgacaaggtcaaatgcttctgttgtggcctgatgctggataactggaaaagaggagacagtcctactgaaaagcataaaaagttgtatcctagctgcagattcgttcagagtctaaattccgttaacaacttggaagctacctctcagcctacttttccttcttcagtaacaaattccacacactcattacttccgggtacagaaaacagtggatatttccgtggctcttattcaaactctccatcaaatcctgtaaactccagagcaaatcaagatttttctgccttgatgagaagttcctaccactgtgcaatgaataacgaaaatgccagattacttacttttcagacatggccattgacttttctgtcgccaacagatctggcaaaagcaggcttttactacataggacctggagacagagtggcttgctttgcctgtggtggaaaattgagcaattgggaaccgaaggataatgctatgtcagaacacctgagacattttcccaaatgcccatttatagaaaatcagcttcaagacacttcaagatacacagtttctaatctgagcatgcagacacatgcagcccgctttaaaacattctttaactggccctctagtgttctagttaatcctgagcagcttgcaagtgcgggtttttattatgtgggtaacagtgatgatgtcaaatgcttttgctgtgatggtggactcaggtgttgggaatctggagatgatccatgggttcaacatgccaagtggtttccaaggtgtgagtacttgataagaattaaaggacaggagttcatccgtcaagttcaagccagttaccctcatctacttgaacagctgctatccacatcagacagcccaggagatgaaaatgcagagtcatcaattatccattttgaacctggagaagaccattcagaagatgcaatcatgatgaatactcctgtgattaatgctgccgtggaaatgggctttagtagaagcctggtaaaacagacagttcagagaaaaatcctagcaactggagagaattatagactagtcaatgatcttgtgttagacttactcaatgcagaagatgaaataagggaagaggagagagaaagagcaactgaggaaaaagaatcaaatgatttattattaatccggaagaatagaatggcactttttcaacatttgacttgtgtaattccaatcctggatagtctactaactgccggaattattaatgaacaagaacatgatgttattaaacagaagacacagacgtctttacaagcaagagaactgattgatacgattttagtaaaaggaaatattgcagccactgtattcagaaactctctgcaagaagctgaagctgtgttatatgagcatttatttgtgcaacaggacataaaatatattcccacagaagatgtttcagatctaccagtggaagaacaattgcggagactacaagaagaaagaacatgtaaagtgtgtatggacaaagaagtgtccatagtgtttattccttgtggtcatctagtagtatgcaaagattgtgctccttctttaagaaagtgtcctatttgtaggagtacaatcaagggtacagttcgtacatttctttcatgaagaagaaccaaaacatcgtctaaactttagaattaatttattaaatgtattataactttaacttttatcctaatttggtttccttaaaatttttatttatttacaactcaaaaaacattgttttgtgtaacatatttatatatgtatctaaaccatatgaacatatattttttagaaactaagagaatgataggcttttgttcttatgaacgaaaaagaggtagcactacaaacacaatattcaatcaaaatttcagcattattgaaattgtaagtgaagtaaaacttaagatatttgagttaacctttaagaattttaaatattttggcattgtactaataccgggaacatgaagccaggtgtggtggtatgtgcctgtagtcccaggctgaggcaagagaattacttgagcccaggagtttgaatccatcctgggcagcatactgagaccctgcctttaaaaacaaacagaacaaaaacaaaacaccagggacacatttctctgtcttttttgatcagtgtcctatacatcgaaggtgtgcatatatgttgaatgacattttagggacatggtgtttttataaagaattctgtgagaaaaaatttaataaagcaacaaaaattactctta

SEQ ID NO: 110631 - DNA, 549 bp, Homo sapiens
  Payload ID: 1695
  Gene Symbol: BIRC3
  Gene Name: baculoviral IAP repeat containing 3
  ENST ID: ENST00000527309
  CDS Start-End: 1-549
cagcttcaagacacttcaagatacacagtttctaatctgagcatgcagacacatgcagcccgctttaaaacattctttaactggccctctagtgttctagttaatcctgagcagcttgcaagtgcgggtttttattatgtgggtaacagtgatgatgtcaaatgcttttgctgtgatggtggactcaggtgttgggaatctggagatgatccatgggttcaacatgccaagtggtttccaagatggagcctggctctgttgcccagattggagtgcgatggtgtgatgtcagctcactgcaacctccgcctcttgggttcaggcaattctcatgcctcgagcctcgctagtagctgggattacaggtgtgagtacttgataagaattaaaggacaggagttcatccgtcaagttcaagccagttaccctcatctacttgaacagctgctatccacatcagacagcccaggagatgaaaatgcagagtcatcaattatccattttgaacctggagaagaccattcagaagatgcaatcatgatgaatact

SEQ ID NO: 110632 - DNA, 4238 bp, Homo sapiens
  Payload ID: 1695
  Gene Symbol: BIRC3
  Gene Name: baculoviral IAP repeat containing 3
  Uniprot ID: Q13489
  ENST ID: ENST00000532808
  CDS Start-End: 123-1937
gggcagcaggtttacaaaggaggaaaacgacttcttctagatttttttttcagtttcttctataaatcaaaactacctccctagagaaaggctagtcccttttcttccccattcatttcattatgaacatagtagaaaacagcatattcttatcaaatttgatgaaaagcgccaacacgtttgaactgaaatacgacttgtcatgtgaactgtaccgaatgtctacgtattccacttttcctgctggggttcctgtctcagaaaggagtcttgctcgtgctggtttctattacactggtgtgaatgacaaggtcaaatgcttctgttgtggcctgatgctggataactggaaaagaggagacagtcctactgaaaagcataaaaagttgtatcctagctgcagattcgttcagagtctaaattccgttaacaacttggaagctacctctcagcctacttttccttcttcagtaacaaattccacacactcattacttccgggtacagaaaacagtggatatttccgtggctcttattcaaactctccatcaaatcctgtaaactccagagcaaatcaagatttttctgccttgatgagaagttcctaccactgtgcaatgaataacgaaaatgccagattacttacttttcagacatggccattgacttttctgtcgccaacagatctggcaaaagcaggcttttactacataggacctggagacagagtggcttgctttgcctgtggtggaaaattgagcaattgggaaccgaaggataatgctatgtcagaacacctgagacattttcccaaatgcccatttatagaaaatcagcttcaagacacttcaagatacacagtttctaatctgagcatgcagacacatgcagcccgctttaaaacattctttaactggccctctagtgttctagttaatcctgagcagcttgcaagtgcgggtttttattatgtgggtaacagtgatgatgtcaaatgcttttgctgtgatggtggactcaggtgttgggaatctggagatgatccatgggttcaacatgccaagtggtttccaaggtgtgagtacttgataagaattaaaggacaggagttcatccgtcaagttcaagccagttaccctcatctacttgaacagctgctatccacatcagacagcccaggagatgaaaatgcagagtcatcaattatccattttgaacctggagaagaccattcagaagatgcaatcatgatgaatactcctgtgattaatgctgccgtggaaatgggctttagtagaagcctggtaaaacagacagttcagagaaaaatcctagcaactggagagaattatagactagtcaatgatcttgtgttagacttactcaatgcagaagatgaaataagggaagaggagagagaaagagcaactgaggaaaaagaatcaaatgatttattattaatccggaagaatagaatggcactttttcaacatttgacttgtgtaattccaatcctggatagtctactaactgccggaattattaatgaacaagaacatgatgttattaaacagaagacacagacgtctttacaagcaagagaactgattgatacgattttagtaaaaggaaatattgcagccactgtattcagaaactctctgcaagaagctgaagctgtgttatatgagcatttatttgtgcaacaggacataaaatatattcccacagaagatgtttcagatctaccagtggaagaacaattgcggagactacaagaagaaagaacatgtaaagtgtgtatggacaaagaagtgtccatagtgtttattccttgtggtcatctagtagtatgcaaagattgtgctccttctttaagaaagtgtcctatttgtaggagtacaatcaagggtacagttcgtacatttctttcatgaagaagaaccaaaacatcgtctaaactttagaattaatttattaaatgtattataactttaacttttatcctaatttggtttccttaaaatttttatttatttacaactcaaaaaacattgttttgtgtaacatatttatatatgtatctaaaccatatgaacatatattttttagaaactaagagaatgataggcttttgttcttatgaacgaaaaagaggtagcactacaaacacaatattcaatcaaaatttcagcattattgaaattgtaagtgaagtaaaacttaagatatttgagttaacctttaagaattttaaatattttggcattgtactaataccgggaacatgaagccaggtgtggtggtatgtgcctgtagtcccaggctgaggcaagagaattacttgagcccaggagtttgaatccatcctgggcagcatactgagaccctgcctttaaaaacaaacagaacaaaaacaaaacaccagggacacatttctctgtcttttttgatcagtgtcctatacatcgaaggtgtgcatatatgttgaatgacattttagggacatggtgtttttataaagaattctgtgagaaaaaatttaataaagcaacaaaaattactcttattcttcattgctttatttcaatgacattggatagtttagtcactcccagactctttccataccttcttaaagcctctcaaatattgaactacagtttatactccttcccataagatgcttcttcattgacacttgtagaacacggggtcaacacatcataaaatctattatggaatgcctgagacaagaatcaaacagtccctttagtaagtttgtttattcacttctctattgattcattcaagaagtctcatgccagccccacctattggaagaaggtctgagttttattcttatctctttggtattaattctgaaacttagaaagtacactggttagcaatgcttgggaccaacaggttgttctggtaaataaatctgtttcatattgtcagtgcaacaaaatgtccccctctgcattatgttattggtactcaacacgtccgagtcataactctgtcctttgcttcttatagaggtattaggtcttcaagagcagaagtaagactgtaatagggaatactcaggggaaggcaggcaaaggctagtcatctaaaccagttctagatgtctgtataggggcagatggctctgtaagggcagaagggaaagaccccttcataagggtcacagctgacaatcctataacaaaagacaggttaacaagagaaaaacttaacaaatttatttaatcacagatttacatcaccggggagccttcgtaatgaagatccaaaattacaggggaaactgtgcatttttatgcttaggtttgataatgaatggacagccctgaagaatagtgattggaaaaaaaggatatgatctaatgggaatagacacaggttggggacccagcaaggcctgtctgttcagattattcttggtctctgtgcagcattccttcctcctggatatagggcagggcctgtatgggatggggatattataacctgctatcaagcaaggtaggtcagagaatttatttatggccagctcttacatagttaggtgaggaaagattagagtactatctttaagatgtaagtctggcattgtggaaagatggttccagtttctatgacctaccttggggaagaggaattcaagtttctgtggcttgccttcagggagaatgaggctgagacaggagggcaggataacatcagagaaaaactttgcttctgaggccttcactttgggttttctgagccccaacatctgctagtgttgtaaagagaacaattagggaccaagtgaggggaggaaagaatccatctctgcattctgatgctgggagacttatttccttgaaatgcaattgattttgcctctgctaagaggctctgctggctacccatgtactagccagtgtcctgcatgggtgctaggctgaattatttgtaattgtgcttaggtgatttgtaactcaggtatagggtatttaaatagtaggcaccctttttgcaccatgtgtttttttttttatctagttcttgtatactacagataatatttgaactttgtcatctcactgtaaaacttttgttcatttctcattatggtaataaatagctattataaccaacccatttattcaaatatgttatttccctaagtgttattttgacattttgttttggaaaaaataaatcaccatagataataa

SEQ ID NO: 110633 - DNA, 4342 bp, Homo sapiens
  Payload ID: 1695
  Gene Symbol: BIRC3
  Gene Name: baculoviral IAP repeat containing 3
  Uniprot ID: Q13489
  ENST ID: ENST00000615299
  CDS Start-End: 236-2050
gcatttaaaagacagcgtgagactcgcgccctccggcacggaaaaggccaggcgacaggtgtcgcttgaaaagactgggcttgtccttgctggtgcatgcgtcgtcggcctctgggcagcaggtttacaaaggaggaaaacgacttcttctagatttttttttcagtttcttctataaatcaaaactacctccctagagaaaggctagtcccttttcttccccattcatttcattatgaacatagtagaaaacagcatattcttatcaaatttgatgaaaagcgccaacacgtttgaactgaaatacgacttgtcatgtgaactgtaccgaatgtctacgtattccacttttcctgctggggttcctgtctcagaaaggagtcttgctcgtgctggtttctattacactggtgtgaatgacaaggtcaaatgcttctgttgtggcctgatgctggataactggaaaagaggagacagtcctactgaaaagcataaaaagttgtatcctagctgcagattcgttcagagtctaaattccgttaacaacttggaagctacctctcagcctacttttccttcttcagtaacaaattccacacactcattacttccgggtacagaaaacagtggatatttccgtggctcttattcaaactctccatcaaatcctgtaaactccagagcaaatcaagatttttctgccttgatgagaagttcctaccactgtgcaatgaataacgaaaatgccagattacttacttttcagacatggccattgacttttctgtcgccaacagatctggcaaaagcaggcttttactacataggacctggagacagagtggcttgctttgcctgtggtggaaaattgagcaattgggaaccgaaggataatgctatgtcagaacacctgagacattttcccaaatgcccatttatagaaaatcagcttcaagacacttcaagatacacagtttctaatctgagcatgcagacacatgcagcccgctttaaaacattctttaactggccctctagtgttctagttaatcctgagcagcttgcaagtgcgggtttttattatgtgggtaacagtgatgatgtcaaatgcttttgctgtgatggtggactcaggtgttgggaatctggagatgatccatgggttcaacatgccaagtggtttccaaggtgtgagtacttgataagaattaaaggacaggagttcatccgtcaagttcaagccagttaccctcatctacttgaacagctgctatccacatcagacagcccaggagatgaaaatgcagagtcatcaattatccattttgaacctggagaagaccattcagaagatgcaatcatgatgaatactcctgtgattaatgctgccgtggaaatgggctttagtagaagcctggtaaaacagacagttcagagaaaaatcctagcaactggagagaattatagactagtcaatgatcttgtgttagacttactcaatgcagaagatgaaataagggaagaggagagagaaagagcaactgaggaaaaagaatcaaatgatttattattaatccggaagaatagaatggcactttttcaacatttgacttgtgtaattccaatcctggatagtctactaactgccggaattattaatgaacaagaacatgatgttattaaacagaagacacagacgtctttacaagcaagagaactgattgatacgattttagtaaaaggaaatattgcagccactgtattcagaaactctctgcaagaagctgaagctgtgttatatgagcatttatttgtgcaacaggacataaaatatattcccacagaagatgtttcagatctaccagtggaagaacaattgcggagactacaagaagaaagaacatgtaaagtgtgtatggacaaagaagtgtccatagtgtttattccttgtggtcatctagtagtatgcaaagattgtgctccttctttaagaaagtgtcctatttgtaggagtacaatcaagggtacagttcgtacatttctttcatgaagaagaaccaaaacatcgtctaaactttagaattaatttattaaatgtattataactttaacttttatcctaatttggtttccttaaaatttttatttatttacaactcaaaaaacattgttttgtgtaacatatttatatatgtatctaaaccatatgaacatatattttttagaaactaagagaatgataggcttttgttcttatgaacgaaaaagaggtagcactacaaacacaatattcaatcaaaatttcagcattattgaaattgtaagtgaagtaaaacttaagatatttgagttaacctttaagaattttaaatattttggcattgtactaataccgggaacatgaagccaggtgtggtggtatgtgcctgtagtcccaggctgaggcaagagaattacttgagcccaggagtttgaatccatcctgggcagcatactgagaccctgcctttaaaaacaaacagaacaaaaacaaaacaccagggacacatttctctgtcttttttgatcagtgtcctatacatcgaaggtgtgcatatatgttgaatgacattttagggacatggtgtttttataaagaattctgtgagaaaaaatttaataaagcaacaaaaattactcttattcttcattgctttatttcaatgacattggatagtttagtcactcccagactctttccataccttcttaaagcctctcaaatattgaactacagtttatactccttcccataagatgcttcttcattgacacttgtagaacacggggtcaacacatcataaaatctattatggaatgcctgagacaagaatcaaacagtccctttagtaagtttgtttattcacttctctattgattcattcaagaagtctcatgccagccccacctattggaagaaggtctgagttttattcttatctctttggtattaattctgaaacttagaaagtacactggttagcaatgcttgggaccaacaggttgttctggtaaataaatctgtttcatattgtcagtgcaacaaaatgtccccctctgcattatgttattggtactcaacacgtccgagtcataactctgtcctttgcttcttatagaggtattaggtcttcaagagcagaagtaagactgtaatagggaatactcaggggaaggcaggcaaaggctagtcatctaaaccagttctagatgtctgtataggggcagatggctctgtaagggcagaagggaaagaccccttcataagggtcacagctgacaatcctataacaaaagacaggttaacaagagaaaaacttaacaaatttatttaatcacagatttacatcaccggggagccttcgtaatgaagatccaaaattacaggggaaactgtgcatttttatgcttaggtttgataatgaatggacagccctgaagaatagtgattggaaaaaaaggatatgatctaatgggaatagacacaggttggggacccagcaaggcctgtctgttcagattattcttggtctctgtgcagcattccttcctcctggatatagggcagggcctgtatgggatggggatattataacctgctatcaagcaaggtaggtcagagaatttatttatggccagctcttacatagttaggtgaggaaagattagagtactatctttaagatgtaagtctggcattgtggaaagatggttccagtttctatgacctaccttggggaagaggaattcaagtttctgtggcttgccttcagggagaatgaggctgagacaggagggcaggataacatcagagaaaaactttgcttctgaggccttcactttgggttttctgagccccaacatctgctagtgttgtaaagagaacaattagggaccaagtgaggggaggaaagaatccatctctgcattctgatgctgggagacttatttccttgaaatgcaattgattttgcctctgctaagaggctctgctggctacccatgtactagccagtgtcctgcatgggtgctaggctgaattatttgtaattgtgcttaggtgatttgtaactcaggtatagggtatttaaatagtaggcaccctttttgcaccatgtgtttttttttttatctagttcttgtatactacagataatatttgaactttgtcatctcactgtaaaacttttgttcatttctcattatggtaataaatagctattataaccaacccatttattcaaatatgttatttccctaagtgttattttgacattttgttttggaaaaaataaatcaccat

SEQ ID NO: 110634 - DNA, 2711 bp, Homo sapiens
  Payload ID: 1696
  Gene Symbol: BIRC5
  Gene Name: baculoviral IAP repeat containing 5
  ENST ID: ENST00000301633
  CDS Start-End: 132-629
cgcctctactcccagaaggccgcggggggtggaccgcctaagagggcgtgcgctcccgacatgccccgcggcgcgccattaaccgccagatttgaatcgcgggacccgttggcagaggtggcggcggcggcatgggtgccccgacgttgccccctgcctggcagccctttctcaaggaccaccgcatctctacattcaagaactggcccttcttggagggctgcgcctgcaccccggagcggatggccgaggctggcttcatccactgccccactgagaacgagccagacttggcccagtgtttcttctgcttcaaggagctggaaggctgggagccagatgacgaccccattgggccgggcacggtggcttacgcctgtaataccagcactttgggaggccgaggcgggcggatcacgagagaggaacataaaaagcattcgtccggttgcgctttcctttctgtcaagaagcagtttgaagaattaacccttggtgaatttttgaaactggacagagaaagagccaagaacaaaattgcaaaggaaaccaacaataagaagaaagaatttgaggaaactgcggagaaagtgcgccgtgccatcgagcagctggctgccatggattgaggcctctggccggagctgcctggtcccagagtggctgcaccacttccagggtttattccctggtgccaccagccttcctgtgggccccttagcaatgtcttaggaaaggagatcaacattttcaaattagatgtttcaactgtgctcttgttttgtcttgaaagtggcaccagaggtgcttctgcctgtgcagcgggtgctgctggtaacagtggctgcttctctctctctctctcttttttgggggctcatttttgctgttttgattcccgggcttaccaggtgagaagtgagggaggaagaaggcagtgtcccttttgctagagctgacagctttgttcgcgtgggcagagccttccacagtgaatgtgtctggacctcatgttgttgaggctgtcacagtcctgagtgtggacttggcaggtgcctgttgaatctgagctgcaggttccttatctgtcacacctgtgcctcctcagaggacagtttttttgttgttgtgtttttttgtttttttttttttggtagatgcatgacttgtgtgtgatgagagaatggagacagagtccctggctcctctactgtttaacaacatggctttcttattttgtttgaattgttaattcacagaatagcacaaactacaattaaaactaagcacaaagccattctaagtcattggggaaacggggtgaacttcaggtggatgaggagacagaatagagtgataggaagcgtctggcagatactccttttgccactgctgtgtgattagacaggcccagtgagccgcggggcacatgctggccgctcctccctcagaaaaaggcagtggcctaaatcctttttaaatgacttggctcgatgctgtgggggactggctgggctgctgcaggccgtgtgtctgtcagcccaaccttcacatctgtcacgttctccacacgggggagagacgcagtccgcccaggtccccgctttctttggaggcagcagctcccgcagggctgaagtctggcgtaagatgatggatttgattcgccctcctccctgtcatagagctgcagggtggattgttacagcttcgctggaaacctctggaggtcatctcggctgttcctgagaaataaaaagcctgtcatttcaaacactgctgtggaccctactgggtttttaaaatattgtcagtttttcatcgtcgtccctagcctgccaacagccatctgcccagacagccgcagtgaggatgagcgtcctggcagagacgcagttgtctctgggcgcttgccagagccacgaaccccagacctgtttgtatcatccgggctccttccgggcagaaacaactgaaaatgcacttcagacccacttatttctgccacatctgagtcggcctgagatagacttttccctctaaactgggagaatatcacagtggtttttgttagcagaaaatgcactccagcctctgtactcatctaagctgcttatttttgatatttgtgtcagtctgtaaatggatacttcactttaataactgttgcttagtaattggctttgtagagaagctggaaaaaaatggttttgtcttcaactcctttgcatgccaggcggtgatgtggatctcggcttctgtgagcctgtgctgtgggcagggctgagctggagccgcccctctcagcccgcctgccacggcctttccttaaaggccatccttaaaaccagaccctcatggctaccagcacctgaaagcttcctcgacatctgttaataaagccgtaggcccttgtctaagtgcaaccgcctagactttctttcagatacatgtccacatgtccatttttcaggttctctaagttggagtggagtctgggaagggttgtgaatgaggcttctgggctatgggtgaggttccaatggcaggttagagcccctcgggccaactgccatcctggaaagtagagacagcagtgcccgctgcccagaagagaccagcaagccaaactggagcccccattgcaggctgtcgccatgtggaaagagtaactcacaattgccaataaagtctcatgtggttttatctac

SEQ ID NO: 110635 - DNA, 2630 bp, Homo sapiens
  Payload ID: 1696
  Gene Symbol: BIRC5
  Gene Name: baculoviral IAP repeat containing 5
  ENST ID: ENST00000350051
  CDS Start-End: 120-548
cagaaggccgcggggggtggaccgcctaagagggcgtgcgctcccgacatgccccgcggcgcgccattaaccgccagatttgaatcgcgggacccgttggcagaggtggcggcggcggcatgggtgccccgacgttgccccctgcctggcagccctttctcaaggaccaccgcatctctacattcaagaactggcccttcttggagggctgcgcctgcaccccggagcggatggccgaggctggcttcatccactgccccactgagaacgagccagacttggcccagtgtttcttctgcttcaaggagctggaaggctgggagccagatgacgaccccatagaggaacataaaaagcattcgtccggttgcgctttcctttctgtcaagaagcagtttgaagaattaacccttggtgaatttttgaaactggacagagaaagagccaagaacaaaattgcaaaggaaaccaacaataagaagaaagaatttgaggaaactgcggagaaagtgcgccgtgccatcgagcagctggctgccatggattgaggcctctggccggagctgcctggtcccagagtggctgcaccacttccagggtttattccctggtgccaccagccttcctgtgggccccttagcaatgtcttaggaaaggagatcaacattttcaaattagatgtttcaactgtgctcttgttttgtcttgaaagtggcaccagaggtgcttctgcctgtgcagcgggtgctgctggtaacagtggctgcttctctctctctctctcttttttgggggctcatttttgctgttttgattcccgggcttaccaggtgagaagtgagggaggaagaaggcagtgtcccttttgctagagctgacagctttgttcgcgtgggcagagccttccacagtgaatgtgtctggacctcatgttgttgaggctgtcacagtcctgagtgtggacttggcaggtgcctgttgaatctgagctgcaggttccttatctgtcacacctgtgcctcctcagaggacagtttttttgttgttgtgtttttttgtttttttttttttggtagatgcatgacttgtgtgtgatgagagaatggagacagagtccctggctcctctactgtttaacaacatggctttcttattttgtttgaattgttaattcacagaatagcacaaactacaattaaaactaagcacaaagccattctaagtcattggggaaacggggtgaacttcaggtggatgaggagacagaatagagtgataggaagcgtctggcagatactccttttgccactgctgtgtgattagacaggcccagtgagccgcggggcacatgctggccgctcctccctcagaaaaaggcagtggcctaaatcctttttaaatgacttggctcgatgctgtgggggactggctgggctgctgcaggccgtgtgtctgtcagcccaaccttcacatctgtcacgttctccacacgggggagagacgcagtccgcccaggtccccgctttctttggaggcagcagctcccgcagggctgaagtctggcgtaagatgatggatttgattcgccctcctccctgtcatagagctgcagggtggattgttacagcttcgctggaaacctctggaggtcatctcggctgttcctgagaaataaaaagcctgtcatttcaaacactgctgtggaccctactgggtttttaaaatattgtcagtttttcatcgtcgtccctagcctgccaacagccatctgcccagacagccgcagtgaggatgagcgtcctggcagagacgcagttgtctctgggcgcttgccagagccacgaaccccagacctgtttgtatcatccgggctccttccgggcagaaacaactgaaaatgcacttcagacccacttatttctgccacatctgagtcggcctgagatagacttttccctctaaactgggagaatatcacagtggtttttgttagcagaaaatgcactccagcctctgtactcatctaagctgcttatttttgatatttgtgtcagtctgtaaatggatacttcactttaataactgttgcttagtaattggctttgtagagaagctggaaaaaaatggttttgtcttcaactcctttgcatgccaggcggtgatgtggatctcggcttctgtgagcctgtgctgtgggcagggctgagctggagccgcccctctcagcccgcctgccacggcctttccttaaaggccatccttaaaaccagaccctcatggctaccagcacctgaaagcttcctcgacatctgttaataaagccgtaggcccttgtctaagtgcaaccgcctagactttctttcagatacatgtccacatgtccatttttcaggttctctaagttggagtggagtctgggaagggttgtgaatgaggcttctgggctatgggtgaggttccaatggcaggttagagcccctcgggccaactgccatcctggaaagtagagacagcagtgcccgctgcccagaagagaccagcaagccaaactggagcccccattgcaggctgtcgccatgtggaaagagtaactcacaattgccaataaagtctcatgtggttttatctac

SEQ ID NO: 110636 - DNA, 2446 bp, Homo sapiens
  Payload ID: 1696
  Gene Symbol: BIRC5
  Gene Name: baculoviral IAP repeat containing 5
  Uniprot ID: O15392
  ENST ID: ENST00000374948
  CDS Start-End: 54-467
ttaaccgccagatttgaatcgcgggacccgttggcagaggtggcggcggcggcatgggtgccccgacgttgccccctgcctggcagccctttctcaaggaccaccgcatctctacattcaagaactggcccttcttggagggctgcgcctgcaccccggagcggatggccgaggctggcttcatccactgccccactgagaacgagccagacttggcccagtgtttcttctgcttcaaggagctggaaggctgggagccagatgacgaccccatgcaaaggaaaccaacaataagaagaaagaatttgaggaaactgcggagaaagtgcgccgtgccatcgagcagctggctgccatggattgaggcctctggccggagctgcctggtcccagagtggctgcaccacttccagggtttattccctggtgccaccagccttcctgtgggccccttagcaatgtcttaggaaaggagatcaacattttcaaattagatgtttcaactgtgctcttgttttgtcttgaaagtggcaccagaggtgcttctgcctgtgcagcgggtgctgctggtaacagtggctgcttctctctctctctctcttttttgggggctcatttttgctgttttgattcccgggcttaccaggtgagaagtgagggaggaagaaggcagtgtcccttttgctagagctgacagctttgttcgcgtgggcagagccttccacagtgaatgtgtctggacctcatgttgttgaggctgtcacagtcctgagtgtggacttggcaggtgcctgttgaatctgagctgcaggttccttatctgtcacacctgtgcctcctcagaggacagtttttttgttgttgtgtttttttgtttttttttttttggtagatgcatgacttgtgtgtgatgagagaatggagacagagtccctggctcctctactgtttaacaacatggctttcttattttgtttgaattgttaattcacagaatagcacaaactacaattaaaactaagcacaaagccattctaagtcattggggaaacggggtgaacttcaggtggatgaggagacagaatagagtgataggaagcgtctggcagatactccttttgccactgctgtgtgattagacaggcccagtgagccgcggggcacatgctggccgctcctccctcagaaaaaggcagtggcctaaatcctttttaaatgacttggctcgatgctgtgggggactggctgggctgctgcaggccgtgtgtctgtcagcccaaccttcacatctgtcacgttctccacacgggggagagacgcagtccgcccaggtccccgctttctttggaggcagcagctcccgcagggctgaagtctggcgtaagatgatggatttgattcgccctcctccctgtcatagagctgcagggtggattgttacagcttcgctggaaacctctggaggtcatctcggctgttcctgagaaataaaaagcctgtcatttcaaacactgctgtggaccctactgggtttttaaaatattgtcagtttttcatcgtcgtccctagcctgccaacagccatctgcccagacagccgcagtgaggatgagcgtcctggcagagacgcagttgtctctgggcgcttgccagagccacgaaccccagacctgtttgtatcatccgggctccttccgggcagaaacaactgaaaatgcacttcagacccacttatttctgccacatctgagtcggcctgagatagacttttccctctaaactgggagaatatcacagtggtttttgttagcagaaaatgcactccagcctctgtactcatctaagctgcttatttttgatatttgtgtcagtctgtaaatggatacttcactttaataactgttgcttagtaattggctttgtagagaagctggaaaaaaatggttttgtcttcaactcctttgcatgccaggcggtgatgtggatctcggcttctgtgagcctgtgctgtgggcagggctgagctggagccgcccctctcagcccgcctgccacggcctttccttaaaggccatccttaaaaccagaccctcatggctaccagcacctgaaagcttcctcgacatctgttaataaagccgtaggcccttgtctaagtgcaaccgcctagactttctttcagatacatgtccacatgtccatttttcaggttctctaagttggagtggagtctgggaagggttgtgaatgaggcttctgggctatgggtgaggttccaatggcaggttagagcccctcgggccaactgccatcctggaaagtagagacagcagtgcccgctgcccagaagagaccagcaagccaaactggagcccccattgcaggctgtcgccatgtggaaagagtaactcacaattgccaataaagtctcatgtggttttatctac

SEQ ID NO: 110637 - DNA, 568 bp, Homo sapiens
  Payload ID: 1696
  Gene Symbol: BIRC5
  Gene Name: baculoviral IAP repeat containing 5
  Uniprot ID: O15392
  ENST ID: ENST00000590449
  CDS Start-End: 38-262
aatcgcgggacccgttggcagaggtggcggcggcggcatgggtgccccgacgttgccccctgcctggcagccctttctcaaggaccaccgcatctctacattcaagaactggcccttcttggagggctgcgcctgcaccccggagcggatggccgaggctggcttcatccactgccccactgagaacgagccagacttggcccagtgtttcttctgcttcaaggagctggaaggctgggagccagatgacgaccccatgtaagtcttctctggccagcctcgatgggctttgttttgaactgagttgtcaaaagatttgagttgcaaagacacttagtatgggagggttgctttccaccctcattgcttcttaaacagctgttgtgaacggatacctctctatatgctggtgccttggtgatgcttacaacctaattaaatctcatttgaccaaaatgccttggggtggacgtaagatgcctgatgcctttcatgttcaacagaatacatcagcagaccctgttgttgtgaactcccaggaacgtccaagtgctttttttgagatttt

SEQ ID NO: 110638 - DNA, 524 bp, Homo sapiens
  Payload ID: 1696
  Gene Symbol: BIRC5
  Gene Name: baculoviral IAP repeat containing 5
  ENST ID: ENST00000586192
  CDS Start-End: 1-250
gaactggcccttcttggagggctgcgcctgcaccccggagcggatggccgaggctggcttcatccactgccccactgagaacgagccagacttggcccagtgtttcttctgcttcaaggagctggaaggctgggagccagatgacgaccccattgggccgggcacggtggcttacgcctgtaataccagcactttgggaggccgaggcgggcggatcacgaggtcaggagatcgagaccatcttggctaatacgagaggaacataaaaagcattcgtccggttgcgctttcctttctgtcaagaagcagtttgaagaattaacccttggtgaatttttgaaactggacagagaaagagccaagaacaaaattgagagagctctgttagcagaatgaaaaaattggaagccagattcagggagggactggaagcaaaagaatttctgttcgaggaagagcctgatgtttgccagggtctgtttaactggacatgaagaggaaggctctggactttcctccaggag

SEQ ID NO: 110639 - DNA, 386 bp, Homo sapiens
  Payload ID: 1696
  Gene Symbol: BIRC5
  Gene Name: baculoviral IAP repeat containing 5
  Uniprot ID: O15392
  ENST ID: ENST00000592734
  CDS Start-End: 1-237
atgggtgccccgacgttgccccctgcctggcagccctttctcaaggaccaccgcatctctacattcaagaactggcccttcttggagggctgcgcctgcaccccggagcggatggccgaggctggcttcatccactgccccactgagaacgagccagacttggcccagtgtttcttctgcttcaaggagctggaaggctgggagccagatgacgaccccatgagagagctctgttagcagaatgaaaaaattggaagccagattcagggagggactggaagcaaaagaatttctgttcgaggaagagcctgatgtttgccagggtctgtttaactggacatgaagaggaaggctctggactttcctccaggagtttcaggagaaag

SEQ ID NO: 110640 - DNA, 492 bp, Homo sapiens
  Payload ID: 1696
  Gene Symbol: BIRC5
  Gene Name: baculoviral IAP repeat containing 5
  ENST ID: ENST00000587746
  CDS Start-End: 1-364
gaactggcccttcttggagggctgcgcctgcaccccggagcggatggccgaggctggcttcatccactgccccactgagaacgagccagacttggcccagtgtttcttctgcttcaaggagctggaaggctgggagccagatgacgaccccattgggccgggcacggtggcttacgcctgtaataccagcactttgggaggccgaggcgggcggatcacgagagaggaacataaaaagcattcgtccggttgcgctttcctttctgtcaagaagcagtttgaagaattaacccttggtgaatttttgaaactggacagagaaagagccaagaacaaaattgagagagctctgttagcagaatgaaaaaattggaagccagattcagggagggactggaagcaaaagaatttctgttcgaggaagagcctgatgtttgccagggtctgtttaactggacatgaagaggaaggctctggactttcctccaggag

SEQ ID NO: 110641 - DNA, 496 bp, Homo sapiens
  Payload ID: 1696
  Gene Symbol: BIRC5
  Gene Name: baculoviral IAP repeat containing 5
  ENST ID: ENST00000591800
  CDS Start-End: 1-157
gaactggcccttcttggagggctgcgcctgcaccccggagcggatggccgaggctggcttcatccactgccccactgagaacgagccagacttggcccagtgtttcttctgcttcaaggagctggaaggctgggagccagatgacgaccccatgtaatgggccgggcacggtggcttacgcctgtaataccagcactttgggaggccgaggcgggcggatcacgagagaggaacataaaaagcattcgtccggttgcgctttcctttctgtcaagaagcagtttgaagaattaacccttggtgaatttttgaaactggacagagaaagagccaagaacaaaattgagagagctctgttagcagaatgaaaaaattggaagccagattcagggagggactggaagcaaaagaatttctgttcgaggaagagcctgatgtttgccagggtctgtttaactggacatgaagaggaaggctctggactttcctccaggag

SEQ ID NO: 110642 - DNA, 648 bp, Homo sapiens
  Payload ID: 1696
  Gene Symbol: BIRC5
  Gene Name: baculoviral IAP repeat containing 5
  Uniprot ID: O15392
  ENST ID: ENST00000590925
  CDS Start-End: 55-417
attaaccgccagatttgaatcgcgggacccgttggcagaggtggcggcggcggcatgggtgccccgacgttgccccctgcctggcagccctttctcaaggaccaccgcatctctacattcaagaactggcccttcttggagggctgcgcctgcaccccggagcggatggccgaggctggcttcatccactgccccactgagaacgagccagacttggcccagtgtttcttctgcttcaaggagctggaaggctgggagccagatgacgaccccatagaggaacataaaaagcattcgtccggttgcgctttcctttctgtcaagaagcagtttgaagaattaacccttggtgaatttttgaaactggacagagaaagagccaagaacaaaattgagagagctctgttagcagaatgaaaaaattggaagccagattcagggagggactggaagcaaaagaatttctgttcgaggaagagcctgatgtttgccagggtctgtttaactggacatgaagaggaaggctctggactttcctccaggagtttcaggagaaaggcaaaggaaaccaacaataagaagaaagaatttgaggaaactgcggagaaagtgcgccgtgccatcgagcagctggctgccatggattga

SEQ ID NO: 110643 - DNA, 508 bp, Homo sapiens
  Payload ID: 1697
  Gene Symbol: BIRC6
  Gene Name: baculoviral IAP repeat containing 6
  ENST ID: ENST00000431454
  CDS Start-End: 1-331
ggaggatcataaagaagacattctatgtgggccagtatggcttgctagtggccttgatctatcagggcatgctggaatgttgacgttaacaagccccaaacttgttaaaggtatggcaggaggaaaatatcgttcgtttttaatccatgtcaaggcagtgaatgaaagaggaacagaagagatttgtaatggtggtatgcgtcctgtagtaaggcttccatccctaaaacaccagagtaacaagggttattcacttgcttcacttttggctaaagttgcagcaggcaagagtgcaacgatgtgccatgttacagttttcagaatttcatgagaagcttcttaatactctttgcagaaaaacagatgatggccagatcacagaacatgcccagagccttgtgttggatactctctgttggttagctggagttcattcaaatggacccggaagctcaaaggaaggaaatgagaacctactttcaaaaacacgaaaatttctgtcagacat

SEQ ID NO: 110644 - DNA, 15703 bp, Homo sapiens
  Payload ID: 1697
  Gene Symbol: BIRC6
  Gene Name: baculoviral IAP repeat containing 6
  Uniprot ID: Q9NR09
  ENST ID: ENST00000421745
  CDS Start-End: 135-14708
tccctgcttctccccctctcccgtcagcctccctccgagtttggcccctccggccgggcgatcgacgttccgcgtgcgtgcgggcgcctgacttcacttccggctaacgcgctcggcttgccccctggccccggatggtgactggtggtggtgctgcacctcccgggactgtcactgagccgcttcccagtgtgattgtgctgagcgcaggccggaagatggcggctgcggctgcggcggcctcgggccccggctgctcctcggcggcgggggcgggggcggccggggtctcagagtggctggtgctgcgggacggctgcatgcactgcgacgccgacgggctgcacagcctgtcctaccaccctgcgctcaacgccatcctggccgtcactagccgcgggaccatcaaagtcatcgacggcacctcgggggccacactgcaggcctccgcgctcagtgctaaaccaggtggacaggtgaaatgtcagtatatctctgctgtggataaagttatatttgtggatgattatgcagtagggtgtaggaaggaccttaatggaatcttgttgttagacactgctctgcaaactccagtttcaaagcaggatgatgtggttcagcttgaattacccgttacagaggcacagcagctcttatcagcatgtttagaaaaggtagatatttctagtacagagggttatgatttgttcatcacacagctcaaagatggtttaaaaaatacatctcatgagactgcagcaaaccacaaagttgctaagtgggccacagttacatttcatcttcctcatcatgtgttgaagtccattgccagtgccattgtaaatgaactcaagaaaataaatcaaaatgttgctgccttacctgtggcgtcctcagtgatggacagattgtcttacctcttacctagtgcacgtccagaactcggagtggggccaggccgttctgtagacagatcactgatgtatagtgaagctaacagacgggagacatttacctcatggcctcatgtaggctataggtgggcacaaccagatcccatggctcaagctggattttatcatcagcctgcctcatctggagatgatagagccatgtgttttacttgtagtgtatgcctcgtttgttgggaacctactgatgaaccttggtctgaacacgaaagacattccccaaactgcccatttgtgaaaggtgagcacacacagaatgtgccattgtcagtcactcttgcaacaagtcctgcacagtttccttgtacggatggaactgacagaatatcttgctttgggtcggggagctgccctcattttctagctgctgcaactaaacgaggaaagatctgcatatgggatgtttccaaacttatgaaggtgcacttaaagtttgaaattaatgcctatgatccagcaattgtacaacagcttattctatcaggagacccaagctcaggagttgattcaaggagaccaactttggcgtggctggaggactcctctagttgctcagatataccaaaattggaaggagatagtgatgatttactggaggattcagacagtgaagagcattccagatcagattctgtgacagggcatacatcacagaaggaagccatggaagtaagccttgatataacagcactcagcattctccaacagccagaaaaacttcagtgggagattgttgcaaatgtgcttgaagatactgttaaggatcttgaagaacttggggcaaatccttgtttaacaaactctaagagtgaaaagacaaaggaaaagcaccaggagcaacacaacattccttttccatgtttattagctggaggtttattaacatataaatctcctgctacctcacccattagtagtaattctcacaggtcactggatggtttaagcagaactcagggtgaaagtatatcagaacaagggtcaactgacaatgaatcctgcactaattcagaactaaattctcctctggtaaggaggactttaccggttttgcttctttatagcatcaaggaatctgatgagaaagcaggaaagatcttttcacagatgaacaatattatgagtaaaagtttgcatgatgatggttttactgttccacagattattgaaatggagctggatagtcaggagcagttgttattgcaggatcctcctgtgacttacattcagcaatttgcagatgcagcagccaaccttacctctccggattctgagaagtggaactctgtgtttcccaagcctgggactttggttcagtgcttgaggctgccaaagtttgcagaggaggagaatctttgtatagactcaataactccttgtgctgacggaattcatttgttggtaggactgcggacatgccctgttgaatccttgagtgcaataaatcaagtagaggccttgaataatttaaataaattaaactctgcactatgtaatagacggaaaggtgagctggaatcaaatcttgctgtagtgaatggtgcaaatattagtgtaatccaacatgaatcaccagcagatgtacagactcctttaataattcagcctgagcagaggaatgttagtggtggatatttagtgctttataaaatgaattatgccactcggatagtgactttagaagaggagccaataaaaatacaacatatcaaagatccccaggacacaattacctcgctcattttgcttccacccgatatattggataatcgagaggatgactgtgaggaacctattgaggacatgcagttaacctcaaagaatggttttgagagagaaaaaacgtctgacatttctactcttggacacctggtaataaccactcagggaggatatgtaaaaatactagatctttcaaactttgaaattttggccaaagtggagcctcccaaaaaggagggcactgaggaacaggacacatttgtttctgtgatttactgttctggcacagacaggctgtgtgcatgcaccaaaggtggtgagcttcattttctccaaattggaggaacctgtgatgatattgatgaagctgatatactagtggatggatctctttctaaaggaatagaaccatcttcagaaggttccaaacctttatcaaatccttcaagtcctggcatttcaggagttgatttattggtggaccagccattcacccttgaaatcttgacatccctagtggagctaacccgctttgagactttgactccaaggttttcagcgactgttcctccatgctgggtagaagttcaacaagaacagcagcaaaggaggcatcctcaacatttgcatcagcaacaccatggtgatgctgctcagcatactcgaacttggaaactacagaccgacagcaacagctgggatgaacatgtatttgaattagtactacctaaagcttgtatggttggacatgtggacttcaaattcgttttgaactcaaacatcaccaatattccacagatacaagtgacactgctgaaaaataaagctccaggattagggaaagtcaatgctcttaacattgaagtggaacaaaatgggaaaccgtccctggttgatttgaatgaagaaatgcagcacatggatgtagaggaatcacagtgtcttagattatgtccatttttggaggatcataaagaagacattctatgtgggccagtatggcttgctagtggccttgatctatcagggcatgctggaatgttgacgttaacaagccccaaacttgttaaaggtatggcaggaggaaaatatcgttcgtttttaatccatgtcaaggcagtgaatgaaagaggaacagaagagatttgtaatggtggtatgcgtcctgtagtaaggcttccatccctaaaacaccagagtaacaagggttattcacttgcttcacttttggctaaagttgcagcaggcaaggaaaaatcatctaatgttaagaatgaaaatacaagtggcacccgtaaatctgaaaacctccggggctgtgatttacttcaagaggtctcagtcaccattcgaagatttaagaaaacctcaatttctaaggaaagagtgcaacgatgtgccatgttacagttttcagaatttcatgagaagcttcttaatactctttgcagaaaaacagatgatggccagatcacagaacatgcccagagccttgtgttggatactctctgttggttagctggagttcattcaaatggacccggaagctcaaaggaaggaaatgagaacctactttcaaaaacacgaaaatttctgtcagacatcgtacgtgtttgcttctttgaggcaggacgaagtatagcccataagtgtgcccgatttctagccttgtgcattagtaatggcaaatgtgacccatgtcaaccagcatttggacctgttctgttgaaggctttacttgataatatgtcatttttacctgcagcaacaactggtggttctgtctattggtattttgtcttactgaattatgtgaaagatgaagatctggctggatgcagtacagcttgtgcatctttgcttactgcagtgtccagacagttacaggacaggctaacaccaatggaggctttacttcagacaagatatggattatatagctcaccatttgatccagtcctctttgatttggagatgagtggctcttcttgtaaaaatgtttataacagcagcattggtgtccagtcagatgaaattgatttatcagatgtcctttcaggaaatggaaaggtcagtagttgcacagctgctgagggtagtttcacatctctcactggacttttggaagttgaacctctgcactttacttgtgtgtcaactagtgatggaaccagaatagaaagggatgatgcaatgagttccttcggggttactcctgcagtaggtggactatcatctgggacagttggggaagcctcgacagccctgagttcagcagcccaggtagctttgcagtctctctctcatgcaatggcttcagccgagcaacagctacaggtgctgcaagagaaacagcagcagcttttgaagcttcagcaacagaaagcaaagctggaagccaagttacatcagacaacagctgcagcagctgcagcagcatcagcagtaggtcctgttcacaactctgtgccttccaacccagtggctgcccctggattcttcattcatccatctgatgttattccacccactccaaaaacaacacctctttttatgactccaccactcactccacccaatgaagcagtttccgttgtgattaatgccgaacttgcacagcttttcccaggctcagtcattgatcccccagcagtcaatcttgctgcacataacaaaaattccaacaagtccagaatgaatccacttggttctggtctagcccttgcaatttctcatgcttcacattttcttcaacctccgcctcaccagtccattattatagagcgaatgcattcaggagcaagaagatttgtgaccttggattttgggaggcctatattgttgactgatgtattgattcccacttgtggagacttggcctctttgtcaattgacatttggacattaggagaagaggtggatggaaggcggttggtagtggcaactgatataagcactcattcactaattcttcatgacttaataccacctcccgtgtgcagattcatgaagatcactgttattggacgttacgggagtacaaatgccagagccaaaatcccattaggattttactatggtcatacctacatcttgccttgggaaagtgaactgaagttaatgcatgatcctctaaagggagagggagaatctgcaaaccagccagaaattgaccagcatttagcaatgatggttgctttgcaggaggatatacagtgcaggtataacttggcttgtcatcgtctggaaacccttttgcaaagtattgatcttcctcctctaaacagtgctaacaatgcacagtactttttacgaaaaccagataaggcagttgaggaagacagtagggttttttctgcttatcaagattgtattcagctacagcttcaactaaatttggctcataatgcagtgcagaggctcaaagtggcgctaggtgcaagccggaagatgttgagtgaaacatcaaatccagaagatttaattcagacatcttccacagagcagttacgtactatcatcagatatttactggacactttgctcagcctgcttcatgcttctaatggacactctgttcctgcagttttgcagagcacatttcatgcccaggcctgtgaagagctctttaaacacttgtgcatcagtggaaccccaaagatacggttacatactggtcttcttcttgttcaactgtgtggtggtgaaaggtggtggggtcaatttctttctaatgtccttcaggaattgtacaattcggaacagcttctcatctttccacaggatagggtcttcatgttactttcctgcattggtcaaagatcacttagtaatagtggagtattagaaagcttacttaatctcttggataatttattgtcacctcttcagccacagttacccatgcataggaggacagaaggagtactagatattcccatgatcagttgggttgttatgctggtgtccaggttgctggattatgtggcaactgttgaagatgaagcagcagctgcaaagaaacctttgaatggtaatcagtggagttttattaacaataatctacacactcagagcttaaatagatcttctaaaggcagcagtagccttgatagattatattccagaaaaatcagaaagcagcttgttcatcataaacagcaacttaacctactaaaagcaaagcagaaggcattggtagaacagatggaaaaagaaaaaatacaaagtaacaaaggatcatcatataaactcctggtagaacaagcaaaactaaagcaggccacttcaaagcactttaaggatttaattcgtttacgtcggacagcagaatggtcccgttctaatttagacacagaagttacaacagcaaaagaaagtcctgagatagaaccacttccatttactctggcccatgagcgttgtatctcagtagtccagaaacttgttctgtttcttctctccatggactttacatgtcatgcagatctcttattgtttgtttgtaaggttcttgcacgcattgcaaatgccacgaggccaactattcatctgtgtgagattgtgaacgaaccccagctggaaagactgctgttacttttggttggaactgacttcaatagaggagatatatcttggggtggtgcttgggctcagtattccttaacttgcatgctacaagatattttagcaggagaattactggctccagtagccgcagaagccatggaggaaggaacagtgggtgatgatgtaggtgcgacagctggtgactctgatgactcccttcaacagtcctcagttcagttgctggaaactatagatgaacctttgacacatgacataacaggtgcacctcctctgtcctctttggaaaaagataaagaaattgaccttgagttacttcaggatctaatggaagttgacattgatcctttagatattgatttggaaaaggaccctcttgcagccaaggtttttaagccaataagcagtacatggtatgattattggggtgctgattatgggacctacaattacaacccttacattggaggtctgggaattcctgtagcaaagccaccagcaaacacggagaagaacggatcacagacagttagcgtttcagtctctcaggccctggatgctcgcctagaagttggacttgaacagcaagcagaactgatgttgaaaatgatgtctactctggaggcagattccattttacaggcattaacaaatacatctcctacattatcacagtctcccactggaacagatgattcacttctagggggtttacaagcagcaaaccaaaccagccagcttattatacagttatcatctgtcccaatgttaaatgtttgtttcaacaaacttttttccatgcttcaagtccatcatgttcagttggagtcacttctccaattgtggctcacactgagcctgaattctagttcaactggaaacaaagaaaatggagcagacatatttttatataatgctaataggatacctgttatttcattaaatcaagcatcaataactagctttctcacagtgttagcttggtatcccaatactttgctccggacatggtgccttgtgcttcatagcctaacactcatgacaaacatgcagcttaattctggttccagcagtgccattggaactcaggagagtactgctcatttgttggtttcagatccaaacctaattcatgtattagtgaaatttctttctggcaccagtccacatggaacaaatcaacacagtccacaggttggtcctacagctacacaagctatgcaagaatttcttactcgattacaagtgcatctttcttcaacatgtcctcagatattcagtgaatttttgctcaagctaattcatatactttcaactgaaaggggtgctttccagacaggccaaggacctctcgatgcccaagtgaagctcttagaattcactctggagcagaattttgaagtcgtttcagttagtactatttctgccgtgatagaatcggttacatttttagtgcaccactatatcacttgctcagacaaagtaatgtcaagaagtggatcagatagctccgtgggtgctcgagcatgctttgggggactctttgccaatcttattcgtccgggtgatgcaaaagcagtttgtggcgaaatgacaagagatcaactcatgtttgatttgttaaaacttgttaacattttagtgcagctgcctctttcaggcaatagggaatacagtgcaagagtgtctgtgaccacaaatacaacagatagtgtttcagatgaagaaaaagtctcaggaggcaaagatggcaatggaagcagtaccagtgttcaaggatcgcctgcatatgttgctgacttagtcttagccaaccaacaaattatgagccagattttgtctgctctgggcctgtgtaatagcagtgccatggcaatgataattggagcaagtggattacatctcactaaacatgaaaactttcatggtgggttggatgccatatcagttggggatggattatttaccatactgacaacccttagtaaaaaagcttctacagtccacatgatgctgcagccaattttaacatacatggcctgtggatatatgggcagacaaggctctcttgctacttgccagttatctgagccattattgtggttcattttgagagtattggatactagtgatgccttgaaagcatttcatgatatgggtggtgttcagctcatatgcaataatatggttactagtacaagggctattgtgaacactgcaagaagtatggtatcaactattatgaaatttcttgactctggtccaaataaagctgttgacagcacattgaaaacaagaatactagcttctgagcctgacaatgctgaagggattcataactttgcacccctcggtacaatcacatctagcagtcctactgcccaaccagctgaagtgctattgcaggccacacctcctcacagaagagctcgctctgctgcttggtcctacatctttcttccagaggaggcttggtgtgaccttaccattcaccttcctgcagcagtgctgcttaaggagatacatatccagcctcatcttgcatctcttgcaacctgcccttcctcagtgtctgttgaagtaagtgcagatggggtaaatatgctacctttgtccactcctgttgtcacaagtggcctcacctacataaaaattcagcttgtaaaagccgaagtagcttctgctgtctgccttagactacatcgtccacgggatgccagcacattaggcctttcacaaattaaattattggggctcactgcttttggtaccacctcttctgcaacagttaataatccattccttccatctgaagatcaggtatccaaaacaagtattggatggttacggttattacatcattgccttactcacataagtgatctagaaggaatgatggcaagtgcagctgcacctactgctaatctgctgcagacttgtgcggccttattgatgtcaccttactgtggaatgcattcacccaacatcgaggttgtgcttgtaaagataggactgcagtctactagaattggcctgaagctcatagacattctcctgagaaattgtgcagcatcaggcagtgatcctacagatttgaatagtcctttactttttggaagactaaatggactctcttctgactctacgatagatattctttaccagcttggaacaactcaggatcctggtacaaaagacagaattcaggccttgttaaaatgggttagtgattctgcaagagtggctgctatgaagagaagtggcaggatgaactacatgtgtcctaactcctcaacagtagagtatggtcttctgatgccatctccttctcatttgcactgtgtagcagccattctgtggcatagttatgagctgcttgtagaatatgacttaccagcactcctggaccaagagctctttgagttactttttaattggtccatgtctcttccctgcaatatggttttgaagaaagctgttgacagtctactttgctcaatgtgtcacgtacacccaaactatttttctttgctcatgggctggatgggaattacccctcctccagtgcaatgtcatcatagactgtccatgacagatgatagcaaaaagcaggatcttagttcatctttaacagatgactctaaaaatgcacaagcacctctcgcattaactgaatcacatttggctacccttgcttcctcttctcaatctcctgaagctattaaacaattactagactcaggtttgccttctcttcttgtgaggagtctggctagtttctgctttagccacatttctagctcagaaagcattgcccagtcaatagatatttcccaggacaaactcaggcgccatcatgtcccacaacaatgtaataagatgcctatcacagccgacctagttgctcctattcttaggtttttgacagaagttggcaatagccatattatgaaagattggcttggtggttctgaagtcaatccactatggacagcacttctgtttttattgtgtcactctgggtccacttctggaagccataatttaggtgcacaacagaccagtgcaagatcagcttctctttcttcagctgctacaacaggactgactactcaacagcgcacagcaattgagaatgcaactgttgcgttctttctacagtgcatttcatgccatcctaataatcaaaagctgatggcacaggttctttgtgaactatttcagacatctcctcaaagagggaaccttccaacatctgggaacatttcagggtttatacgaagattatttttacagttgatgctggaagatgagaaagtgacaatgtttcttcagtctccatgtccactgtacaaaggtagaattaatgctactagccacgtcatccagcatccaatgtatggagcaggccacaaattccgtactcttcatttgccagtctcaacaacattatcagatgttcttgacagagtgtcagatactccaagtatcacagctaaattaattagtgaacaaaaagatgacaaagaaaagaaaaaccatgaagagaaagaaaaagttaaagcggaaaatggatttcaagacaattacagtgttgttgttgcctctgggctgaagtctcaatctaaacgtgctgtgtcagctacaccacctcgcccaccatccaggagggggaggacaatacctgataaaataggaagtacttcaggagcagaggctgccaacaaaataattactgtcccagtgtttcacctgtttcacaaactcttggcaggccagccattgccagctgaaatgacacttgcccagcttttaactctcctatatgaccgaaaacttcctcagggttaccgctcaatagatctgactgttaaattgggatcaagagttataacagaccccagtctatcaaaaacagattcttataaaagactacaccctgaaaaagatcatggagacttacttgctagctgtccagaagatgaggctctcactccaggtgatgaatgcatggatgggatactggatgaatctttgcttgaaacctgtccaattcagtcaccattacaagtttttgcaggaatgggtggactggctcttattgctgaaagactacccatgctatatccagaagtaattcaacaggtgagtgctccagttgtaacatctaccactcaggaaaagccgaaggatagcgatcagtttgaatgggtgaccattgaacagtcaggggagttagtttatgaagcaccagaaactgttgcggctgaacctccacctatcaagtcagcagtacagaccatgtctcccatacctgcccattctttggctgcttttggattatttcttcgtcttccgggctatgcggaagtgctactgaaagagagaaaacatgcccagtgccttcttcgattggtattgggagtgacagatgatggagaaggaagtcatattcttcaatctccatcagccaatgtgcttccaacccttcctttccacgtccttcgtagcttgtttagcactacacctttgacaactgatgatggtgtacttctaaggcggatggcattggaaattggagccttacacctcattcttgtctgtctctctgctttgagccaccattccccacgagttccaaactctagcgtgaatcaaactgagccacaggtgtcaagctctcataaccctacatcaacagaagaacaacagttatattgggccaaagggactggctttggaacaggctctacagcttctgggtgggatgtggaacaagccttaactaagcaaaggctggaagaggaacatgttacctgccttctgcaggttcttgccagttacataaatcccgtcagtagtgcggtaaatggagaagctcagtcatctcatgagactagagggcagaacagtaatgcccttccttctgtacttctcgagcttctcagtcagtcctgcctcatcccagccatgtcatcttatctacgaaatgattcagttctggacatggcaagacatgtgccactctatcgggcactgctggaattgcttcgggccattgcttcttgtgctgccatggtgcccctattgttgcccctttctacagagaacggtgaagaggaagaagaacagtcagaatgtcaaacttctgttggtacattgttagccaaaatgaagacctgtgttgatacctataccaaccgtttaagatctaaaagggaaaatgttaaaacaggagtaaaaccagatgcgtctgatcaagaaccagaaggacttactcttttggtaccagacatccaaaagactgctgagatagtttatgcagccaccaccagtttgcggcaagcaaatcaggaaaaaaaactgggtgaatactccaagaaggcggctatgaaacccaaacctttgtcagtattaaagtcacttgaagaaaaatatgtggctgttatgaagaaattacagtttgatacgtttgaaatggtttctgaagatgaagatgggaaattgggatttaaagtaaattaccactacatgtctcaggtgaaaaatgctaatgatgcgaacagtgctgccagagctcgccgccttgcccaggaagctgtgacgctttcaacctcactgcctctgtcttcatcctctagtgtgtttgtacgctgtgatgaggagcgacttgatatcatgaaggttctaataactggtccagcggacaccccttatgcaaatggctgctttgagtttgatgtgtattttcctcaagattatcccagttcaccccctcttgtgaatctagagacaactggtggtcatagcgtgcgattcaatccaaacctttataatgatggcaaggtttgtttaagcatcttaaacacgtggcatggaagaccagaagagaagtggaatcctcagacctcaagctttttgcaagtgttggtgtctgtccagtcccttatattagtagctgagccttattttaatgaaccgggatatgaacggtctagaggcactcccagtggcacacagagttctcgagaatatgatggaaacattcgacaagcaacagttaagtgggcaatgctagaacaaatcagaaacccttcaccatgttttaaagaggtaatacacaaacatttttacttgaaaagagttgagataatggcccaatgtgaggagtggattgcggatatccagcagtacagcagtgataagcgggtaggcaggactatgtctcaccatgcagcagctctcaagcgtcacactgctcagctccgcgaagagttgctgaaacttccctgccctgaaggcttggatcctgacactgacgatgccccagaggtgtgcagagccacaacaggtgctgaggagactctaatgcatgatcaggttaaacccagcagcagcaaagaactccccagtgacttccagttatgagctgcattgatgtggacttcatagacacaaaggcttcgaagcacaagccaaatatgtcaatatttgtatgtaagaaactaattatgtaataggtaatgaaactgaaactatactatgcccttaaggagatccagtttaattcaaggtgatcttttatttacctgtacaggagtgtaaacttttttgtgcttttatttttcaattgtgagaaccactgattggtatgttcaacaaatttgtgtatacaaagaaatggataaatcactgctatataagggaaactaccttaggaaagaatgtttactgaatgtttattttattttattttttttttactatagagtgaggggttgttaacaaagaatatatattggtcattcttacaactactatttaaagtcagcaacttttcactgaatttgatagattttatgtttggccatatcttcatgctcacatttgatttctgaagacctcctacatacacttcaataaaagttaaatggacatactccctcttttttgatttactggtacatttttaaaataataaatctgccataaaatgcattatatctggagacttgcacttgtatggatgaatttattacattcaacatatttaattttatgccttctaattctaagatgcagaaaaaaataaatgaacatgattttattctatgccaacatttgggcctctgaatgtatctgttatttgaatttaagtatttgaaaaggaatggtcaatttgaaagtcattctaaactgattttttttttctaaagggctccttttttcctggactatgtggttttatgactaaagtcacatgtatgtattaaacattgaggctctgtagaggagagaggatgtacctctctggtgctgttacagtacattctgtacctgccatacaggctcattttcatgcaaattcttcctagagccaaataaataaagacttaggtgaattagtatgtcttgtttctaaa

SEQ ID NO: 110645 - DNA, 575 bp, Homo sapiens
  Payload ID: 1697
  Gene Symbol: BIRC6
  Gene Name: baculoviral IAP repeat containing 6
  ENST ID: ENST00000444173
  CDS Start-End: 1-575
agctgggatgaacatgtatttgaattagtactacctaaagcttgtatggttggacatgtggacttcaaattcgttttgaactcaaacatcaccaatattccacagatacaagtgacactgctgaaaaataaagctccaggattagggaaagtcaatggtcttagattatgtccatttttggaggatcataaagaagacattctatgtgggccagtatggcttgctagtggccttgatctatcagggcatgctggaatgttgacgttaacaagccccaaacttgttaaaggtatggcaggaggaaaatatcgttcgtttttaatccatgtcaaggcagtgaatgaaagaggaacagaagagatttgtaatggtggtatgcgtcctgtagtaaggcttccatccctaaaacaccagagtaacaagggttattcacttgcttcacttttggctaaagttgcagcaggcaaggaaaaatcatctaatgttaagaatgaaaatacaagtggcacccgtaaatctgaaaacctccggggctgtgatttacttcaagaggtctcagtcaccattcgaagatt

SEQ ID NO: 110646 - DNA, 1368 bp, Homo sapiens
  Payload ID: 1698
  Gene Symbol: BIRC7
  Gene Name: baculoviral IAP repeat containing 7
  Uniprot ID: Q96CA5
  ENST ID: ENST00000217169
  CDS Start-End: 215-1111
gaccccagaggccaccctggccacttccagaaagctgtgggccctgggatactcccctcccagggtgtctggtggcaggcctgtgcctatccctgctgtccccagggtgggccccgggggtcaggagctccagaagggccagctgggcatattctgagattggccatcagcccccatttctgctgcaaacctggtcagagccagtgttccctccatgggacctaaagacagtgccaagtgcctgcaccgtggaccacagccgagccactgggcagccggtgatggtcccacgcaggagcgctgtggaccccgctctctgggcagccctgtcctaggcctggacacctgcagagcctgggaccacgtggatgggcagatcctgggccagctgcggcccctgacagaggaggaagaggaggagggcgccggggccaccttgtccagggggcctgccttccccggcatgggctctgaggagttgcgtctggcctccttctatgactggccgctgactgctgaggtgccacccgagctgctggctgctgccggcttcttccacacaggccatcaggacaaggtgaggtgcttcttctgctatgggggcctgcagagctggaagcgcggggacgacccctggacggagcatgccaagtggttccccagctgtcagttcctgctccggtcaaaaggaagagactttgtccacagtgtgcaggagactcactcccagctgctgggctcctgggacccgtgggaagaaccggaagacgcagcccctgtggccccctccgtccctgcctctgggtaccctgagctgcccacacccaggagagaggtccagtctgaaagtgcccaggagccaggaggggtcagtccagccgaggcccagagggcgtggtgggttcttgagcccccaggagccagggatgtggaggcgcagctgcggcggctgcaggaggagaggacgtgcaaggtgtgcctggaccgcgccgtgtccatcgtctttgtgccgtgcggccacctggtctgtgctgagtgtgcccccggcctgcagctgtgccccatctgcagagcccccgtccgcagccgcgtgcgcaccttcctgtcctaggccaggtgccatggccggccaggtgggctgcagagtgggctccctgcccctctctgcctgttctggactgtgttctgggcctgctgaggatggcagagctggtgtccatccagcactgaccagccctgattccccgaccaccgcccagggtggagaaggaggcccttgcttggcgtgggggatggcttaactgtacctgtttggatgcttctgaatagaaataaagtgggttttccctggaggtacccagcagcctg

SEQ ID NO: 110647 - DNA, 1302 bp, Homo sapiens
  Payload ID: 1698
  Gene Symbol: BIRC7
  Gene Name: baculoviral IAP repeat containing 7
  Uniprot ID: Q96CA5
  ENST ID: ENST00000342412
  CDS Start-End: 215-1057
gaccccagaggccaccctggccacttccagaaagctgtgggccctgggatactcccctcccagggtgtctggtggcaggcctgtgcctatccctgctgtccccagggtgggccccgggggtcaggagctccagaagggccagctgggcatattctgagattggccatcagcccccatttctgctgcaaacctggtcagagccagtgttccctccatgggacctaaagacagtgccaagtgcctgcaccgtggaccacagccgagccactgggcagccggtgatggtcccacgcaggagcgctgtggaccccgctctctgggcagccctgtcctaggcctggacacctgcagagcctgggaccacgtggatgggcagatcctgggccagctgcggcccctgacagaggaggaagaggaggagggcgccggggccaccttgtccagggggcctgccttccccggcatgggctctgaggagttgcgtctggcctccttctatgactggccgctgactgctgaggtgccacccgagctgctggctgctgccggcttcttccacacaggccatcaggacaaggtgaggtgcttcttctgctatgggggcctgcagagctggaagcgcggggacgacccctggacggagcatgccaagtggttccccagctgtcagttcctgctccggtcaaaaggaagagactttgtccacagtgtgcaggagactcactcccagctgctgggctcctgggacccgtgggaagaaccggaagacgcagcccctgtggccccctccgtccctgcctctgggtaccctgagctgcccacacccaggagagaggtccagtctgaaagtgcccaggagccaggagccagggatgtggaggcgcagctgcggcggctgcaggaggagaggacgtgcaaggtgtgcctggaccgcgccgtgtccatcgtctttgtgccgtgcggccacctggtctgtgctgagtgtgcccccggcctgcagctgtgccccatctgcagagcccccgtccgcagccgcgtgcgcaccttcctgtcctaggccaggtgccatggccggccaggtgggctgcagagtgggctccctgcccctctctgcctgttctggactgtgttctgggcctgctgaggatggcagagctggtgtccatccagcactgaccagccctgattccccgaccaccgcccagggtggagaaggaggcccttgcttggcgtgggggatggcttaactgtacctgtttggatgcttctgaatagaaataaagtgggttttccctggaggta

SEQ ID NO: 110648 - DNA, 593 bp, Homo sapiens
  Payload ID: 1698
  Gene Symbol: BIRC7
  Gene Name: baculoviral IAP repeat containing 7
  ENST ID: ENST00000395306
  CDS Start-End: 7-588
gcagaaatgcctctcccatgggactaccctgaagccccatggaggcgtctccacagcagccctcctcgcccatgcccacgggcactgcagggtggcgggaggagggggcccaaccctgacccccggggatccaagggcttgaagcagacagtgggggccctgaaccccaacctacatctctggggcatctgcagctgtcagttcctgctccggtcaaaaggaagagactttgtccacagtgtgcaggagactcactcccagctgctgggctcctgggacccgtgggaagaaccggaagacgcagcccctgtggccccctccgtccctgcctctgggtaccctgagctgcccacacccaggagagaggtccagtctgaaagtgcccaggagccaggagccagggatgtggaggcgcagctgcggcggctgcaggaggagaggacgtgcaaggtgtgcctggaccgcgccgtgtccatcgtctttgtgccgtgcggccacctggtctgtgctgagtgtgcccccggcctgcagctgtgccccatctgcagagcccccgtccgcagccgcgtgcgcaccttcctgtcctaggccag

SEQ ID NO: 110649 - DNA, 2026 bp, Homo sapiens
  Payload ID: 1699
  Gene Symbol: BIRC8
  Gene Name: baculoviral IAP repeat containing 8
  Uniprot ID: Q96P09
  ENST ID: ENST00000426466
  CDS Start-End: 1253-1963
caacctacacacgtgtgtgtgcgcgtgtgtataaaacacagtgcactaatactcagcctttaaaaaaaatgccacttgcaacaacgtagatggagctggacgatatcatgctaaaattatgcaaagtgaaacaagcacaaaaaagaacgagacacgggcgtggggcacgaggtgctcactgcgcaagcgcccactccaccgcgtggtttccagctggaggctgggagcgttcgtggcttcctcttttcttgctgacccttcggagctctgggaagtggctgcaccttggcggctccccagagcgcgcggtgctaatcgtgggtcgtcagcctgggtggctgggcccggcttagggcagggtttggcatttccaatggtagggggctcggaccgtccctccgcgggaccctcccgttgggacaaggccgatcgcctgggcggttggagccgctatcctggcgcgagacggtggacaagtcctatattcaagagaagataactttgaacagtttcgaaggatctaaaacgtatgtgtctgcagacatcaatgaggatgaagaattagtagaagagattaatagatcaaaaacgtttgctggctttgcaggtggtgggcctgcctgggcatcggcgcgttggaggagacgccctggggggccttagctgccctgaagcggtagacaggtggcaacgtgggggctcaggagttgacaaacacaagaaagcagcgccgaattgcaggtttatccgcagcttttattttgaagacagtgccacgaaacctgcaaatcctggtgtcccaaatagtcaataccaagttgaaaaccatctgggagaggaaaagcgttgtgctttagacaggccgtctgagactcgtgcagaccggcttttgagagctggacaggtggtggatagatcagactccatacacccgaggagccccgccatgcatagtgaagaagctagataacagtcgtttcacaactggccagcctctgcccacttgaccccgagagagctggccagtgctgggctgtactacacaggcactgatgaccaagtgcagtgcttctgttgtggcggaaaactgaaaaactgggaacctggtgatcgtgcctggtcagaacacaggagacattttcctaattgcttctttattttgggccacaacgttaatattcgaggtgaatctgatgttgcgagttctgataggaatttctcaaattcaacaagttctccaaggaatccatccatgacgggttatgaagcccggctcattacttttgggacatggatgtactccgttaacaaagagcagcttgcaagagctggattttatgctataggtcaagaggataaagtacagtgctttcactgtggaggagggctagccaactggaagcccaaggaagatccttgggaacagcatgctaaatggtatccaggttgcaaatatctgctagaagagaagggacatgaatatataaacaacattcatttaacccgttcacttgagggagctctggtacaaactaccaagaaaacaccatcactaactaaaagaatcagtgataccatcttccctaatcctatgctacaagaagctatacgaatgggatttgatttcaaggacgttaagaaaataatggaggaaagaattcaaacatctgggagcaactataaaacgcttgaggttcttgttgcagatctagtgagcgctcagaaagacactacagaaaatgaattgaatcagacttcattgcagagagaaatcagccctgaagagccgctaaggcgtctgcaagaggagaagctttgtaaaatctgcatggacagacatatcgctgttgtttttattccttgtggacatctggtcacttgtaaacaatgtgctgaagcagttgacagatgtcccatgtgcagcgcggttattgatttcaagcaaagagtttttatgtcttaatgtaactctacagtgggtgtgctatgttcttattaccctgattaaatgtgtgatgtgactcaa

SEQ ID NO: 110650 - DNA, 10342 bp, Homo sapiens
  Payload ID: 1700
  Gene Symbol: BAHCC1
  Gene Name: BAH domain and coiled-coil containing 1
  ENST ID: ENST00000307745
  CDS Start-End: 1-7827
atggatggccgcgactttgcgccgccgccgcatctgctgtcggagcgcgggagcctgggccaccgcagcgccgctgccgccgcgcgtctcgccccggctgggcccgccgcgcagccccccgcacacttccagccgggaaagtacttcccgtcgccgttgcccatggcttcgcacacagccagcagccgcctgatgggaagttctccggcctcctcgttcatgggcagtttcctcaccagcagcctgggctcggcagcctccacgcaccccagcggccccagctcctccccccctgagcaggcctaccgtggctcccaccccaccacctcccagatctggttctcccactcccacgaagctccggggtaccccagattttcggggagtctggcatccaccttcctacccgtgagccacttggatcaccatggaaacagcaacgttctctatgggcagcaccgtttctatggaacccaaaaagataacttctacctgcgcaacctgccgccccagcccacgctgctgccggccaaccacaacttccccagcgtggcccgggccgcccctgcccaccccatgggctcctgcagccgggatcgagaccggggtgaggcaggctccctgcagaagggccccaaggacttcgaccgcttcctcgtgggcaaagagctgggcagagagaaggcgggcaaggccgctgagggcaaggagcggccagcggcagaggaggacggtggcaaggagcggcacaagctggtgctgcccgtgccagccgacgggcactgcagggagggcggccccgcaccccgaggggcctgcgagggccgccccaagcacctcacctcctgcctcctcaacaccaaggtgctcaacggcgagatgggcagggctgcgctagccagctgtgcagggggcatgctggggcggcctggcacgggggtggtgacctccgggcgctgtgcaaaggaggcagcaggccccccggagcccgggccggccttcagcgagtgcctggagcggcggcagatgctacaccacaccgcatcctacgccgggccacccccgcccctcagcacagccgccggctccttcccctgcctgcagctgcacgggggccctgacgggctctgcccgctgcaggacaaagccccccgggacctaaaggccagcgggcccaccttcgtgccttctgtgggacacctggccgacaagggccgccccttccaggccgccgaggcctgtgccgtggcaggggagggcaaggaccggcacctggagggaaccatggcccccgaccacgctgcaccctatggagtctcctatgcccacctgaaggccgagggcaagggcgagcggcggcctgggggctttgaggcggccctcaacccccggctaaagggcctcgactatctcagcagcgcaggccccgaggcctccttccccggactccctaaaagcggtctggacaaaagcggctacttcgagttgcccacctcttcacaggactgtgcccggcctggtcaccaggacccgctgggcgggaaggccccccaggcctgctgcactttagataagactgttggcaaggaagccccggccggccccccaggggcacagaaggtggcccgcatcaggcaccagcagcacttgatggccgccgaggtggagcaggggggcattggggctgaggccaagcgcaagtccctggagctggcatccctgggctacagtgggccccacctgcccccatggggtgtccaggcaggccagggcaccgccatggccatcagcgaggagcgcaaggctggcgcctacctggacccctttggcagtggcctgcagcaggcggctcttctgccccaggaactgcctgcgccgccggacgaggtctcagccatgaagaacctgctcaaatacagcagccaggccctggtggtgggccagaaagcacccttggtgggcctgggtggcctcaaggccagctgcatccagcaggaagcaaagttcctgtcctctaagggcccaggccagtcggagaggccggactgtgcccgcagcagggagcacgacaccacgcacggcgacggggaggtgcggcagccccctgtgggcattgcagtggccttggcccggcagaaggacacagtgagccggtctgaggcagcctacggcaccaacactgcgcggcagggccgggccgcccccgccttcaaaggtggcggtgggccccgttccacacacgcgctggacctggaggctgaggaggagaggacgaggctatgtgatgaccgcctggggcttgccagccgcgagctgctgctgcaggacagcaaagaccgcgtagagttcgcccggatccacccaccgagcagctgccctggggacctggccccccacctcatgatgcagagcggccagctgggcggggacccagccccccacacccacccccatcccccctggctgccccgcacccgcagcccctccctgtggatgggggggcactcctacggcctggggcaccctgccctgcaccagaacctgccccccggcttccccgcctccgtggctggccctgtgccctctgtcttccccctcccacaggacgcccccacacagctggtcatcctgccctcagagcccacaccccacagcgccccccacgcacttgcggatgtcatggaccaggcgtcactgtggccccccatgtacgggggccggggccccgcctctcacatgcagcacccgggccagctccctgtgtactcgaggccgcagctcctccggcagcaggagctctatgctttgcagcagcagagggccgcccagttccagcggaagcccgaagaccagcacctggatctggaggagcccgcccaggagaaggccccaaagtccacccacaagccagttgccttaacccccacggccccgggcgccccctcacccgctgcaggccccaccaagctgccaccttgctgccatccgcccgacccaaagccccccgccagctcccccaccccaccacctcggcccagcgccccgtgcactttaaatgtctgccctgccagcagccccgggcctggctcccgggtgcgcagcgccgaggaaaagaatggggagggtcagcagtccacggccgacatcatcacatccgaaccagacctgcctcccggatacctgcgccccatggctggcctgggcttctccctaccctcagacgtgcactcttctaacctcgaggaccctgaaactatgcaaaccaccgccccgggggcccagcctgagcccacaaggacattcctgcctggggagccgcctccctgcagccccaggagcctggaggagcccgggctgctctcaggggccagggaggccacccaggaccttgccgccaccccctaccctaccgagcggggaccccaggggaaggcagcggaccccagcccactagaggggctacaagaactgcaatgtgcggccctcctggaggcagggggccccgaggccaccggccaggctcattctactcagggaggggcacgagaagagaggagcagggaggagggggagcaggggccctcgtcaggggcctcctcccaagtcctggagcagcgagcagggagtccgggtgcccttgaggacgagggggagcagccggcccctgaggaggacgagctggaggaagacgagctggggcagcagagcatggaggactcagaggaggactgtggcggagctcccgacaacagccacccacccagggcgctaccaggcctggatgccttggtggccgccaccatcaacctgggggacctgcccagcgacagcccaccggaccctcagcccccagcggcctctgggccccccagcacagtccccctgcctcatagctcagggattcatgggatcgctctgctcagcgagctggctgacctggcaatccagcggcagaggagtgagaggactgtgccagaggaggaagaggacgtgctagccttcaacctgcagcacctggccacgctggccacagcctggtccctggtggaggccgctggcctggacagctccactgccccagcgcagccgcccacagccaacccctgcagcggccccaggctcaccccccgcatgcagatcctgcagcgcaaggacacctggacccccaagaccaagcctgtgtgccccctgaaggccgccatcgaccggctggacacgcaggaggtggggatgcgcgtgcggctggcggagctgcagcggcgctacaaggagaagcagcgggagctggcccgcctgcagcgcaagcacgaccatgagagagacgagagttcacggagccctgcacggcgggggcctggccggccgaggaagcgcaaacactcaagctcgctgcctgccccacgtcccacggggccgctccccaggagcgatggcaagaaagtcaaggcggtgcggacaagcctgggtctgctgtgtgcggagctgcgaggaggcagtgggggcgagcctgcgaagaagcgaagcaagctggagaggagcgtctatgcgggcctgcagactgcctccgtggagaaggcgcagtgtaagaagagcagctgtcagggcgggctggcgccctccgtggcccacagggtggcccagctgaaacccaaggtcaagagcaaagggctgcccacaggcctcagctctttccagcagaaggaggctacccccggggggcgcatccgggagaagctgtcccgagccaagagtgccaaggtgtctggggccacacggcacccacagcccaagggccacggcagccgggagacacccaggtgcccagcccagccctccgtggctgcgtcccaggaggcaggcagtggctatgacagtgaggactgcgagggtctcctggggacagaggcaccacccagggaagcagggctgctgctgcacaccggggccagtgtggccgtgctggggccctcaccctcctctgtggtcaagatggaggccaaccagaaggccaagaagaagaaggagaggcaggggttgctaggggcctgccgcctgtccagccctgagagtgaggtcaagatcaagaggcggtcggtgaaggccaaggtgggcaccaccctggagcgggccccagggcagaggcccccaggtgcgctgggcaagaagaaagccaagggcaaggccaagggcagcctgcgggcagagccgggggccacccccagcagggacgccctcttcaacccctctcgggccttcgcctgccgtgaggagggcagccagctggccagtgagcgcctcaagagggccacgcgcaagggcacagtgctgcagccagtgctgcggcggaagaacggggccctgtccatcacgctggccacacgcaacgccaaggccatcctggggaagggccggaagctgagcaaggtgaagcacaaggccggcaagcagggcaagggccgggccgtgagccgcctgctggaaagcttcgccgtggaggaagactttgagttcgacgacaacagcagcttctcggaagaggaggaggacgaggaggaagaggaggaggacagcggccctctgagcgcagagcagagcgccgccctagcgcgctcgtgtgccatccacaaggaggacctgcgggacgggctgcccgtgctcatccccaaggaggatagcctgctgtacgcgggcagcgtcaggaccctgcagccacccgacatctatagcatcgtcatcgagggcgagaggggcaaccggcagaggatctactcactggagcagctgctgcaggaagcggttctcgatgtgcggccacagtccagccggtacctcccgcccggcacgcgggtctgcgcctactggagtcagaagtctcgatgtctgtacccgggcaacgtggtccggggggcctccggtgacgaagatgaggacctggactcagtagtggtggaatttgacgatggggatacaggccacatcgccgtctccaacgtcaggctgctgccccctgacttcaagatccagtgcacagagccctctccagccctgctagtgtctagcagctgccggaggaccaagaaggtatccagtgaggcacccccgcctagtgaagccgccacccccagcctgtcccccaaagcacaggacggccccgaagctttgaagacacctgggaaaaaatccattagcaaagacaaagctggtaaagccgaactcctaacctcaggtgccaaatcccccacgggggcctccgaccacttcctgggccgccgtggcagccccttgctgagctggtccgcggtggcgcagaccaagcggaaggcggtggcagcggccagcaaggggccgggggtgctgcagaacctcttccagctcaacggcagcagcaagaagctgcgggcccgcgaggccctgttccccgtgcacagcgtggccacacccatatttggcaacggcttccgcgccgactccttcagcagcctggccagctcctacgcgcccttcgtcggggggaccgggccgggcctccccaggggagcccacaagctgctgcgggctaagaaggccgagagggtggaggccgagaagggtgggcggcggcgggcgggcggtgagttcctggtcaagctggaccacgagggtgtgacctcccccaagaacaagacctgcaaggcgttgctcatgggggacaaggacttcagccccaagctcgggcggcccctgcccagccccagctatgtgcacccggcccttgtgggcaaggacaagaaggggcgggcacccatccccccgctgcccatggggctggcgctgcgcaagtacgcgggccaggcagagttcccgctgccctacgacagcgactgccacagctccttctcggacgaggacgaggacgggccggggctggcggccggcgtgccctcccgcttcctcgcccgcctgtccgtgtcctcttcctcctctggctcgtccacctcctcctcctcaggctccgtgtccacctccagcctctgctcctccgacaacgaggactcgtcctacagctcagacgacgaggacccggctctgctgctgcagacctgcctcacccaccccgtgcccaccctcctggcccagcccgaggccctgcgctccaagggcagcggccctcacgcgcatgcccagcgctgcttcctgtccagggccacggtggctggcaccggtgcgggctcaggccccagcagcagcagcaaatccaagctcaagcgcaaagaggccctgagcttctccaaagccaaagagctctcccggaggcagcggccgccctccgtggaaaaccggccaaagatctcagccttcctgcccgcccggcagctctggaagtggtcggggaatcccacacagcggcgtggcatgaaggggaaggcccggaagctgttctacaaggccatcgtgcggggcgaggagaccctgcgtgtcggggactgtgccgtcttcctgtcagctgggcggcccaacctcccctacatcggccgcatcgagagcatgtgggagtcgtggggcagcaacatggtggtcaaggtcaagtggttctaccaccctgaggagaccaagctgggcaagaggcagtgcgacggcaagaatgcgctgtaccagtcctgccacgaggatgagaacgacgtgcagaccatctcccacaagtgccaggtcgtggcgcgcgagcagtatgagcagatggcccggagccgcaagtgccaggaccggcaggacctctactacctggcgggcacctacgaccccaccaccgggcgcctggtgacggctgatggcgtgcccatcctatgctgagccgcccaccgcagatgcctcccacgtgcgccagggaccctgtgtgcggagcctggcgtcggccaagccaccgggcaggaggcagccccggcctcccaagggcgcatctgagcaaatatgcaaaagcccacagggcaagacccaggctttcttacggttttccctggaaagagcgctccaggtgtcggaatccagtcccgtcccatcctctgcggagggtcgggctgtggccctcatgggtccccggcccgccccacccacagcgccctccgtttcccgcaccggcagttcacgggagatttgaatccaagccatattccctagtacctccgactgtctcccaccagggaaagcagaaatcaggtgtgttgtctatttatttctctatgtaaatattgtatttctgcggggaaattttatggtaaaaagtggaaaagggtttttccccatccgcgtgacaaggtgtgtgtgagcgtgtatgtgtgtgcgcgtgtgtggcgatttttgtcctggggtttcctttggaaatgcactgttctcagcccagctgggttccaacgggggcacctgggacgacagaggcatctcggggcagggggcagaggccacgggagggtcaggtgggacccttgacggcaccctctgatctcttggggggacgaccgtgtaagatgaaagtcggtcaagtttatttgctttcagtgcatctcctagaaaagaagtgttggagcagggggtggtgatgaggggcccgtggggaaaggattcaagaggcaaagcccagaccagggagtgtgacaacagccgtgagcatctcacctgtgttcaaaacaagacaaagacgaacaaatattttaaagtattgataagaaaaagcaatgtttggattgtatctgctgaatcatattccaacctatatctgatttctgtttccggggccagttggtctgaggccaaggagtctggcctccacccagagcagggaggggctggcccctcgcccccctcaccctcgccgccctggcacactcgggaagcagggcccagctctgagcccctcctcacccctggggtcctaactttcctgaaagtagtaggtgccgtgagaaggggcagtttggccaggttcctgaactgggcagggctcggggcctatgagggcaggttcacagtcccaccagattctctcctcacccccaagcagaatgcatgcaaaagacaccccttttcccacccaccttattggtgcccccaaacccctggcctgctgcgtagatggtggtgaggccaggccagcagtgctgtggccaggggagaagaaaataaaacgcaggccctgcccttggggaaggcccctttctgggcccccttttccaccagccaaatctgcctggccctcggacccctctgcctgccccaacccctttggaggtttctcggccttttctgtgccacttggtggggcagatggcctgatgggctagtgcttggggcatagaatgagggtccccctgaccacctgagcccaaatcctggccccaggtgcaagcagcacccctcgagggctctgccccagtatccccagggaattcacacccctccccttctcccacagccaaggacagacaggctgcctggacctgagcccaacagccttcagcctcagaaacgcatggggggccacacactccttatatcctcccacactaaggttcccctggccccacgggagcttcaggaaagccccccaagttagccactgctctaggacgagctctgtgtcccccacaccacaggcctcgaagcagggtgctggtgggtgccctgtaccccaatcccaggtccccttggccccctatttttctcgggcccattggggcctgtttctcacctgctggctggaccccctgaagggccgttcccagaggctccccaggaggctcaaggctgggggcttatgttgtggtcgggggtccccgcctccagccccccgctcccacccccgagcctaccctttgtctcgcatgagtgcaatatttcattcccggtggttgtctggggaggtggttggacgaggtcctgcttgaggctcggggatcagaacgatgtcaagtgaagaaaaatgcacgggggcatgctgagccactggagttccagagagggccgaggagggtgcagccacggaggttggatcctctgctccgccgcctcgtcctcgtcccgcttctgctgggttccgctttgtccctggttttttcctttctttttctgtgtgcgtgcgaatggtgcggcccctcccctctcaccgtggttaacgtgacgaaggcacgattcctgtaaatgtgtaaactaaggggatggttggattttttttcaatgtaaacactaaaaacaaaatggacaaaaaaacacacaaaggttttatgaacagcagactctatgtaaaggcattttagtatcaaattttttattgataacttgcttaagaataaatatatggactattgtacaggtt

SEQ ID NO: 110651 - DNA, 10801 bp, Homo sapiens
  Payload ID: 1700
  Gene Symbol: BAHCC1
  Gene Name: BAH domain and coiled-coil containing 1
  ENST ID: ENST00000584436
  CDS Start-End: 368-8287
gagagccgctctggatgggctcgctagagtcgttgttgtggaagcggtgcatttacagtgcaacagtcagcacattgaaaataccaataggaatacaaaacaaagtcacatttactgatttaattgtattgcattcagttgtatccaggaaacagcctccaaccatggacccgcacagcggccgctggctcggtgcgcggccgcccgccgagaagcccagtcctcccgcgtgctgaccggccccgccgccaccaccgcctgtgaccccggacgccgccgcctctgcgccgcccgcgcgccgagccgcccccgggccccggccgcgctgctccgaggaagcggcggcggaccggggccggggcccggcatggatggccgcgactttgcgccgccgccgcatctgctgtcggagcgcgggagcctgggccaccgcagcgccgctgccgccgcgcgtctcgccccggctgggcccgccgcgcagccccccgcacacttccagccgggaaagtacttcccgtcgccgttgcccatggcttcgcacacagccagcagccgcctgatgggaagttctccggcctcctcgttcatgggcagtttcctcaccagcagcctgggctcggcagcctccacgcaccccagcggccccagctcctccccccctgagcaggcctaccgtggctcccaccccaccacctcccagatctggttctcccactcccacgaagctccggggtaccccagattttcggggagtctggcatccaccttcctacccgtgagccacttggatcaccatggaaacagcaacgttctctatgggcagcaccgtttctatggaacccaaaaagataacttctacctgcgcaacctgccgccccagcccacgctgctgccggccaaccacaacttccccagcgtggcccgggccgcccctgcccaccccatgggctcctgcagccgggatcgagaccggggtgaggcaggctccctgcagaagggccccaaggacttcgaccgcttcctcgtgggcaaagagctgggcagagagaaggcgggcaaggccgctgagggcaaggagcggccagcggcagaggaggacggtggcaaggagcggcacaagctggtgctgcccgtgccagccgacgggcactgcagggagggcggccccgcaccccgaggggcctgcgagggccgccccaagcacctcacctcctgcctcctcaacaccaaggtgctcaacggcgagatgggcagggctgcgctagccagctgtgcagggggcatgctggggcggcctggcacgggggtggtgacctccgggcgctgtgcaaaggaggcagcaggccccccggagcccgggccggccttcagcgagtgcctggagcggcggcagatgctacaccacaccgcatcctacgccgggccacccccgcccctcagcacagccgccggctccttcccctgcctgcagctgcacgggggccctgacgggctctgcccgctgcaggacaaagccccccgggacctaaaggccagcgggcccaccttcgtgccttctgtgggacacctggccgacaagggccgccccttccaggccgccgaggcctgtgccgtggcaggggagggcaaggaccggcacctggagggaaccatggcccccgaccacgctgcaccctatggagtctcctatgcccacctgaaggccgagggcaagggcgagcggcggcctgggggctttgaggcggccctcaacccccggctaaagggcctcgactatctcagcagcgcaggccccgaggcctccttccccggactccctaaaagcggtctggacaaaagcggctacttcgagttgcccacctcttcacaggactgtgcccggcctggtcaccaggacccgctgggcgggaaggccccccaggcctgctgcactttagataagactgttggcaaggaagccccggccggccccccaggggcacagaaggtggcccgcatcaggcaccagcagcacttgatggccgccgaggtggagcaggggggcattggggctgaggccaagcgcaagtccctggagctggcatccctgggctacagtgggccccacctgcccccatggggtgtccaggcaggccagggcaccgccatggccatcagcgaggagcgcaaggctggcgcctacctggacccctttggcagtggcctgcagcaggcggctcttctgccccaggaactgcctgcgccgccggacgaggtctcagccatgaagaacctgctcaaatacagcagccaggccctggtggtgggccagaaagcacccttggtgggcctgggtggcctcaaggccagctgcatccagcaggaagcaaagttcctgtcctctaagggcccaggccagtcggagaggccggactgtgcccgcagcagggagcacgacaccacgcacggcgacggggaggtgcggcagccccctgtgggcattgcagtggccttggcccggcagaaggacacagtgagccggtctgaggcagcctacggcaccaacactgcgcggcagggccgggccgcccccgccttcaaaggtggcggtgggccccgttccacacacgcgctggacctggaggctgaggaggagaggacgaggctatgtgatgaccgcctggggcttgccagccgcgagctgctgctgcaggacagcaaagaccgcgtagagttcgcccggatccacccaccgagcagctgccctggggacctggccccccacctcatgatgcagagcggccagctgggcggggacccagccccccacacccacccccatcccccctggctgccccgcacccgcagcccctccctgtggatgggggggcactcctacggcctggggcaccctgccctgcaccagaacctgccccccggcttccccgcctccgtggctggccctgtgccctctgtcttccccctcccacaggacgcccccacacagctggtcatcctgccctcagagcccacaccccacagcgccccccacgcacttgcggatgtcatggaccaggcgtcactgtggccccccatgtacgggggccggggccccgcctctcacatgcagcacccgggccagctccctgtgtactcgaggccgcagctcctccggcagcaggagctctatgctttgcagcagcagagggccgcccagttccagcggaagcccgaagaccagcacctggatctggaggagcccgcccaggagaaggccccaaagtccacccacaagccagttgccttaacccccacggccccgggcgccccctcacccgctgcaggccccaccaagctgccaccttgctgccatccgcccgacccaaagccccccgccagctcccccaccccaccacctcggcccagcgccccgtgcactttaaatgtctgccctgccagcagccccgggcctggctcccgggtgcgcagcgccgaggaaaagaatggggagggtcagcagtccacggccgacatcatcacatccgaaccagtggcacgtgctcactctgttgcccacgctggtctcgaattcctggcctcaaatgatccatccacctcagcctcccaaagttttgggattacagacctgcctcccggatacctgcgccccatggctggcctgggcttctccctaccctcagacgtgcactcttctaacctcgaggaccctgaaactatgcaaaccaccgccccgggggcccagcctgagcccacaaggacattcctgcctggggagccgcctccctgcagccccaggagcctggaggagcccgggctgctctcaggggccagggaggccacccaggaccttgccgccaccccctaccctaccgagcggggaccccaggggaaggcagcggaccccagcccactagaggggctacaagaactgcaatgtgcggccctcctggaggcagggggccccgaggccaccggccaggctcattctactcagggaggggcacgagaagagaggagcagggaggagggggagcaggggccctcgtcaggggcctcctcccaagtcctggagcagcgagcagggagtccgggtgcccttgaggacgagggggagcagccggcccctgaggaggacgagctggaggaagacgagctggggcagcagagcatggaggactcagaggaggactgtggcggagctcccgacaacagccacccacccagggcgctaccaggcctggatgccttggtggccgccaccatcaacctgggggacctgcccagcgacagcccaccggaccctcagcccccagcggcctctgggccccccagcacagtccccctgcctcatagctcagggattcatgggatcgctctgctcagcgagctggctgacctggcaatccagcggcagaggagtgagaggactgtgccagaggaggaagaggacgtgctagccttcaacctgcagcacctggccacgctggccacagcctggtccctggtggaggccgctggcctggacagctccactgccccagcgcagccgcccacagccaacccctgcagcggccccaggctcaccccccgcatgcagatcctgcagcgcaaggacacctggacccccaagaccaagcctgtgtgccccctgaaggccgccatcgaccggctggacacgcaggaggtggggatgcgcgtgcggctggcggagctgcagcggcgctacaaggagaagcagcgggagctggcccgcctgcagcgcaagcacgaccatgagagagacgagagttcacggagccctgcacggcgggggcctggccggccgaggaagcgcaaacactcaagctcgctgcctgccccacgtcccacggggccgctccccaggagcgatggcaagaaagtcaaggcggtgcggacaagcctgggtctgctgtgtgcggagctgcgaggaggcagtgggggcgagcctgcgaagaagcgaagcaagctggagaggagcgtctatgcgggcctgcagactgcctccgtggagaaggcgcagtgtaagaagagcagctgtcagggcgggctggcgccctccgtggcccacagggtggcccagctgaaacccaaggtcaagagcaaagggctgcccacaggcctcagctctttccagcagaaggaggctacccccggggggcgcatccgggagaagctgtcccgagccaagagtgccaaggtgtctggggccacacggcacccacagcccaagggccacggcagccgggagacacccaggtgcccagcccagccctccgtggctgcgtcccaggaggcaggcagtggctatgacagtgaggactgcgagggtctcctggggacagaggcaccacccagggaagcagggctgctgctgcacaccggggccagtgtggccgtgctggggccctcaccctcctctgtggtcaagatggaggccaaccagaaggccaagaagaagaaggagaggcaggggttgctaggggcctgccgcctgtccagccctgagagtgaggtcaagatcaagaggcggtcggtgaaggccaaggtgggcaccaccctggagcgggccccagggcagaggcccccaggtgcgctgggcaagaagaaagccaagggcaaggccaagggcagcctgcgggcagagccgggggccacccccagcagggacgccctcttcaacccctctcgggccttcgcctgccgtgaggagggcagccagctggccagtgagcgcctcaagagggccacgcgcaagggcacagtgctgcagccagtgctgcggcggaagaacggggccctgtccatcacgctggccacacgcaacgccaaggccatcctggggaagggccggaagctgagcaaggtgaagcacaaggccggcaagcagggcaagggccgggccgtgagccgcctgctggaaagcttcgccgtggaggaagactttgagttcgacgacaacagcagcttctcggaagaggaggaggacgaggaggaagaggaggaggacagcggccctctgagcgcagagcagagcgccgccctagcgcgctcgtgtgccatccacaaggaggacctgcgggacgggctgcccgtgctcatccccaaggaggatagcctgctgtacgcgggcagcgtcaggaccctgcagccacccgacatctatagcatcgtcatcgagggcgagaggggcaaccggcagaggatctactcactggagcagctgctgcaggaagcggttctcgatgtgcggccacagtccagccggtacctcccgcccggcacgcgggtctgcgcctactggagtcagaagtctcgatgtctgtacccgggcaacgtggtccggggggcctccggtgacgaagatgaggacctggactcagtagtggtggaatttgacgatggggatacaggccacatcgccgtctccaacgtcaggctgctgccccctgacttcaagatccagtgcacagagccctctccagccctgctagtgtctagcagctgccggaggaccaagaaggtatccagtgaggcacccccgcctagtgaagccgccacccccagcctgtcccccaaagcacaggacggccccgaagctttgaagacacctgggaaaaaatccattagcaaagacaaagctggtaaagccgaactcctaacctcaggtgccaaatcccccacgggggcctccgaccacttcctgggccgccgtggcagccccttgctgagctggtccgcggtggcgcagaccaagcggaaggcggtggcagcggccagcaaggggccgggggtgctgcagaacctcttccagctcaacggcagcagcaagaagctgcgggcccgcgaggccctgttccccgtgcacagcgtggccacacccatatttggcaacggcttccgcgccgactccttcagcagcctggccagctcctacgcgcccttcgtcggggggaccgggccgggcctccccaggggagcccacaagctgctgcgggctaagaaggccgagagggtggaggccgagaagggtgggcggcggcgggcgggcggtgagttcctggtcaagctggaccacgagggtgtgacctcccccaagaacaagacctgcaaggcgttgctcatgggggacaaggacttcagccccaagctcgggcggcccctgcccagccccagctatgtgcacccggcccttgtgggcaaggacaagaaggggcgggcacccatccccccgctgcccatggggctggcgctgcgcaagtacgcgggccaggcagagttcccgctgccctacgacagcgactgccacagctccttctcggacgaggacgaggacgggccggggctggcggccggcgtgccctcccgcttcctcgcccgcctgtccgtgtcctcttcctcctctggctcgtccacctcctcctcctcaggctccgtgtccacctccagcctctgctcctccgacaacgaggactcgtcctacagctcagacgacgaggacccggctctgctgctgcagacctgcctcacccaccccgtgcccaccctcctggcccagcccgaggccctgcgctccaagggcagcggccctcacgcgcatgcccagcgctgcttcctgtccagggccacggtggctggcaccggtgcgggctcaggccccagcagcagcagcaaatccaagctcaagcgcaaagaggccctgagcttctccaaagccaaagagctctcccggaggcagcggccgccctccgtggaaaaccggccaaagatctcagccttcctgcccgcccggcagctctggaagtggtcggggaatcccacacagcggcgtggcatgaaggggaaggcccggaagctgttctacaaggccatcgtgcggggcgaggagaccctgcgtgtcggggactgtgccgtcttcctgtcagctgggcggcccaacctcccctacatcggccgcatcgagagcatgtgggagtcgtggggcagcaacatggtggtcaaggtcaagtggttctaccaccctgaggagaccaagctgggcaagaggcagtgcgacggcaagaatgcgctgtaccagtcctgccacgaggatgagaacgacgtgcagaccatctcccacaagtgccaggtcgtggcgcgcgagcagtatgagcagatggcccggagccgcaagtgccaggaccggcaggacctctactacctggcgggcacctacgaccccaccaccgggcgcctggtgacggctgatggcgtgcccatcctatgctgagccgcccaccgcagatgcctcccacgtgcgccagggaccctgtgtgcggagcctggcgtcggccaagccaccgggcaggaggcagccccggcctcccaagggcgcatctgagcaaatatgcaaaagcccacagggcaagacccaggctttcttacggttttccctggaaagagcgctccaggtgtcggaatccagtcccgtcccatcctctgcggagggtcgggctgtggccctcatgggtccccggcccgccccacccacagcgccctccgtttcccgcaccggcagttcacgggagatttgaatccaagccatattccctagtacctccgactgtctcccaccagggaaagcagaaatcaggtgtgttgtctatttatttctctatgtaaatattgtatttctgcggggaaattttatggtaaaaagtggaaaagggtttttccccatccgcgtgacaaggtgtgtgtgagcgtgtatgtgtgtgcgcgtgtgtggcgatttttgtcctggggtttcctttggaaatgcactgttctcagcccagctgggttccaacgggggcacctgggacgacagaggcatctcggggcagggggcagaggccacgggagggtcaggtgggacccttgacggcaccctctgatctcttggggggacgaccgtgtaagatgaaagtcggtcaagtttatttgctttcagtgcatctcctagaaaagaagtgttggagcagggggtggtgatgaggggcccgtggggaaaggattcaagaggcaaagcccagaccagggagtgtgacaacagccgtgagcatctcacctgtgttcaaaacaagacaaagacgaacaaatattttaaagtattgataagaaaaagcaatgtttggattgtatctgctgaatcatattccaacctatatctgatttctgtttccggggccagttggtctgaggccaaggagtctggcctccacccagagcagggaggggctggcccctcgcccccctcaccctcgccgccctggcacactcgggaagcagggcccagctctgagcccctcctcacccctggggtcctaactttcctgaaagtagtaggtgccgtgagaaggggcagtttggccaggttcctgaactgggcagggctcggggcctatgagggcaggttcacagtcccaccagattctctcctcacccccaagcagaatgcatgcaaaagacaccccttttcccacccaccttattggtgcccccaaacccctggcctgctgcgtagatggtggtgaggccaggccagcagtgctgtggccaggggagaagaaaataaaacgcaggccctgcccttggggaaggcccctttctgggcccccttttccaccagccaaatctgcctggccctcggacccctctgcctgccccaacccctttggaggtttctcggccttttctgtgccacttggtggggcagatggcctgatgggctagtgcttggggcatagaatgagggtccccctgaccacctgagcccaaatcctggccccaggtgcaagcagcacccctcgagggctctgccccagtatccccagggaattcacacccctccccttctcccacagccaaggacagacaggctgcctggacctgagcccaacagccttcagcctcagaaacgcatggggggccacacactccttatatcctcccacactaaggttcccctggccccacgggagcttcaggaaagccccccaagttagccactgctctaggacgagctctgtgtcccccacaccacaggcctcgaagcagggtgctggtgggtgccctgtaccccaatcccaggtccccttggccccctatttttctcgggcccattggggcctgtttctcacctgctggctggaccccctgaagggccgttcccagaggctccccaggaggctcaaggctgggggcttatgttgtggtcgggggtccccgcctccagccccccgctcccacccccgagcctaccctttgtctcgcatgagtgcaatatttcattcccggtggttgtctggggaggtggttggacgaggtcctgcttgaggctcggggatcagaacgatgtcaagtgaagaaaaatgcacgggggcatgctgagccactggagttccagagagggccgaggagggtgcagccacggaggttggatcctctgctccgccgcctcgtcctcgtcccgcttctgctgggttccgctttgtccctggttttttcctttctttttctgtgtgcgtgcgaatggtgcggcccctcccctctcaccgtggttaacgtgacgaaggcacgattcctgtaaatgtgtaaactaaggggatggttggattttttttcaatgtaaacactaaaaacaaaatggacaaaaaaacacacaaaggttttatgaacagcagactctatgtaaaggcattttagtatcaaattttttattgataacttgcttaagaataaatatatggactattgtacaggt

SEQ ID NO: 110652 - DNA, 1939 bp, Homo sapiens
  Payload ID: 1701
  Gene Symbol: BAIAP2
  Gene Name: BAI1-associated protein 2
  Uniprot ID: Q9UQB8
  ENST ID: ENST00000321280
  CDS Start-End: 134-1699
aaggtggccgccgccggacgccgggctctgtggttcgggtccgctttcgtctccgtcctgctgccgttaccgccgctgctgccgccgcttgcgtcccccgctccggtctgtggtgcagccgggacccaggaccatgtctctgtctcgctcagaggagatgcaccggctcacggaaaatgtctataagaccatcatggagcagttcaaccctagcctccggaacttcatcgccatggggaagaattacgagaaggcactggcaggtgtgacgtatgcagccaaaggctactttgacgccctggtgaagatgggggagctggccagcgagagccagggctccaaagaactcggagacgttctcttccagatggctgaagtccacaggcagatccagaatcagctggaagaaatgctgaagtcttttcacaacgagctgcttacgcagctggagcagaaggtggagctggactccaggtatctgagtgctgcgctgaagaaataccagactgagcaaaggagcaaaggcgacgccctggacaagtgtcaggctgagctgaagaagcttcggaagaagagccagggcagcaagaatcctcagaagtactcggacaaggagctgcagtacatcgacgccatcagcaacaagcagggcgagctggagaattacgtgtccgacggctacaagaccgcactgacagaggagcgcaggcgcttctgcttcctggtggagaagcagtgcgccgtggccaagaactccgcggcctaccactccaagggcaaggagctgctggcgcagaagctgccgctgtggcaacaggcctgtgccgaccccagcaagatcccggagcgcgcggtgcagctcatgcagcaggtggccagcaacggcgccaccctccccagcgccctgtcggcctccaagtccaacctggtcatttccgaccccattccgggggccaagcccctgccggtgccccccgagctggcaccgttcgtggggcggatgtctgcccaggagagcacacccatcatgaacggcgtcacaggcccggatggcgaggactacagcccgtgggctgaccgcaaggctgcccagcccaaatccctgtctcctccgcagtctcagagcaagctcagcgactcctactccaacacactccccgtgcgcaagagcgtgaccccaaaaaacagctatgccaccaccgagaacaagactctgcctcgctcgagctccatggcagccggcctggagcgcaatggccgtatgcgggtgaaggccatcttctcccacgctgctggggacaacagcaccctcctgagcttcaaggagggtgacctcattaccctgctggtgcctgaggcccgcgatggctggcactacggagagagtgagaagaccaagatgcggggctggtttcccttctcctacacccgggtcttggacagcgatggcagtgacaggctgcacatgagcctgcagcaagggaagagcagcagcacgggcaacctcctggacaaggacgacctggccatcccaccccccgattacggcgccgcctcccgggccttccccgcccagacggccagcggcttcaagcagaggccctacagtgtggccgtgcccgccttctcccagggcctggatgactatggagcgcggtccatgagcagtggcagcggcacgctggtgtccacagtgtgaggacgctgaccccgggcagccgctgctctgaagagcttccgcgccttccccctggtctcgtccgttttcctcctcagctctcgctggtttgttcttgggttgtttttcttttccacctgccccatgccttttggttggtgaccccagactctgtgatcccccagggtccatggtgctgctccatccgccccccctcccctgtgtttacgcgccccatcctgtgtgtcccagccttttgag

SEQ ID NO: 110653 - DNA, 2879 bp, Homo sapiens
  Payload ID: 1701
  Gene Symbol: BAIAP2
  Gene Name: BAI1-associated protein 2
  Uniprot ID: Q9UQB8
  ENST ID: ENST00000321300
  CDS Start-End: 94-1752
ccgctttcgtctccgtcctgctgccgttaccgccgctgctgccgccgcttgcgtcccccgctccggtctgtggtgcagccgggacccaggaccatgtctctgtctcgctcagaggagatgcaccggctcacggaaaatgtctataagaccatcatggagcagttcaaccctagcctccggaacttcatcgccatggggaagaattacgagaaggcactggcaggtgtgacgtatgcagccaaaggctactttgacgccctggtgaagatgggggagctggccagcgagagccagggctccaaagaactcggagacgttctcttccagatggctgaagtccacaggcagatccagaatcagctggaagaaatgctgaagtcttttcacaacgagctgcttacgcagctggagcagaaggtggagctggactccaggtatctgagtgctgcgctgaagaaataccagactgagcaaaggagcaaaggcgacgccctggacaagtgtcaggctgagctgaagaagcttcggaagaagagccagggcagcaagaatcctcagaagtactcggacaaggagctgcagtacatcgacgccatcagcaacaagcagggcgagctggagaattacgtgtccgacggctacaagaccgcactgacagaggagcgcaggcgcttctgcttcctggtggagaagcagtgcgccgtggccaagaactccgcggcctaccactccaagggcaaggagctgctggcgcagaagctgccgctgtggcaacaggcctgtgccgaccccagcaagatcccggagcgcgcggtgcagctcatgcagcaggtggccagcaacggcgccaccctccccagcgccctgtcggcctccaagtccaacctggtcatttccgaccccattccgggggccaagcccctgccggtgccccccgagctggcaccgttcgtggggcggatgtctgcccaggagagcacacccatcatgaacggcgtcacaggcccggatggcgaggactacagcccgtgggctgaccgcaaggctgcccagcccaaatccctgtctcctccgcagtctcagagcaagctcagcgactcctactccaacacactccccgtgcgcaagagcgtgaccccaaaaaacagctatgccaccaccgagaacaagactctgcctcgctcgagctccatggcagccggcctggagcgcaatggccgtatgcgggtgaaggccatcttctcccacgctgctggggacaacagcaccctcctgagcttcaaggagggtgacctcattaccctgctggtgcctgaggcccgcgatggctggcactacggagagagtgagaagaccaagatgcggggctggtttcccttctcctacacccgggtcttggacagcgatggcagtgacaggctgcacatgagcctgcagcaagggaagagcagcagcacgggcaacctcctggacaaggacgacctggccatcccaccccccgattacggcgccgcctcccgggccttccccgcccagacggccagcggcttcaagcagaggccctacagtgtggccgtgcccgccttctcccagggcctggatgactatggagcgcggtccatgagcaggaatccctttgcccacgtccagctgaagccgacagtgaccaacgacaggtgtgatctgtccgcccaagggccagaaggccgggagcacggggatgggagcgcccgcaccctggctggaagatgaacttcccgtaagcacgtaattccctgcaggtccggcagctacacctggagtgtggggcctggtccctccccatgcccctcggtggggctctcctgggcccctcactcccactggcaatgtcacaagggcctccccaggcccctcctgcctcgggcaggccccagccctcctccttacccaacctcccatccagaaccttgctgccagggcctcccagctcgctcctgcggccaaaggccagctgtcaggtgctatgcggggtcaccagcagagtgcccgctggcaggtgggggcttccccgcttccggggtctgccccaggactcctgggtggacctcccccccccacctccgctgactcctgcaggcactggggagctctgctggaattgggggttttaaaacttcattagcagatttgtgctcttccatactgtttgtttgtttgttaggtgaaatacagtgtggtgagctgcactggtgacaacagcccttacctggctggggaggtgtctccagcagagctcactcccgcctacagccactcacaccccggggacaggaagctgtagagttggcgggccaggagggcagttgagagctggccagcggagggtgcagggaagcccagctgtgctcaactctcctgcctccgccttccaccctgggcccagggacagacagacattgccctcagaagggcagggaggaggctgtcctggagaggcctgtaggtccattcttcacccgtccctaccaggccaactcggcctgcaggaagggagacctgcagggcgctacccctgcgcccccacacacagtagggccagaacaccatcccctccaccggggtgtgccgaggacagtggggaggagaggagaggggcagcttcctcctggccccaggaagggctggcatcgggttcctggcacagcccctcctgtccaggactttatcatcggcagacctcagaagacaacacacaaaggtttcttttgtcttagcttcatttctcttaaaaaacaaggaacaagaaaacattgcaccagcgttctaagcctcaaacaaaacacaaaacaaatccccctgcgaagcaacaataaactttacatctctttggcaacaat

SEQ ID NO: 110654 - DNA, 1442 bp, Homo sapiens
  Payload ID: 1701
  Gene Symbol: BAIAP2
  Gene Name: BAI1-associated protein 2
  ENST ID: ENST00000416299
  CDS Start-End: 1-1128
atgctcctcccagagggacagaggcagagagccctggggtttggaactgtcacttccacctacagccctgttggtcagtacatcgacgccatcagcaacaagcagggcgagctggagaattacgtgtccgacggctacaagaccgcactgacagaggagcgcaggcgcttctgcttcctggtggagaagcagtgcgccgtggccaagaactccgcggcctaccactccaagggcaaggagctgctggcgcagaagctgccgctgtggcaacaggcctgtgccgaccccagcaagatcccggagcgcgcggtgcagctcatgcagcaggtggccagcaacggcgccaccctccccagcgccctgtcggcctccaagtccaacctggtcatttccgaccccattccgggggccaagcccctgccggtgccccccgagctggcaccgttcgtggggcggatgtctgcccaggagagcacacccatcatgaacggcgtcacaggcccggatggcgaggactacagcccgtgggctgaccgcaaggctgcccagcccaaatccctgtctcctccgcagtctcagagcaagctcagcgactcctactccaacacactccccgtgcgcaagagcgtgaccccaaaaaacagctatgccaccaccgagaacaagactctgcctcgctcgagctccatggcagccggcctggagcgcaatggccgtatgcgggtgaaggccatcttctcccacgctgctggggacaacagcaccctcctgagcttcaaggagggtgacctcattaccctgctggtgcctgaggcccgcgatggctggcactacggagagagtgagaagaccaagatgcggggctggtttcccttctcctacacccgggtcttggacagcgatggcagtgacaggctgcacatgagcctgcagcaagggaagagcagcagcacgggcaacctcctggacaaggacgacctggccatcccaccccccgattacggcgccgcctcccgggccttccccgcccagacggccagcggcttcaagcagaggccctacagtgtggccgtgcccgccttctcccagggcctggatgactatggagcgcggtccatgagcaggtaaggggactttcagacctgtctttgggaccgtgggtgggtgtgaagaggccgggtggggcaggtccctctgctaggacctggggccacctcttttcctttagggcccagcctggcccttcacccctgtcagagccggggatgtcccttagggcgtcctgctttctccgagtgacacgggaacccccctgggccctgcccctctttcatcgcatctggccggccccatccatccctgtcaggcaaggttggggagggtagctgaggctggcatccatggctggggctgcagcctcctctgccccaatctgtgctccg

SEQ ID NO: 110655 - DNA, 2095 bp, Homo sapiens
  Payload ID: 1701
  Gene Symbol: BAIAP2
  Gene Name: BAI1-associated protein 2
  Uniprot ID: Q9UQB8
  ENST ID: ENST00000428708
  CDS Start-End: 105-1709
gtggttcgggtccgctttcgtctccgtcctgctgccgttaccgccgctgctgccgccgcttgcgtcccccgctccggtctgtggtgcagccgggacccaggaccatgtctctgtctcgctcagaggagatgcaccggctcacggaaaatgtctataagaccatcatggagcagttcaaccctagcctccggaacttcatcgccatggggaagaattacgagaaggcactggcaggtgtgacgtatgcagccaaaggctactttgacgccctggtgaagatgggggagctggccagcgagagccagggctccaaagaactcggagacgttctcttccagatggctgaagtccacaggcagatccagaatcagctggaagaaatgctgaagtcttttcacaacgagctgcttacgcagctggagcagaaggtggagctggactccaggtatctgagtgctgcgctgaagaaataccagactgagcaaaggagcaaaggcgacgccctggacaagtgtcaggctgagctgaagaagcttcggaagaagagccagggcagcaagaatcctcagaagtactcggacaaggagctgcagtacatcgacgccatcagcaacaagcagggcgagctggagaattacgtgtccgacggctacaagaccgcactgacagaggagcgcaggcgcttctgcttcctggtggagaagcagtgcgccgtggccaagaactccgcggcctaccactccaagggcaaggagctgctggcgcagaagctgccgctgtggcaacaggcctgtgccgaccccagcaagatcccggagcgcgcggtgcagctcatgcagcaggtggccagcaacggcgccaccctccccagcgccctgtcggcctccaagtccaacctggtcatttccgaccccattccgggggccaagcccctgccggtgccccccgagctggcaccgttcgtggggcggatgtctgcccaggagagcacacccatcatgaacggcgtcacaggcccggatggcgaggactacagcccgtgggctgaccgcaaggctgcccagcccaaatccctgtctcctccgcagtctcagagcaagctcagcgactcctactccaacacactccccgtgcgcaagagcgtgaccccaaaaaacagctatgccaccaccgagaacaagactctgcctcgctcgagctccatggcagccggcctggagcgcaatggccgtatgcgggtgaaggccatcttctcccacgctgctggggacaacagcaccctcctgagcttcaaggagggtgacctcattaccctgctggtgcctgaggcccgcgatggctggcactacggagagagtgagaagaccaagatgcggggctggtttcccttctcctacacccgggtcttggacagcgatggcagtgacaggctgcacatgagcctgcagcaagggaagagcagcagcacgggcaacctcctggacaaggacgacctggccatcccaccccccgattacggcgccgcctcccgggccttccccgcccagacggccagcggcttcaagcagaggccctacagtgtggccgtgcccgccttctcccagggcctggatgactatggagcgcggtccatgagcaggaatccctttgcccacgtccagctgaagccgacagtgaccaacgacaggtctgcccccctcctcagctgatggccacatctgcagtgctgcccatctggtggcttcccccgcccttcccatgtagcctgttctgtcatcatctgtgcgttcctgtgtagagaacatccaggccccggctgcctggtcttgccccacttgagtctggcctggactggatcccagctgttctaggcagggccgggcagagtggggcgcaggcccctgaagggcgagacccagtggctgggctgcccagggctgaggggccgcctcttgagggtacacgcctctggtcacatggccatggagccttgggtacccctgagttaagggaggacatttggccagctggtggctgggaggggagcctggctgccctgctgcttctcctgcctaataaacaggcttctcctgca

SEQ ID NO: 110656 - DNA, 2129 bp, Homo sapiens
  Payload ID: 1701
  Gene Symbol: BAIAP2
  Gene Name: BAI1-associated protein 2
  Uniprot ID: Q9UQB8
  ENST ID: ENST00000435091
  CDS Start-End: 94-1656
ccgctttcgtctccgtcctgctgccgttaccgccgctgctgccgccgcttgcgtcccccgctccggtctgtggtgcagccgggacccaggaccatgtctctgtctcgctcagaggagatgcaccggctcacggaaaatgtctataagaccatcatggagcagttcaaccctagcctccggaacttcatcgccatggggaagaattacgagaaggcactggcaggtgtgacgtatgcagccaaaggctactttgacgccctggtgaagatgggggagctggccagcgagagccagggctccaaagaactcggagacgttctcttccagatggctgaagtccacaggcagatccagaatcagctggaagaaatgctgaagtcttttcacaacgagctgcttacgcagctggagcagaaggtggagctggactccaggtatctgagtgctgcgctgaagaaataccagactgagcaaaggagcaaaggcgacgccctggacaagtgtcaggctgagctgaagaagcttcggaagaagagccagggcagcaagaatcctcagaagtactcggacaaggagctgcagtacatcgacgccatcagcaacaagcagggcgagctggagaattacgtgtccgacggctacaagaccgcactgacagaggagcgcaggcgcttctgcttcctggtggagaagcagtgcgccgtggccaagaactccgcggcctaccactccaagggcaaggagctgctggcgcagaagctgccgctgtggcaacaggcctgtgccgaccccagcaagatcccggagcgcgcggtgcagctcatgcagcaggtggccagcaacggcgccaccctccccagcgccctgtcggcctccaagtccaacctggtcatttccgaccccattccgggggccaagcccctgccggtgccccccgagctggcaccgttcgtggggcggatgtctgcccaggagagcacacccatcatgaacggcgtcacaggcccggatggcgaggactacagcccgtgggctgaccgcaaggctgcccagcccaaatccctgtctcctccgcagtctcagagcaagctcagcgactcctactccaacacactccccgtgcgcaagagcgtgaccccaaaaaacagctatgccaccaccgagaacaagactctgcctcgctcgagctccatggcagccggcctggagcgcaatggccgtatgcgggtgaaggccatcttctcccacgctgctggggacaacagcaccctcctgagcttcaaggagggtgacctcattaccctgctggtgcctgaggcccgcgatggctggcactacggagagagtgagaagaccaagatgcggggctggtttcccttctcctacacccgggtcttggacagcgatggcagtgacaggctgcacatgagcctgcagcaagggaagagcagcagcacgggcaacctcctggacaaggacgacctggccatcccaccccccgattacggcgccgcctcccgggccttccccgcccagacggccagcggcttcaagcagaggccctacagtgtggccgtgcccgccttctcccagggcctggatgactatggagcgcggtccatgagcagcgccgatgtggaagtggccagattctgagccgcctgactagagttagaatccctttgcccacgtccagctgaagccgacagtgaccaacgacaggtctgcccccctcctcagctgatggccacatctgcagtgctgcccatctggtggcttcccccgcccttcccatgtagcctgttctgtcatcatctgtgcgttcctgtgtagagaacatccaggccccggctgcctggtcttgccccacttgagtctggcctggactggatcccagctgttctaggcagggccgggcagagtggggcgcaggcccctgaagggcgagacccagtggctgggctgcccagggctgaggggccgcctcttgagggtacacgcctctggtcacatggccatggagccttgggtacccctgagttaagggaggacatttggccagctggtggctgggaggggagcctggctgccctgctgcttctcctgcctaataaacaggcttctcctgc

SEQ ID NO: 110657 - DNA, 581 bp, Homo sapiens
  Payload ID: 1701
  Gene Symbol: BAIAP2
  Gene Name: BAI1-associated protein 2
  ENST ID: ENST00000571530
  CDS Start-End: 161-581
ctttgcttcagatgtgttaagagtggcatccacgttctcgtctgcgaaatgacagagggtggaagagaagtaccagcggaacctttttcctattttttctccttctgcgctgaaaccagaaagcaggaactttcgtggtgagagttggcaggggaccatcatggagcagttcaaccctagcctccggaacttcatcgccatggggaagaattacgagaaggcactggcaggtgtgacgtatgcagccaaaggctactttgacgccctggtgaagatgggggagctggccagcgagagccagggctccaaagaactcggagacgttctcttccagatggctgaagtccacaggcagatccagaatcagctggaagaaatgctgaagtcttttcacaacgagctgcttacgcagctggagcagaaggtggagctggactccaggtatctgagtgctgcgctgaagaaataccagactgagcaaaggagcaaaggcgacgccctggacaagtgtcaggctgagctgaagaagcttcggaagaagagccagggcagcaagaatcctcagaagtactcggacaagg

SEQ ID NO: 110658 - DNA, 748 bp, Homo sapiens
  Payload ID: 1701
  Gene Symbol: BAIAP2
  Gene Name: BAI1-associated protein 2
  ENST ID: ENST00000576756
  CDS Start-End: 359-748
gcatcttcttaagagccgattctgaactgaccactccttgacgggcaatcccggtggacggggggtctgagtcctgctgtggagggtctgcctgaggccggtaggggctcagcccaagtacatcgacgccatcagcaacaagcagggcgagctggagaattacgtgtccgacggctacaagaccgcactgacagaggagcgcaggcgcttctgcttcctggtggagaagcagtgcgccgtggccaagaactccgcggcctaccactccaagggcaaggagctgctggcgcagaagctgccgctgtggcaacaggcctgtgccgaccccagcaagatcccggagcgcgcggtgcagctcatgcagcaggtggccagcaacggcgccaccctccccagcgccctgtcggcctccaagtccaacctggtcatttccgaccccattccgggggccaagcccctgccggtgccccccgagctggcaccgttcgtggggcggatgtctgcccaggagagcacacccatcatgaacggcgtcacaggcccggatggcgaggactacagcccgtgggctgaccgcaaggctgcccagcccaaatccctgtctcctccgcagtctcagagcaagctcagcgactcctactccaacacactccccgtgcgcaagagcgtgaccccaaaaaacagctatgccaccaccgagaacaagactctgcctcgctcgagctccatggcagccggcctggagcgc

SEQ ID NO: 110659 - DNA, 565 bp, Homo sapiens
  Payload ID: 1701
  Gene Symbol: BAIAP2
  Gene Name: BAI1-associated protein 2
  ENST ID: ENST00000575989
  CDS Start-End: 327-565
gtggttcgggtccgctttcgtctccgtcctgctgccgttaccgccgctgctgccgccgcttgcgtcccccgctccggtctgtggtgcagccgggacccaggaccatgtctctgtctcgctcagaggagatgcaccggctcacggaaaatgtctataagaccatcatggagcagttcaaccctagcctccggaacttcatcgccatggggaagaattacgagaaggcactggcaggtggaactgcgcccgggccccgtggggtgggagctgcctcctgagctggtgtgacgtatgcagccaaaggctactttgacgccctggtgaagatgggggagctggccagcgagagccagggctccaaagaactcggagacgttctcttccagatggctgaagtccacaggcagatccagaatcagctggaagaaatgctgaagtcttttcacaacgagctgcttacgcagctggagcagaaggtggagctggactccaggtatctgagtgctgcgctgaagaaataccagactgagcaaaggagcaaaggcgacgccctggacaagtgtca

SEQ ID NO: 110660 - DNA, 567 bp, Homo sapiens
  Payload ID: 1701
  Gene Symbol: BAIAP2
  Gene Name: BAI1-associated protein 2
  ENST ID: ENST00000575958
  CDS Start-End: 161-567
gtcttgcacattgcagactgacgatggcttcctttttccagagccactcgtctgtgggacacttggtgacctcatctacggtagagtcttccgtagccctcacgtggctctccgaggtgtgacgtatgcagccaaaggctactttgacgccctggtgaagatgggggagctggccagcgagagccagggctccaaagaactcggagacgttctcttccagatggctgaagtccacaggcagatccagaatcagctggaagaaatgctgaagtcttttcacaacgagctgcttacgcagctggagcagaaggtggagctggactccaggtatctgagtgctgcgctgaagaaataccagactgagcaaaggagcaaaggcgacgccctggacaagtgtcaggctgagctgaagaagcttcggaagaagagccagggcagcaagaatcctcagaagtactcggacaaggagctgcagtacatcgacgccatcagcaacaagcagggcgagctggagaattacgtgtccgacggctacaagaccgcactgacagaggagcgcaggcgctt

SEQ ID NO: 110661 - DNA, 646 bp, Homo sapiens
  Payload ID: 1701
  Gene Symbol: BAIAP2
  Gene Name: BAI1-associated protein 2
  ENST ID: ENST00000573677
  CDS Start-End: 106-646
agaaatcacagcgagtcgagtattctcccagcttgtctgggcaggagacagggttgggcctgtgtgacgtatgcagccaaaggctactttgacgccctggtgaagatgggggagctggccagcgagagccagggctccaaagaactcggagacgttctcttccagatggctgaagtccacaggcagatccagaatcagctggaagaaatgctgaagtcttttcacaacgagctgcttacgcagctggagcagaaggtggagctggactccaggtatctgagtgctgcgctgaagaaataccagactgagcaaaggagcaaaggcgacgccctggacaagtgtcaggctgagctgaagaagcttcggaagaagagccagggcagcaagaatcctcagaagtactcggacaaggagctgcagtacatcgacgccatcagcaacaagcagggcgagctggagaattacgtgtccgacggctacaagaccgcactgacagaggagcgcaggcgcttctgcttcctggtggagaagcagtgcgccgtggccaagaactccgcggcctaccactccaagggcaaggagctgctggcgcagaagctgccgctgtggcaacaggcctgtgccgaccccagcaagatcccggagc

SEQ ID NO: 110662 - DNA, 2512 bp, Homo sapiens
  Payload ID: 1701
  Gene Symbol: BAIAP2
  Gene Name: BAI1-associated protein 2
  Uniprot ID: Q9UQB8
  ENST ID: ENST00000575712
  CDS Start-End: 100-1638
tcgggtccgctttcgtctccgtcctgctgccgttaccgccgctgctgccgccgcttgcgtcccccgctccggtctgtggtgcagccgggacccaggaccatgtctctgtctcgctcagaggagatgcaccggctcacggaaaatgtctataagaccatcatggagcagttcaaccctagcctccggaacttcatcgccatggggaagaattacgagaaggcactggcaggtgtgacgtatgcagccaaaggctactttgacgccctggtgaagatgggggagctggccagcgagagccagggctccaaagaactcggagacgttctcttccagatggctgaagtccacaggcagatccagaatcagctggaagaaatgctgaagtcttttcacaacgagctgcttacgcagctggagcagaaggtggagctggactccaggtatctgagtgctgcgctgaagaaataccagactgagcaaaggagcaaaggcgacgccctggacaagtgtcaggctgagctgaagaagcttcggaagaagagccagggcagcaagaatcctcagaagtactcggacaaggagctgcagtacatcgacgccatcagcaacaagcagggcgagctggagaattacgtgtccgacggctacaagaccgcactgacagaggagcgcaggcgcttctgcttcctggtggagaagcagtgcgccgtggccaagaactccgcggcctaccactccaagggcaaggagctgctggcgcagaagctgccgctgtggcaacaggcctgtgccgaccccagcaagatcccggagcgcgcggtgcagctcatgcagcaggtggccagcaacggcgccaccctccccagcgccctgtcggcctccaagtccaacctggtcatttccgaccccattccgggggccaagcccctgccggtgccccccgagctggcaccgttcgtggggcggatgtctgcccaggagagcacacccatcatgaacggcgtcacaggcccggatggcgaggactacagcccgtgggctgaccgcaaggctgcccagcccaaatccctgtctcctccgcagtctcagagcaagctcagcgactcctactccaacacactccccgtgcgcaagagcgtgaccccaaaaaacagctatgccaccaccgagaacaagactctgcctcgctcgagctccatggcagccggcctggagcgcaatggccgtatgcgggtgaaggccatcttctcccacgctgctggggacaacagcaccctcctgagcttcaaggagggtgacctcattaccctgctggtgcctgaggcccgcgatggctggcactacggagagagtgagaagaccaagatgcggggctggtttcccttctcctacacccgggtcttggacagcgatggcagtgacaggctgcacatgagcctgcagcaagggaagagcagcagcacgggcaacctcctggacaaggacgacctggccatcccaccccccgattacggcgccgcctcccgggccttccccgcccagacggccagcggcttcaagcagaggccctacagtgtggccgtgcccgccttctcccagggcctggatgactatggagcgcggtccatgagcaggtaaggggactttcagacctgtctttgggaccgtgggtgggtgtgaagaggccgggtggggcaggtccctctgctaggacctggggccacctcttttcctttagggcccagcctggcccttcacccctgtcagagccggggatgtcccttagggcgtcctgctttctccgagtgacacgggaacccccctgggccctgcccctctttcatcgcatctggccggccccatccatccctgtcaggcaaggttggggagggtagctgaggctggcatccatggctggggctgcagcctcctctgccccaatctgtgctccgcccttgtcctgggtcttcctggagggtcaggaggccaacgggagctgctgaaaggggcattgctcggtgctggcggactcgccgcctgtggctgggcagcgtcgtgcagccaggcagccgtcctgtgctttgtttcacagtggcagcggcacgctggtgtccacagtgtgaggacgctgaccccgggcagccgctgctctgaagagcttccgcgccttccccctggtctcgtccgttttcctcctcagctctcgctggtttgttcttgggttgtttttcttttccacctgccccatgccttttggttggtgaccccagactctgtgatcccccagggtccatggtgctgctccatccgccccccctcccctgtgtttacgcgccccatcctgtgtgtcccagccttttgagcagaaactgccaggcaggacctgctgggccgtgcggggcaccctcggcctcaccctgcagtgtctgtggcactcactgcttttctaaggctcgccgtgagccaggtctaaagtttgaagaaaaagaaaaatcttaaaaaaaaaaaaaaa

SEQ ID NO: 110663 - DNA, 631 bp, Homo sapiens
  Payload ID: 1701
  Gene Symbol: BAIAP2
  Gene Name: BAI1-associated protein 2
  ENST ID: ENST00000574804
  CDS Start-End: 96-272
gcgagtcgagtattctcccagcttgtctgggcaggagacagggttgggcctgtgtgacgtatgcagccaaaggctactttgacgccctggtgaagatgggggagctggccagcgagagccagggctccaaagaactcggagacgttctcttccagatggctgaagtccacaggcagatccagaatcagctggaagaaatgctgaagtcttttcacaacgagctgcttacgcagctggagcagaaggtggagctggactccaggctgcgctgaagaaataccagactgagcaaaggagcaaaggcgacgccctggacaagtgtcaggctgagctgaagaagcttcggaagaagagccagggcagcaagaatcctcagaagtactcggacaaggagctgcagtacatcgacgccatcagcaacaagcagggcgagctggagaattacgtgtccgacggctacaagaccgcactgacagaggagcgcaggcgcttctgcttcctggtggagaagcagtgcgccgtggccaagaactccgcggcctaccactccaagggcaaggagctgctggcgcagaagctgccgctgtggcaacaggcctgtgccgaccccagcaagatcccggagcgcgcg

SEQ ID NO: 110664 - DNA, 782 bp, Homo sapiens
  Payload ID: 1701
  Gene Symbol: BAIAP2
  Gene Name: BAI1-associated protein 2
  ENST ID: ENST00000572073
  CDS Start-End: 79-782
gcaatttgacttgaatagctcaggacctgaactggtgtgacgtatgcagccaaaggctactttgacgccctggtgaagatgggggagctggccagcgagagccagggctccaaagaactcggagacgttctcttccagatggctgaagtccacaggcagatccagaatcagctggaagaaatgctgaagtcttttcacaacgagctgcttacgcagctggagcagaaggtggagctggactccaggtatctgagtgctgcgctgaagaaataccagactgagcaaaggagcaaaggcgacgccctggacaagtgtcaggctgagctgaagaagcttcggaagaagagccagggcagcaagaatcctcagaagtactcggacaaggagctgcagtacatcgacgccatcagcaacaagcagggcgagctggagaattacgtgtccgacggctacaagaccgcactgacagaggagcgcaggcgcttctgcttcctggtggagaagcagtgcgccgtggccaagaactccgcggcctaccactccaagggcaaggagctgctggcgcagaagctgccgctgtggcaacaggcctgtgccgaccccagcaagatcccggagcgcgcggtgcagctcatgcagcaggtggccagcaacggcgccaccctccccagcgccctgtcggcctccaagtccaacctggtcatttccgaccccattccgggggccaagcccctgccggtgccccccgagctggcaccgttcgtggggcggatgtctgccca

SEQ ID NO: 110665 - DNA, 626 bp, Homo sapiens
  Payload ID: 1701
  Gene Symbol: BAIAP2
  Gene Name: BAI1-associated protein 2
  ENST ID: ENST00000572918
  CDS Start-End: 100-626
agttgtattctgcctgctgcaccatgcaaatgcgctccttcagcccgcagacactcctctgcggccgggtttcttcttaccccctttgcacagaccatcatggagcagttcaaccctagcctccggaacttcatcgccatggggaagaattacgagaaggcactggcaggtgtgacgtatgcagccaaaggctactttgacgccctggtgaagatgggggagctggccagcgagagccagggctccaaagaactcggagacgttctcttccagatggctgaagtccacaggcagatccagaatcagctggaagaaatgctgaagtcttttcacaacgagctgcttacgcagctggagcagaaggtggagctggactccaggtatctgagtgctgcgctgaagaaataccagactgagcaaaggagcaaaggcgacgccctggacaagtgtcaggctgagctgaagaagcttcggaagaagagccagggcagcaagaatcctcagaagtactcggacaaggagctgcagtacatcgacgccatcagcaacaagcagggcgagctggagaattacgtgtccgacggctacaagaccgcactgacagaggagcgcaggcgcttctgctt

SEQ ID NO: 110666 - DNA, 584 bp, Homo sapiens
  Payload ID: 1701
  Gene Symbol: BAIAP2
  Gene Name: BAI1-associated protein 2
  ENST ID: ENST00000575750
  CDS Start-End: 106-426
tgtggttcgggtccgctttcgtctccgtcctgctgccgttaccgccgctgctgccgccgcttgcgtcccccgctccggtctgtggtgcagccgggacccaggaccatgtctctgtctcgctcagaggagatgcaccggctcacggaaaatgtctataagaccatcatggagcagttcaaccctagcctccggaacttcatcgccatggggaagaattacgagaaggcactggcaggtgtgacgtatgcagccaaaggctactttgacgccctggtgaagatgggggagctggccagcgagagccagggctccaaagaactcggagacgttctcttccagatggctgaagtccacaggcagatccagaatcagctggaagaaatgccctgccctgcctcctgttccgggtccatgtgttggagctgacggctgatgtgttttctctccatgtccagctgaagtcttttcacaacgagctgcttacgcagctggagcagaaggtggagctggactccaggtatctgagtgctgcgctgaagaaataccagactgagcaaaggagcaaaggcgacgccctggacaag

SEQ ID NO: 110667 - DNA, 858 bp, Homo sapiens
  Payload ID: 1701
  Gene Symbol: BAIAP2
  Gene Name: BAI1-associated protein 2
  ENST ID: ENST00000572498
  CDS Start-End: 1-649
gcccaaatccctgtctcctccgcagtctcagagcaagctcagcgactcctactccaacacactccccgtgcgcaagagcgtgaccccaaaaaacagctatgccaccacagccgagaacaagactctgcctcgctcgagctccatggcagccggcctggagcgcaatggccgtatgcgggtgaaggccatcttctcccacgctgctggggacaacagcaccctcctgagcttcaaggagggtgacctcattaccctgctggtgcctgaggcccgcgatggctggcactacggagagagtgagaagaccaagatgcggggctggtttcccttctcctacacccgggtcttggacagcgatggcagtgacaggctgcacatgagcctgcagcaagggaagagcagcagcacgggcaacctcctggacaaggacgacctggccatcccaccccccgattacggcgccgcctcccgggccttccccgcccagacggccagcggcttcaagcagaggccctacagtgtggccgtgcccgccttctcccagggcctggatgactatggagcgcggtccatgagcaggaatccctttgcccacgtccagctgaagccgacagtgaccaacgacaggtctgcccccctcctcagctgatggccacatctgcagtgctgcccatctggtggcttcccccgcccttcccatgtagcctgttctgtcatcatctgtgcgttcctgtgtagagaacatccaggccccggctgcctggtcttgccccacttgagtctggcctggactggatcccagctgttctaggcagggccgggcagagtggggcgcaggcccctgaagggcgagaccca

SEQ ID NO: 110668 - DNA, 2133 bp, Homo sapiens
  Payload ID: 1701
  Gene Symbol: BAIAP2
  Gene Name: BAI1-associated protein 2
  ENST ID: ENST00000572329
  CDS Start-End: 105-554
gtggttcgggtccgctttcgtctccgtcctgctgccgttaccgccgctgctgccgccgcttgcgtcccccgctccggtctgtggtgcagccgggacccaggaccatgtctctgtctcgctcagaggagatgcaccggctcacggaaaatgtctataagagggtggaagagaagtaccagcggaacctttttcctattttttctccttctgcgctgaaaccagaaagcaggaactttcgtggtgagagttggcaggggaccatcatggagcagttcaaccctagcctccggaacttcatcgccatggggaagaattacgagaaggcactggcaggtgtgacgtatgcagccaaaggctactttgacgccctggtgaagatgggggagctggccagcgagagccagggctccaaagaactcggagacgttctcttccagatggctgaagtccacaggcagatccagaatcagctggaagaaatgctgaagtcttttcacaacgagctgcttacgcagctggagcagaaggtggagctggactccaggctgcgctgaagaaataccagactgagcaaaggagcaaaggcgacgccctggacaagtgtcaggctgagctgaagaagcttcggaagaagagccagggcagcaagaatcctcagaagtactcggacaaggagctgcagtacatcgacgccatcagcaacaagcagggcgagctggagaattacgtgtccgacggctacaagaccgcactgacagaggagcgcaggcgcttctgcttcctggtggagaagcagtgcgccgtggccaagaactccgcggcctaccactccaagggcaaggagctgctggcgcagaagctgccgctgtggcaacaggcctgtgccgaccccagcaagatcccggagcgcgcggtgcagctcatgcagcaggtggccagcaacggcgccaccctccccagcgccctgtcggcctccaagtccaacctggtcatttccgaccccattccgggggccaagcccctgccggtgccccccgagctggcaccgttcgtggggcggatgtctgcccaggagagcacacccatcatgaacggcgtcacaggcccggatggcgaggactacagcccgtgggctgaccgcaaggctgcccagcccaaatccctgtctcctccgcagtctcagagcaagctcagcgactcctactccaacacactccccgtgcgcaagagcgtgaccccaaaaaacagctatgccaccaccgagaacaagactctgcctcgctcgagctccatggcagccggcctggagcgcaatggccgtatgcgggtgaaggccatcttctcccacgctgctggggacaacagcaccctcctgagcttcaaggagggtgacctcattaccctgctggtgcctgaggcccgcgatggctggcactacggagagagtgagaagaccaagatgcggggctggtttcccttctcctacacccgggtcttggacagcgatggcagtgacaggctgcacatgagcctgcagcaagggaagagcagcagcacgggcaacctcctggacaaggacgacctggccatcccaccccccgattacggcgccgcctcccgggccttccccgcccagacggccagcggcttcaagcagaggccctacagtgtggccgtgcccgccttctcccagggcctggatgactatggagcgcggtccatgagcagtggcagcggcacgctggtgtccacagtgtgaggacgctgaccccgggcagccgctgctctgaagagcttccgcgccttccccctggtctcgtccgttttcctcctcagctctcgctggtttgttcttgggttgtttttcttttccacctgccccatgccttttggttggtgaccccagactctgtgatcccccagggtccatggtgctgctccatccgccccccctcccctgtgtttacgcgccccatcctgtgtgtcccagccttttgagcagaaactgccaggcaggacctgctgggccgtgcggggcaccctcggcctcaccctgcagtgtctgtggcactcactgcttttctaaggctcgccgtgagccaggtctaaagtttgaagaaaaagaaaaatctt

SEQ ID NO: 110669 - DNA, 509 bp, Homo sapiens
  Payload ID: 1701
  Gene Symbol: BAIAP2
  Gene Name: BAI1-associated protein 2
  ENST ID: ENST00000575841
  CDS Start-End: 1-294
cagactgagcaaaggagcaaaggcgacgccctggacaagtgtcaggctgagctgaagaagcttcggaagaagagccagggcagcaagaatcctcagaagtactcggacaaggagctgcagtacatcgacgccatcagcaacaagcagggcgagctggagaattacgtgtccgacggctacaagaccgcactgacagaggagcgcaggcgcttctgcttcctggtggagaagcagtgcgccgtggccaagaactccgcggcctaccactccaagggcggaccgggccctgtgtagagacccttccgcgccggcgttcccgctccgctaaagatttcaaatccaggggattccatgctcaatggatgaatgtagacacaaaacagcaacacttgtatgaagatgtaaagtgctgaacatatttttttcctgtttcctttccttttttttaaaaaatctgaattgtgccctgtactgcagttacttgtttgaataaaagttttatttattgc

SEQ ID NO: 110670 - DNA, 2229 bp, Homo sapiens
  Payload ID: 1701
  Gene Symbol: BAIAP2
  Gene Name: BAI1-associated protein 2
  ENST ID: ENST00000575245
  CDS Start-End: 98-1759
gggtccgctttcgtctccgtcctgctgccgttaccgccgctgctgccgccgcttgcgtcccccgctccggtctgtggtgcagccgggacccaggaccatgtctctgtctcgctcagaggagatgcaccggctcacggaaaatgtctataagagggtggaagagaagtaccagcggaacctttttcctattttttctccttctgcgctgaaaccagaaagcaggaactttcgtggtgagagttggcaggggaccatcatggagcagttcaaccctagcctccggaacttcatcgccatggggaagaattacgagaaggcactggcaggtgtgacgtatgcagccaaaggctactttgacgccctggtgaagatgggggagctggccagcgagagccagggctccaaagaactcggagacgttctcttccagatggctgaagtccacaggcagatccagaatcagctggaagaaatgctgaagtcttttcacaacgagctgcttacgcagctggagcagaaggtggagctggactccaggtatctgagtgctgcgctgaagaaataccagactgagcaaaggagcaaaggcgacgccctggacaagtgtcaggctgagctgaagaagcttcggaagaagagccagggcagcaagaatcctcagaagtactcggacaaggagctgcagtacatcgacgccatcagcaacaagcagggcgagctggagaattacgtgtccgacggctacaagaccgcactgacagaggagcgcaggcgcttctgcttcctggtggagaagcagtgcgccgtggccaagaactccgcggcctaccactccaagggcaaggagctgctggcgcagaagctgccgctgtggcaacaggcctgtgccgaccccagcaagatcccggagcgcgcggtgcagctcatgcagcaggtggccagcaacggcgccaccctccccagcgccctgtcggcctccaagtccaacctggtcatttccgaccccattccgggggccaagcccctgccggtgccccccgagctggcaccgttcgtggggcggatgtctgcccaggagagcacacccatcatgaacggcgtcacaggcccggatggcgaggactacagcccgtgggctgaccgcaaggctgcccagcccaaatccctgtctcctccgcagtctcagagcaagctcagcgactcctactccaacacactccccgtgcgcaagagcgtgaccccaaaaaacagctatgccaccaccgagaacaagactctgcctcgctcgagctccatggcagccggcctggagcgcaatggccgtatgcgggtgaaggccatcttctcccacgctgctggggacaacagcaccctcctgagcttcaaggagggtgacctcattaccctgctggtgcctgaggcccgcgatggctggcactacggagagagtgagaagaccaagatgcggggctggtttcccttctcctacacccgggtcttggacagcgatggcagtgacaggctgcacatgagcctgcagcaagggaagagcagcagcacgggcaacctcctggacaaggacgacctggccatcccaccccccgattacggcgccgcctcccgggccttccccgcccagacggccagcggcttcaagcagaggccctacagtgtggccgtgcccgccttctcccagggcctggatgactatggagcgcggtccatgagcagcgccgatgtggaagtggccagattctgagccgcctgactagagaatccctttgcccacgtccagctgaagccgacagtgaccaacgacaggtctgcccccctcctcagctgatggccacatctgcagtgctgcccatctggtggcttcccccgcccttcccatgtagcctgttctgtcatcatctgtgcgttcctgtgtagagaacatccaggccccggctgcctggtcttgccccacttgagtctggcctggactggatcccagctgttctaggcagggccgggcagagtggggcgcaggcccctgaagggcgagacccagtggctgggctgcccagggctgaggggccgcctcttgagggtacacgcctctggtcacatggccatggagccttgggtacccctgagttaagggaggacatttggccagctggtggctgggaggggagcctggctgccctgctgcttctcctgcctaataaacaggcttctcctgca

SEQ ID NO: 110671 - DNA, 578 bp, Homo sapiens
  Payload ID: 1701
  Gene Symbol: BAIAP2
  Gene Name: BAI1-associated protein 2
  ENST ID: ENST00000573659
  CDS Start-End: 236-578
gagatgctgggaggcccctcaggcggcggcaataccaagtaatgcctttagcctcctttgatcagctgtgacgggcgtcctggtctgagactgtgaagcaattggaaatagttctcccactccaggctcagcttggggatctgtggggaaatggcttcctactgcccagctctgcagtttccttgcccagggtgtgacgtatgcagccaaaggctactttgacgccctggtgaagatgggggagctggccagcgagagccagggctccaaagaactcggagacgttctcttccagatggctgaagtccacaggcagatccagaatcagctggaagaaatgctgaagtcttttcacaacgagctgcttacgcagctggagcagaaggtggagctggactccaggtatctgagtgctgcgctgaagaaataccagactgagcaaaggagcaaaggcgacgccctggacaagtgtcaggctgagctgaagaagcttcggaagaagagccagggcagcaagaatcctcagaagtactcggacaaggagctgcagtacatcgacgccatcagcaacaagcagg

SEQ ID NO: 110672 - DNA, 3622 bp, Homo sapiens
  Payload ID: 1702
  Gene Symbol: BAIAP2L1
  Gene Name: BAI1-associated protein 2-like 1
  Uniprot ID: Q9UHR4
  ENST ID: ENST00000005260
  CDS Start-End: 217-1752
ctcctctgctcctcgaagaaggccagggcggcgctgccgcaagttttgacattttcgcagcggagacgcgcgcgggcactctcgggccgacggctgcggcggcggccgaccctccagagccccttagtcgcgccccggccctcccgctgcccggagtccggcggccacgaggcccagccgcgtcctcccgcgcttgctcgcccggcggccgcagccatgtcccgggggcccgaggaggtgaaccggctcacggagagcacctaccggaatgttatggaacagttcaatcctgggctgcgaaatttaataaacctggggaaaaattatgagaaagctgtaaacgctatgatcctggcaggaaaagcctactacgatggagtggccaagatcggtgagattgccactgggtcccccgtgtcaactgaactgggacatgtcctcatagagatttcaagtacccacaagaaactcaacgagagtcttgatgaaaattttaaaaaattccacaaagagattatccatgagctggagaagaagatagaacttgacgtgaaatatatgaacgcaactctaaaaagataccaaacagaacacaagaataaattagagtctttggagaaatcccaagctgagttgaagaagatcagaaggaaaagccaaggaagccgaaacgcactcaaatatgaacacaaagaaattgagtatgtggagaccgttacttctcgtcagagtgaaatccagaaattcattgcagatggttgcaaagaggctctgcttgaagagaagaggcgcttctgctttctggttgataagcactgtggctttgcaaaccacatacattattatcacttacagtctgcagaactactgaattccaagctgcctcggtggcaggagacctgtgttgatgccatcaaagtgccagagaaaatcatgaatatgatcgaagaaataaagaccccagcctctacccccgtgtctggaactcctcaggcttcacccatgatcgagagaagcaatgtggttaggaaagattacgacaccctttctaaatgctcaccaaagatgccccccgctccttcaggcagagcatataccagtcccttgatcgatatgtttaataacccagccacggctgccccgaattcacaaagggtaaataattcaacaggtacttccgaagatcccagtttacagcgatcagtttcggttgcaacgggactgaacatgatgaagaagcagaaagtgaagaccatcttcccgcacactgcgggctccaacaagaccttactcagctttgcacagggagatgtcatcacgctgctcatccccgaggagaaggatggctggctctatggagaacacgacgtgtccaaggcgaggggttggttcccgtcgtcgtacacgaagttgctggaagaaaatgagacagaagcagtgaccgtgcccacgccaagccccacaccagtgagaagcatcagcaccgtgaacttgtctgagaatagcagtgttgtcatccccccacccgactacttggaatgcttgtccatgggggcagctgccgacaggagagcagattcggccaggacgacatccacctttaaggccccagcgtccaagcccgagaccgcggctcctaacgatgccaacgggactgcaaagccgccttttctcagcggagaaaacccctttgccactgtgaaactccgcccgactgtgacgaatgatcgctcggcacccatcattcgatgagaggacagccaaggactctcccgggcctctccggttctcccttgcggaatgatgggcgcatcctgtctgccacgtgctgacggtcgggaagcttcagtggagaggcctaactctaatgtcgcctgcttaagcaaatcatgcttctctgtttcacgtagttgggttgacaagtttctgcctttaagataaatgagtaatagtctaatgaccagctcagccatttaaaatattttcttcctattctgttcaagaaacagtaaacttggtttcaatctttactgtattttttaaatgaattttttccttaataacagccagaataagggatagtctatgctttcaggactggctttctgcacctgatatgaatgagaccagttttattttataaagcatgtgctcttaatagcattatgtctaaagaagatatcacgtaagtttgcatcttagcatgcaaatcataattttaagcaatataaattatgaaaatactatataaatgtaatttaacttaaaatgtttaagtgtagagcttccagagatggagaaacccccaccctccctccaaccacgccagagctgtagagtgctaagacgctttgcctgcccttatcacagccacacgtagcactcgacgaaatctcctccgagagctccttttcttggtagttaggagtcgccaacggattcgctgcacacggcccatccaggacacaggcctgggcgtcggagtcacggctccttgtgttctcactcagctagttggccaaagctgcatccattaccagtacactcaaactgctcggggtcctggtttctccgtgtttgaatcaggtacagactctcaaaggatacgtgtaaagccaggatgacctctggtgcctggagaagggcgggtttttcagcctagcagccatgatgccctcggaacctggccctatggtatggatgtgaggactacgcactggctgccctgagcccggggctggaaatcatctttggctgccaaggatctggacctattttggagtggagagtcatggttaaaattcccagcccggcccaggtacgggaatcccagcattttgtgaggccgaggcagggggatcacctgaggtcaggagtctctactaaaaatacaaaaattagacaggtgtggtggtgggcgccactcaggaggctgaggcaggagaatcacttgaacccgggaggcagaggttgcagtgagccagatcatgctgctgcactccagcccggccgctcaccgtgtgtgttgctgggtgctggggctgtgacttatcccctctcctttagccttgccataagtgtagtatcctatgaggctgagattgggaaaggttacatgcaggtaagccagtggacgtggccgatgcttcaggctccttccagccaggtccagcagtgttaccatctgcttctcctgggaggacaaaccaggcacccccaccatgaaggggctgcaggcaccatgaactatgttaacaaccccagtctgtactacagaaagggctgcagccacatgagaattcagtccacacaagccccatggccgtgttccccacttcagccacagggctcagggagccccatctggcgctaaggggaactgctggggtgtgggtgacacctggcctttggcgttctgccttggggaggtttctggttttgttacggggtggaagaataggacctgggggtctcggatgcaacctgcagaccccgtggctcacccaaccccaggttctgcctcccagaccagaacgggcatggcctggtccttggcaccgaggtgcctgctctgtaaatatcaagggattacaactttaataataaagcagaacttgaaaac

SEQ ID NO: 110673 - DNA, 2065 bp, Homo sapiens
  Payload ID: 1703
  Gene Symbol: BAIAP2L2
  Gene Name: BAI1-associated protein 2-like 2
  Uniprot ID: Q6UXY1
  ENST ID: ENST00000332536
  CDS Start-End: 121-1668
tccgaggcttcctcgctgccagctgagtcgtgggcacctgagggactacctaccactgctcccggctgtgccatcgccaccagctcccagcctcctgctcagacccgggacagcccctccatggcccccgagatggaccagttctacaggtccaccatggccatctacaagagcatcatggagcagtttaaccccgccctggagaacctggtgtacctgggcaacaactacctgcgtgccttccacgctctgtccgaggcggccgaggtctacttcagtgccatccagaagattggggagcgtgccctgcagagccccacctcacagattctgggggagatcttggtgcagatgtctgacacccagcggcacttgaactctgacctggaggtggtggtgcagacattccatggaggcctgctgcagcacatggagaagaacaccaagctggacatgcagttcatcaaagacagccgccagcactatgagctcgagtaccgccaccgagcggccaacctggagaagtgcatgtctgagctgtggcgcatggagcgcaagagagacaagaacgtgcgggagatgaaggagagtgtgaaccggctgcacgcacagatgcaggccttcgtgtctgagagtcagcgggcggctgaattggaagagaagcggcgctatcgcttcctagcagagaagcacctgctactttccaacaccttcctgcagttcttcggccgggcccgggggatgctccagaaccgcgtgctgctgtggaaggagcagtctgaggccagccgcagcccgtcgcgcgcccactcccccggcctgctgggccccgcgctggggccgccctacccctcgggccgcctgacgcccacctgcctggacatgcccccgaggcccctgggagagttcagctccccccgcagccggcacggctccggctcctacggcaccgagcccgacgcgaggcccgcgtcccagctagagccagaccgtcgctccctgccccgcacgccgtcggcctcctcgctctacagcggcagcgcccaaagctcgcgctccaactcctttggcgagcgcccgggcggcggcgggggcgccaggagagtccgcgccctggtctcccactcggagggcgccaaccacacgctgctgcgcttctccgctggggacgtggtggaggtgttggtgcccgaggcccagaacggctggctctacggcaagctggagggctcgtccgcgagcggttggttccccgaggcgtacgtgaaggctctggaggaggggcccgtgaatcccatgacccccgtgacccccatgacctccatgacctccatgtcccccatgacacccatgaaccccgggaacgagctgccttccaggtcctacccactccggggcagccacagcctcgatgacctcctggaccggccgggcaactccaccccaagccgggtgccaagccgtgcccccagccctgcacctccacccttgcccagcagccgccgcagcagcatgggcagcacagcagttgccactgacgtcaagaaactgatgtcctcagagcagtacccaccacaggagctcttcccgaggggcacaaatccttttgccactgtcaagcttcgtcccaccatcaccaatgaccgctcagcacccctcatccgctgaggcggggtccgaggtcgtaccccacagtgcacctgcccaggggctgttcagagctggcaatggcagcgacagcagcaacagcagcagatccaagaagcgggtccctgagacggggggtggctgccctccccagaccaccccggcagcctgagcagctccaaagcactggcttggggtccgagaccttcaaagtaaagcaggcggaatggggggacaggacaatttctccccctccaggggctccaggactctccctggggggcccacctcttgccccctaacctctttcccccttttctgcccccgtggggaggagccccttgtacctgctccgtgcccaacacatgccctctctgtacatcttttgtaaatgatgagaaataaaggaagtggacgc

SEQ ID NO: 110674 - DNA, 2146 bp, Homo sapiens
  Payload ID: 1703
  Gene Symbol: BAIAP2L2
  Gene Name: BAI1-associated protein 2-like 2
  Uniprot ID: Q6UXY1
  ENST ID: ENST00000381669
  CDS Start-End: 146-1735
gcaggcctccatctccaggtccctctccgaggcttcctcgctgccagctgagtcgtgggcacctgagggactacctaccactgctcccggctgtgccatcgccaccagctcccagcctcctgctcagacccgggacagcccctccatggcccccgagatggaccagttctacaggtccaccatggccatctacaagagcatcatggagcagtttaaccccgccctggagaacctggtgtacctgggcaacaactacctgcgtgccttccacgctctgtccgaggcggccgaggtctacttcagtgccatccagaagattggggagcgtgccctgcagagccccacctcacagattctgggggagatcttggtgcagatgtctgacacccagcggcacttgaactctgacctggaggtggtggtgcagacattccatggaggcctgctgcagcacatggagaagaacaccaagctggacatgcagttcatcaaagacagccgccagcactatgagctcgagtaccgccaccgagcggccaacctggagaagtgcatgtctgagctgtggcgcatggagcgcaagagagacaagaacgtgcgggagatgaaggagagtgtgaaccggctgcacgcacagatgcaggccttcgtgtctgagagtcagcgggcggctgaattggaagagaagcggcgctatcgcttcctagcagagaagcacctgctactttccaacaccttcctgcagttcttcggccgggcccgggggatgctccagaaccgcgtgctgctgtggaaggagcagtctgaggccagccgcagcccgtcgcgcgcccactcccccggcctgctgggccccgcgctggggccgccctacccctcgggccgcctgacgcccacctgcctggacatgcccccgaggcccctgggagagttcagctccccccgcagccggcacggctccggctcctacggcaccgagcccgacgcgaggcccgcgtcccagctagagccagaccgtcgctccctgccccgcacgccgtcggcctcctcgctctacagcggcagcgcccaaagctcgcgctccaactcctttggcgagcgcccgggcggcggcgggggcgccaggagagtccgcgccctggtctcccactcggagggcgccaaccacacgctgctgcgcttctccgctggggacgtggtggaggtgttggtgcccgaggcccagaacggctggctctacggcaagctggagggctcgtccgcgagcggttggttccccgaggcgtacgtgaaggctctggaggaggggcccgtgaatcccatgacccccgtgacccccatgacctccatgacctccatgtcccccatgacacccatgaaccccgggaacgagctgccttccaggtcctacccactccggggcagccacagcctcgatgacctcctggaccggccgggcaactccatagcaccctcggagtactgggatggccagtcccgctcccgcaccccaagccgggtgccaagccgtgcccccagccctgcacctccacccttgcccagcagccgccgcagcagcatgggcagcacagcagttgccactgacgtcaagaaactgatgtcctcagagcagtacccaccacaggagctcttcccgaggggcacaaatccttttgccactgtcaagcttcgtcccaccatcaccaatgaccgctcagcacccctcatccgctgaggcggggtccgaggtcgtaccccacagtgcacctgcccaggggctgttcagagctggcaatggcagcgacagcagcaacagcagcagatccaagaagcgggtccctgagacggggggtggctgccctccccagaccaccccggcagcctgagcagctccaaagcactggcttggggtccgagaccttcaaagtaaagcaggcggaatggggggacaggacaatttctccccctccaggggctccaggactctccctggggggcccacctcttgccccctaacctctttcccccttttctgcccccgtggggaggagccccttgtacctgctccgtgcccaacacatgccctctctgtacatcttttgtaaatgatgagaaataaaggaagtggacgcaaagtgatgcggca

SEQ ID NO: 110675 - DNA, 751 bp, Homo sapiens
  Payload ID: 1703
  Gene Symbol: BAIAP2L2
  Gene Name: BAI1-associated protein 2-like 2
  ENST ID: ENST00000428572
  CDS Start-End: 1-591
agctcgcgctccaactcctttggcgagcgcccgggcggcggcgggggcgccaggagagtccgcgccctggtctcccactcggagggcgccaaccacacgctgctgcgcttctccgctggggacgtggtggaggtgttggtgcccgaggcccagaacggctggctctacggcaagctggagggctcgtccgcgagcggttggttccccgaggcgtacgtgaaggctctggaggaggggcccgtgaatcccatgacccccgtgacccccatgacctccatgacctccatgtcccccatgacacccatgaaccccgggaacgagctgccttccaggtcctacccactccggggcagccacagcctcgatgacctcctggaccggccgggcaactccatagcaccctcggagtactgggatggccagtcccgctcccgcaccccaagccgggtgccaagccgtgcccccagccctgcacctccacccttgcccagcagccgccgcagcagcatgggcagcacagcagttgccactgacgtcaaggggcacaaatccttttgccactgtcaagcttcgtcccaccatcaccaatgaccgctcagcacccctcatccgctgaggcggggtccgaggtcgtaccccacagtgcacctgcccaggggctgttcagagctggcaatggcagcgacagcagcaacagcagcagatccaagaagcgggtccctgagacggggggtggctgccctccccagac

SEQ ID NO: 110676 - DNA, 4678 bp, Homo sapiens
  Payload ID: 1704
  Gene Symbol: BAIAP3
  Gene Name: BAI1-associated protein 3
  Uniprot ID: O94812
  ENST ID: ENST00000324385
  CDS Start-End: 159-3722
agacacgggcgaggggaggaagaaggcgcctcgggctccggtctcctgcgctcctgctgggcgccagcggctggaccttggcagccgtctgaggcttcggggagcccaaggccaccggcagcgcttgttagaatgcagattcccggggttcgactggaatgagaccccggggagcagcgtttgcagcgggcccgccaggtgacctgcacctgggcaccgccatcggcttcgcaggggccatctggaggagtcggtcacccgccatgtcgaccttgctggacattaagagcagcgtgctcaggcaggtgcaggtgtgcccgtccttccgccgcaggactgagcaggacccagggagtgccagcgccgacccgcaggagcctgccacgggggcctggaaacccggggatggcgtggagttctttgcccacatgcgcctcatgctgaagaagggggaaggcagacagggcttgccgtgcctcgaggtccccctgcgcagtggctcgccagcacccccggagcctgtggatcccagcctcggcctgagagccctggccccagaggaggtggagatgctctacgaggaggccctgtacacggtgctttaccgcgcgggtaccatgggccctgaccaggtggacgacgaggaggccctgctcagctatctccagcaggtgtttggcaccagccttgaggagcacactgaggccatcgagcgagtgaggaaggccaaggcccccacgtatgccctgaaagtctctgtcatgcgtgccaagaaccttctggccaaggaccccaacggcttcagcgacccatactgcatgctgggcatcctgcctgcctcggacgccacgcgggagccccgtgcacagaaggagcagcgcttcggcttccgcaagggcagcaagcgcggtggacccctgcctgccaagtgcatccaggtcaccgaggtgaagagcagcaccctgaaccccgtctggaaggagcacttcctcttcgagattgaggatgtgagcacggaccagctgcacctggacatctgggatcatgacgacgatgtatccctggtagaagcgtgcaggaagctgaatgaagtcatcggcctgaagggcatgggcaggtacttcaaacagatcgtcaagtcagcccgcgcaaacgggacagcaggacccaccgaggaccacaccgatgacttcctggggtgcctcaacatacctgtccgggaggtgcctgtggctggcgtcgaccgctggttcaagctggagccacgctccagtgcctcgcgtgtgcagggacactgccacctggttctcaagctgatcactacgcagagggatacggccatgagccagcgcgggcgatccggcttcctgtcccacctgctgctgctcagccatctgctgcggttggagcactcagcagaggagcccaactccagcagctggcgaggagagctcagcacaccagccgccaccatcctctgcctgcacggagcccagagcaacctgtcacccttgcagctggccgtgctgcactggcaggtcagcagccgccaccatcaaacctgcacgctggactacagctacctgctggggctgctggaggacatgcaggcacactgggaagaggctccttcactgccccaggagcaggaggagagcctggctgatagcctttccgccttctctgagttcgggctgcagctgctgcgccagctccgagactacttccctgccaccaacagcaccgctgtccaccgcctggagctgctgctgaagtgtctgggcaagctgcagctcttccaaccctcctttgagatctgccccttcgagtcggagctgaacatggacattgctgcggccctgaagagaggcaaccgtgagtggtacgacaggatcctgaatgacaagagtccccgagagcagccaggaccacagcgcctgcctgggctggttgtgctggctgacgccgtctatgatgaccttcagttctgctacagtgtgtacgccagcctcttccacagcatcctcaatgtggacgtcttcaccctgaccttccggcagctggagcgtctggtggctgaggaggcgtgggtgctgacggaggagctgagccccaagatgaccctggaggtggcctcggggctctttgagctctacctgaccctggctgacctccagcgcttctgggatagcatccctggccgggacagccgctctctggccctggctggcatccacgcccccttcctgcctgctgtgaagctctggttccaagtgctgagggaccaggccaagtggaggcttcagggagccgtggacatggacacgctggagcccgtggacgcctcctccaggcacagcagctccgcagccactgctggtctctgcctcagccacatccaggagttgtgggtgcgcctggcgtggcctgaccctgcccaggctcaggggctgggcacccagcttggccaggacgtgtgtgaggccaccctcttctatacggagctgcttcggaagaaggtggacactcagccaggggcggccggtgaagcagtgagcgaggcgctctgcgtggtcctcaacaatgtggagctcgtgcgcaaggctgctgggcaggccttgaagggcctggcatggccagagggggccacggggcccgagggggtgctcccccgccctctgctcagctgcacacaggccctggacgatgatctgcaacgggaggcccacacggtgacagcgcacctgacctctaagatggtgggcgacatccgcaagtatgtacagcacatcagtctctcgcctgactccatccagaacgatgaggccgtggccccgctcatgaagtacctggatgagaagctggccctgctgaacgcctcgctggtgaaggggaacctgagcagggtgctggaggccctgtgggagctactcctccaggccattctgcaggcgctgggtgcaaaccgtgacgtctctgctgatttctacagccgcttccatttcacgctggaggccctggtcagttttttccacgcagagggtcagggtttgcccctggagagcctgagggatggaagctacaagaggctgaaggaggagctgcggctgcacaaatgttccacccgcgagtgcatcgagcagttctacctggacaagctcaaacagaggaccctggagcagaaccggtttggacgcctgagcgtccgttgccattacgaggcggctgagcagcggctggccgtggaggtgctgcacgccgcggacctgctccccctggacgccaacggcttaagtgacccctttgtgatcgtggagctgggcccaccgcatctctttccactggtccgcagccagaggacccaggtgaagacccggacgctgcaccctgtatacgacgaactcttctacttttccgtgcctgccgaggcgtgccgccgccgcgcggcctgtgtgttgttcaccgtcatggaccacgactggctgtccaccaacgacttcgctggggaggcggccctcggcctaggtggcgtcactggtgtcgcccggccccaggtgggcgggggtgcaagggctgggcagcctgtcaccctgcacctgtgccggcccagagcccaggtgagatctgcgctgaggaggctggaaggccgcaccagcaaggaggcgcaggagttcgtgaagaaactcaaggagctggagaagtgcatggaggcggacccctgagtccatcagctgccagccccggccctggcccccaccccaagttccctgaagcatcctccagctcactgtggccagctttgtgcaaccagggcccacggcgcccctcctgtgctgtgacgtgtgtgtcgtggctggccccgcggcgcctaccgccctggccgtgtctgtctggtgtgtgctgtgaacccctgcacccaaccccacatctgggtggccaacttggcaggacttggccagcagctgcccaggacacagtgcaggccagagcgggcttgaccacctggtgggcctccctgcccgcttccttgggctccccggccctgggtgggcggtgggcagctggtctccagggactcagtgagtggctgtgctctctgcacaacgggcaatgtgcagacgcatttttggtaatcacagctggggagtgaaaagggtgccactggcaccactgggtggatggtccagagcctccacccacagaggggatgcaaagggcaggtgagtcaagaaccgcataggtctccagtccccacggggctcccaggccggggaaaggttcccctgaggtcactctgaggccagggacgtcacccaaggctggtggtcagtgtgaagggctccgtgccaactggtcagctgtccttcacgcacatatccgtggccacctgagacctgctccacgacccttccaggcagagccgagagttcgccccaacccttccccaggcccagtgtgaaaaacagactcacaaggggcttcttggcctgcagcttcatttgcgagagcgccgaggcaggacacagagcacagctgtgctggaagtgtggggagaacccggacagctcagtcctgccagcagccgcaaagagccgaggctgccaggcccatttatgtccctcatgtctctagattttctcgtcacccagcctcaaaaatatatgtgtctgcaaccctc

SEQ ID NO: 110677 - DNA, 4583 bp, Homo sapiens
  Payload ID: 1704
  Gene Symbol: BAIAP3
  Gene Name: BAI1-associated protein 3
  Uniprot ID: O94812
  ENST ID: ENST00000397488
  CDS Start-End: 118-3627
tcagtcgtcggcgcgcgcggctgggagcggtagctgtgcctcggcgtccccgagctggtgccgagcgcagcgccccaggagcccccccatccccgcgccggcccacggtcacccgccatgtcgaccttgctggacattaagagcagcgtgctcaggcaggtgcaggtgtgcccgtccttccgccgcaggactgagcaggacccagggagtgccagcgccgacccgcaggagcctgccacgggggcctggaaacccggggatggcgtggagttctttgcccacatgcgcctcatgctgaagaagggggaaggcagacagggcttgccgtgcctcgaggcctggggctctccctgccgtcagagccctcaccctgggccccacacacaggtccccctgcgcagtggctcgccagcacccccggagcctgtggatcccagcctcggcctgagagccctggccccagaggaggtggagatgctctacgaggaggccctgtacacggtgctttaccgcgcgggtaccatgggccctgaccaggtggacgacgaggaggccctgctcagctatctccagcaggtgtttggcaccagccttgaggagcacactgaggccatcgagcgagtgaggaaggccaaggcccccacgtatgccctgaaagtctctgtcatgcgtgccaagaaccttctggccaaggaccccaacggcttcagcgacccatactgcatgctgggcatcctgcctgcctcggacgccacgcgggagccccgtgcacagaaggagcagcgcttcggcttccgcaagggcagcaagcgcggtggacccctgcctgccaagtgcatccaggtcaccgaggtgaagagcagcaccctgaaccccgtctggaaggagcacttcctcttcgagattgaggatgtgagcacggaccagctgcacctggacatctgggatcatgacgacgatgtatccctggtagaagcgtgcaggaagctgaatgaagtcatcggcctgaagggcatgggcaggtacttcaaacagatcgtcaagtcagcccgcgcaaacgggacagcaggacccaccgaggaccacaccgatgacttcctggggtgcctcaacatacctgtccgggaggtgcctgtggctggcgtcgaccgctggttcaagctggagccacgctccagtgcctcgcgtgtgcagggacactgccacctggttctcaagctgatcactacgcagagggatacggccatgagccagcgcgggcgatccggcttcctgtcccacctgctgctgctcagccatctgctgcggttggagcactcagcagaggagcccaactccagcagctggcgaggagagctcagcacaccagccgccaccatcctctgcctgcacggagcccagagcaacctgtcacccttgcagctggccgtgctgcactggcaggtcagcagccgccaccatcaaacctgcacgctggactacagctacctgctggggctgctggaggacatgcaggcacactgggaagaggctccttcactgccccaggagcaggaggagagcctggctgatagcctttccgccttctctgagttcgggctgcagctgctgcgccagctccgagactacttccctgccaccaacagcaccgctgtccaccgcctggagctgctgctgaagtgtctgggcaagctgcagctcttccaaccctcctttgagatctgccccttcgagtcggagctgaacatggacattgctgcggccctgaagagaggcaaccgtgagtggtacgacaggatcctgaatgacaagagtccccgagagcagccaggaccacagcgcctgcctgggctggttgtgctggctgacgccgtctatgatgaccttcagttctgctacagtgtgtacgccagcctcttccacagcatcctcaatgtggacgtcttcaccctgaccttccggcagctggagcgtctggtggctgaggaggcgtgggtgctgacggaggagctgagccccaagatgaccctggaggtggcctcggggctctttgagctctacctgaccctggctgacctccagcgcttctgggatagcatccctggccgggacagccgctctctggccctggctggcatccacgcccccttcctgcctgctgtgaagctctggttccaagtgctgagggaccaggccaagtggaggcttcagggagccgtggacatggacacgctggagcccgtggacgcctcctccaggcacagcagctccgcagccactgctggtctctgcctcagccacatccaggagttgtgggtgcgcctggcgtggcctgaccctgcccaggctcaggggctgggcacccagcttggccaggacgtgtgtgaggccaccctcttctatacggagctgcttcggaagaaggtggacactcagccaggggcggccggtgaagcagtgagcgaggcgctctgcgtggtcctcaacaatgtggagctcgtgcgcaaggctgctgggcaggccttgaagggcctggcatggccagagggggccacggggcccgagggggtgctcccccgccctctgctcagctgcacacaggccctggacgatgatctgcaacgggaggcccacacggtgacagcgcacctgacctctaagatggtgggcgacatccgcaagtatgtacagcacatcagtctctcgcctgactccatccagaacgatgaggccgtggccccgctcatgaagtacctggatgagaagctggccctgctgaacgcctcgctggtgaaggggaacctgagcagggtgctggaggccctgtgggagctactcctccaggccattctgcaggcgctgggtgcaaaccgtgacgtctctgctgatttctacagccgcttccatttcacgctggaggccctggtcagttttttccacgcagagggtcagggtttgcccctggagagcctgagggatggaagctacaagaggctgaaggaggagctgcggctgcacaaatgttccacccgcgagtgcatcgagcagttctacctggacaagctcaaacagaggaccctggagcagaaccggtttggacgcctgagcgtccgttgccattacgaggcggctgagcagcggctggccgtggaggtgctgcacgccgcggacctgctccccctggacgccaacggcttaagtgacccctttgtgatcgtggagctgggcccaccgcatctctttccactggtccgcagccagaggacccaggtgaagacccggacgctgcaccctgtatacgacgaactcttctacttttccgtgcctgccgaggcgtgccgccgccgcgcggcctgtgtgttgttcaccgtcatggaccacgactggctgtccaccaacgacttcgctggggaggcggccctcggcctaggtggcgtcactggtgtcgcccggccccaggtgggcgggggtgcaagggctgggcagcctgtcaccctgcacctgtgccggcccagagcccaggtgagatctgcgctgaggaggctggaaggccgcaccagcaaggaggcgcaggagttcgtgaagaaactcaaggagctggagaagtgcatggaggcggacccctgagtccatcagctgccagccccggccctggcccccaccccaagttccctgaagcatcctccagctcactgtggccagctttgtgcaaccagggcccacggcgcccctcctgtgctgtgacgtgtgtgtcgtggctggccccgcggcgcctaccgccctggccgtgtctgtctggtgtgtgctgtgaacccctgcacccaaccccacatctgggtggccaacttggcaggacttggccagcagctgcccaggacacagtgcaggccagagcgggcttgaccacctggtgggcctccctgcccgcttccttgggctccccggccctgggtgggcggtgggcagctggtctccagggactcagtgagtggctgtgctctctgcacaacgggcaatgtgcagacgcatttttggtaatcacagctggggagtgaaaagggtgccactggcaccactgggtggatggtccagagcctccacccacagaggggatgcaaagggcaggtgagtcaagaaccgcataggtctccagtccccacggggctcccaggccggggaaaggttcccctgaggtcactctgaggccagggacgtcacccaaggctggtggtcagtgtgaagggctccgtgccaactggtcagctgtccttcacgcacatatccgtggccacctgagacctgctccacgacccttccaggcagagccgagagttcgccccaacccttccccaggcccagtgtgaaaaacagactcacaaggggcttcttggcctgcagcttcatttgcgagagcgccgaggcaggacacagagcacagctgtgctggaagtgtggggagaacccggacagctcagtcctgccagcagccgcaaagagccgaggctgccaggcccatttatgtccctcatgtctctagattttctcgtcacccagcctcaaaaatatatgtgtctgcaaccctc

SEQ ID NO: 110678 - DNA, 3930 bp, Homo sapiens
  Payload ID: 1704
  Gene Symbol: BAIAP3
  Gene Name: BAI1-associated protein 3
  Uniprot ID: O94812
  ENST ID: ENST00000426824
  CDS Start-End: 160-3618
agtcagaccccgcccccgcagcggcgtccgcccagcagttgctcagtcgtcggcgcgcgcggctgggagcggtagctgtgcctcggcgtccccgagctggtgccgagcgcagcgccccaggagcccccccatccccgcgccggcccacggtcacccgccatgtcgaccttgctggacattaagagcagcgtgctcaggcaggtgcaggtgtgcccgtccttccgccgcaggactgagcaggacccagggagtgccagcgccgacccgcaggagcctgccacgggggcctggaaacccggggatggcgtggagttctttgcccacatgcgcctcatgctgaagaagggggaaggcagacagggcttgccgtgcctcgaggtccccctgcgcagtggctcgccagcacccccggagcctgtggatcccagcctcggcctgagagccctggccccagaggaggtggagatgctctacgaggaggccctgtacacggtgctttaccgcgcgggtaccatgggccctgaccaggtggacgacgaggaggccctgctcagctatctccagcaggtgtttggcaccagccttgaggagcacactgaggccatcgagcgagtgaggaaggccaaggcccccacgtatgccctgaaagtctctgtcatgcgtgccaagaaccttctggccaaggaccccaacggcttcagcgacccatactgcatgctgggcatcctgcctgcctcggacgccacgcgggagccccgtgcacagaaggagcagcgcttcggcttccgcaagggcagcaagcgcggtggacccctgcctgccaagtgcatccaggtcaccgaggtgaagagcagcaccctgaaccccgtctggaaggagcacttcctcttcgagattgaggatgtgagcacggaccagctgcacctggacatctgggatcatgacgacgatgtatccctggtagaagcgtgcaggaagctgaatgaagtcatcggcctgaagggcatgggcaggtacttcaaacagatcgtcaagtcagcccgcgcaaacgggacagcaggacccaccgaggaccacaccgatgacttcctggggtgcctcaacatacctgtccgggaggtgcctgtggctggcgtcgaccgctggttcaagctggagccacgctccagtgcctcgcgtgtgcagggacactgccacctggttctcaagctgatcactacgcagagggatacggccatgagccagcgcgggcgatccggcttcctgtcccacctgctgctgctcagccatctgctgcggttggagcactcagcagaggagcccaactccagcagctggcgaggagagctcagcacaccagccgccaccatcctctgcctgcacggagcccagagcaacctgtcacccttgcagctggccgtgctgcactggcaggtcagcagccgccaccatcaaacctgcacgctggactacagctacctgctggggctgctggaggacatgcaggcacactgggaagaggctccttcactgccccaggagcaggaggagagcctggctgatagcctttccgccttctctgagttcgggctgcagctgctgcgccagctccgagactacttccctgccaccaacagcaccgctgtccaccgcctggagctgctgctgaagtgtctgggcaagctgcagctcttccaaccctcctttgagatctgccccttcgagtcggagctgaacatggacattgctgcggccctgaagagaggcaaccgtgagtggtacgacaggatcctgaatgacaagagtccccgagagcagccaggaccacagcgcctgcctgggctggttgtgctggctgacgccgtctatgatgaccttcagttctgctacagtgtgtacgccagcctcttccacagcatcctcaatgtggacgtcttcaccctgaccttccggcagctggagcgtctggtggctgaggaggcgtgggtgctgacggaggagctgagccccaagatgaccctggaggtggcctcggggctctttgagctctacctgaccctggctgacctccagcgcttctgggatagcatccctggccgggacagccgctctctggccctggctggcatccacgcccccttcctgcctgctgtgaagctctggttccaagtgctgagggaccaggccaagtggaggcttcagggagccgtggacatggacacgctggagcccgtggacgcctcctccaggcacagcagctccgcagccactgctggtctctgcctcagccacatccaggagttgtgggtgcgcctggcgtggcctgaccctgcccaggctcaggggctgggcacccagcttggccaggacgtgtgtgaggccaccctcttctatacggagctgcttcggaagaaggtggacactcagccaggggcggccggtgaagcagtgagcgaggcgctctgcgtggtcctcaacaatgtggagctcgtgcgcaaggctgctgggcaggccttgaagggcctggcatggccagagggggccacggggcccgagggggtgctcccccgccctctgctcagctgcacacaggccctggacgatgatctgcaacgggaggcccacacggtgacagcgcacctgacctctaagatggtgggcgacatccgcaagtatgtacagcacatcagtctctcgcctgactccatccagaacgatgaggccgtggccccgctcatgaagtacctggatgagaagctggccctgctgaacgcctcgctggtgaaggggaacctgagcagggtgctggaggccctgtgggagctactcctccaggccattctgcaggcgctgggtgcaaaccgtgacgtctctgctgatttctacagccgcttccatttcacgctggaggccctggtcagttttttccacgcagagggtcagggtttgcccctggagagcctgagggatggaagctacaagaggctgaaggaggagctgcggctgcacaaatgttccacccgcgagtgcatcgagcagttctacctggacaagctcaaacagaggaccctggagcagaaccggtttggacgcctgagcgtccgttgccattacgaggcggctgagcagcggctggccgtggaggtgctgcacgccgcggacctgctccccctggacgccaacggcttaagtgacccctttgtgatcgtggagctgggcccaccgcatctctttccactggtccgcagccagaggacccaggtgaagacccggacgctgcaccctgtatacgacgaactcttctacttttccgtgcctgccgaggcgtgccgccgccgcgcggcctgtgtgttgttcaccgtcatggaccacgactggctgtccaccaacgacttcgctggggaggcggccctcggcctaggtggcgtcactggtgtcgcccggccccaggtgggcgggggtgcaagggctgggcagcctgtcaccctgcacctgtgccggcccagagcccaggtgagatctgcgctgaggaggctggaaggccgcaccagcaaggaggcgcaggagttcgtgaagaaactcaaggagctggagaagtgcatggaggcggacccctgagtccatcagctgccagccccggccctggcccccaccccaagttccctgaagcatcctccagctcactgtggccagctttgtgcaaccagggcccacggcgcccctcctgtgctgtgacgtgtgtgtcgtggctggccccgcggcgcctaccgccctggccgtgtctgtctggtgtgtgctgtgaacccctgcacccaaccccacatctgggtggccaacttggcaggacttggccagcagctgcccaggacacagtgcaggccagagcgggcttgaccacctggtgggcctccctgcccgcttccttgggct

SEQ ID NO: 110679 - DNA, 3875 bp, Homo sapiens
  Payload ID: 1704
  Gene Symbol: BAIAP3
  Gene Name: BAI1-associated protein 3
  Uniprot ID: O94812
  ENST ID: ENST00000421665
  CDS Start-End: 214-3564
actggcttcgggggacagcagggggagcagcctcttccacccagcaagggaggggaagggggcttgtgactcccaggcccctgaggatttcacgactggctgtgggggtgacagcttccagaagcactgtacccagcctaccaagcccccccatcttttgggggggaggctcacaggggaaggcactgataggtttgaaggaggtcacccgccatgtcgaccttgctggacattaagagcagcgtgctcaggcaggtgcaggtgtgcccgtccttccgccgcaggactgagcaggacccagggagtgccagcgccgacccgcaggagcctgccacgggggcctggaaacccggggatggcgtggagttctttgcccacatgcgcctcatgctgaagaagggggaaggcagacagggcttgccgtgcctcgaggtccccctgcgcagtggctcgccagcacccccggagcctgtggatcccagcctcggcctgagagccctggccccagaggaggtggagatgctctacgaggaggccctgtacacggtgctttaccgcgcgggtaccatgggccctgaccaggtggacgacgaggaggccctgctcagctatctccagcaggtgtttggcaccagccttgaggagcacactgaggccatcgagcgagtgaggaaggccaaggcccccacgtatgccctgaaagtctctgtcatgcgtgccaagaaccttctggccaaggaccccaacggcttcagcgacccatactgcatgctgggcatcctgcctgcctcggacgccacgcgggagccccgtgcacagaaggagcagcgcttcggcttccgcaagggcagcaagcgcggtggacccctgcctgccaagtgcatccaggtcaccgaggtgaagagcagcaccctgaaccccgtctggaaggagcacttcctcttcgagattgaggatgtgagcacggaccagctgcacctggacatctgggatcatgacgacgatgtatccctggtagaagcgtgcaggaagctgaatgaagtcatcggcctgaagggcatgggcaggtacttcaaacagatcgtcaagtcagcccgcgcaaacgggacagcaggacccaccgaggaccacaccgatgacttcctggggtgcctcaacatacctgtccggagggatacggccatgagccagcgcgggcgatccggcttcctgtcccacctgctgctgctcagccatctgctgcggttggagcactcagcagaggagcccaactccagcagctggcgaggagagctcagcacaccagccgccaccatcctctgcctgcacggagcccagagcaacctgtcacccttgcagctggccgtgctgcactggcaggtcagcagccgccaccatcaaacctgcacgctggactacagctacctgctggggctgctggaggacatgcaggcacactgggaagaggctccttcactgccccaggagcaggaggagagcctggctgatagcctttccgccttctctgagttcgggctgcagctgctgcgccagctccgagactacttccctgccaccaacagcaccgctgtccaccgcctggagctgctgctgaagtgtctgggcaagctgcagctcttccaaccctcctttgagatctgccccttcgagtcggagctgaacatggacattgctgcggccctgaagagaggcaaccgtgagtggtacgacaggatcctgaatgacaagagtccccgagagcagccaggaccacagcgcctgcctgggctggttgtgctggctgacgccgtctatgatgaccttcagttctgctacagtgtgtacgccagcctcttccacagcatcctcaatgtggacgtcttcaccctgaccttccggcagctggagcgtctggtggctgaggaggcgtgggtgctgacggaggagctgagccccaagatgaccctggaggtggcctcggggctctttgagctctacctgaccctggctgacctccagcgcttctgggatagcatccctggccgggacagccgctctctggccctggctggcatccacgcccccttcctgcctgctgtgaagctctggttccaagtgctgagggaccaggccaagtggaggcttcagggagccgtggacatggacacgctggagcccgtggacgcctcctccaggcacagcagctccgcagccactgctggtctctgcctcagccacatccaggagttgtgggtgcgcctggcgtggcctgaccctgcccaggctcaggggctgggcacccagcttggccaggacgtgtgtgaggccaccctcttctatacggagctgcttcggaagaaggtggacactcagccaggggcggccggtgaagcagtgagcgaggcgctctgcgtggtcctcaacaatgtggagctcgtgcgcaaggctgctgggcaggccttgaagggcctggcatggccagagggggccacggggcccgagggggtgctcccccgccctctgctcagctgcacacaggccctggacgatgatctgcaacgggaggcccacacggtgacagcgcacctgacctctaagatggtgggcgacatccgcaagtatgtacagcacatcagtctctcgcctgactccatccagaacgatgaggccgtggccccgctcatgaagtacctggatgagaagctggccctgctgaacgcctcgctggtgaaggggaacctgagcagggtgctggaggccctgtgggagctactcctccaggccattctgcaggcgctgggtgcaaaccgtgacgtctctgctgatttctacagccgcttccatttcacgctggaggccctggtcagttttttccacgcagagggtcagggtttgcccctggagagcctgagggatggaagctacaagaggctgaaggaggagctgcggctgcacaaatgttccacccgcgagtgcatcgagcagttctacctggacaagctcaaacagaggaccctggagcagaaccggtttggacgcctgagcgtccgttgccattacgaggcggctgagcagcggctggccgtggaggtgctgcacgccgcggacctgctccccctggacgccaacggcttaagtgacccctttgtgatcgtggagctgggcccaccgcatctctttccactggtccgcagccagaggacccaggtgaagacccggacgctgcaccctgtatacgacgaactcttctacttttccgtgcctgccgaggcgtgccgccgccgcgcggcctgtgtgttgttcaccgtcatggaccacgactggctgtccaccaacgacttcgctggggaggcggccctcggcctaggtggcgtcactggtgtcgcccggccccaggtgggcgggggtgcaagggctgggcagcctgtcaccctgcacctgtgccggcccagagcccaggtgagatctgcgctgaggaggctggaaggccgcaccagcaaggaggcgcaggagttcgtgaagaaactcaaggagctggagaagtgcatggaggcggacccctgagtccatcagctgccagccccggccctggcccccaccccaagttccctgaagcatcctccagctcactgtggccagctttgtgcaaccagggcccacggcgcccctcctgtgctgtgacgtgtgtgtcgtggctggccccgcggcgcctaccgccctggccgtgtctgtctggtgtgtgctgtgaacccctgcacccaaccccacatctgggtggccaacttggcaggacttggccagcagctgcccaggacacagtgcaggccagagcgggcttgaccacctggtgggcctccctgcccgcttccttgggc

SEQ ID NO: 110680 - DNA, 571 bp, Homo sapiens
  Payload ID: 1704
  Gene Symbol: BAIAP3
  Gene Name: BAI1-associated protein 3
  ENST ID: ENST00000561793
  CDS Start-End: 1-571
ctatacggagctgcttcggaagaaggtggacactcagccaggggcggccggtgaagcagtgagcgaggcgctctgcgtggtcctcaacaatgtggagctcgtgcgcaaggctgctgggcaggccttgaagggcctggcatggccagagggggccacggggcccgagggggtgctcccccgccctctgctcagctgcacacaggccctggacgatgatctgcaacgggaggcccacacggtgacagcgcacctgacctctaagatggtgggcgacatccgcaagtatgtacagcacatcagtctctcgcctgactccatccagaacgatgaggccgtggccccgctcatgaagtacctggatgagaagctggccctgctgaacgcctcgctggtgaaggggaacctgagcagccgcttccatttcacgctggaggccctggtcagttttttccacgcagagggtcagggtttgcccctggagagcctgagggatggaagctacaagaggctgaaggaggagctgcggctgcacaaatgttccacccgcgagtgcatcgagcagttctacctg

SEQ ID NO: 110681 - DNA, 3763 bp, Homo sapiens
  Payload ID: 1704
  Gene Symbol: BAIAP3
  Gene Name: BAI1-associated protein 3
  Uniprot ID: O94812
  ENST ID: ENST00000568887
  CDS Start-End: 116-3490
agtcgtcggcgcgcgcggctgggagcggtagctgtgcctcggcgtccccgagctggtgccgagcgcagcgccccaggagcccccccatccccgcgccggcccacggtcacccgccatgtcgaccttgctggacattaagagcagcgtgctcaggcaggtgcaggtgtgcccgtccttccgccgcaggactgagcaggacccagggagtgccagcgccgacccgcaggagcctgccacgggggcctggaaacccggggatggcgtggagttctttgcccacatgcgcctcatgctgaagaagggggaaggcagacagggcttgccgtgcctcgaggtccccctgcgcagtggctcgccagcacccccggagcctgtggatcccagcctcggcctgagagccctggccccagaggaggccctgctcagctatctccagcaggtgtttggcaccagccttgaggagcacactgaggccatcgagcgagtgaggaaggccaaggcccccacgtatgccctgaaagtctctgtcatgcgtgccaagaaccttctggccaaggaccccaacggcttcagcgacccatactgcatgctgggcatcctgcctgcctcggacgccacgcgggagccccgtgcacagaaggagcagcgcttcggcttccgcaagggcagcaagcgcggtggacccctgcctgccaagtgcatccaggtcaccgaggtgaagagcagcaccctgaaccccgtctggaaggagcacttcctcttcgagattgaggatgtgagcacggaccagctgcacctggacatctgggatcatgacgacgatgtatccctggtagaagcgtgcaggaagctgaatgaagtcatcggcctgaagggcatgggcaggtacttcaaacagatcgtcaagtcagcccgcgcaaacgggacagcaggacccaccgaggaccacaccgatgacttcctggggtgcctcaacatacctgtccgggaggtgcctgtggctggcgtcgaccgctggttcaagctggagccacgctccagtgcctcgcgtgtgcagggacactgccacctggttctcaagctgatcactacgcagagggatacggccatgagccagcgcgggcgatccggcttcctgtcccacctgctgctgctcagccatctgctgcggttggagcactcagcagaggagcccaactccagcagctggcgaggagagctcagcacaccagccgccaccatcctctgcctgcacggagcccagagcaacctgtcacccttgcagctggccgtgctgcactggcaggtcagcagccgccaccatcaaacctgcacgctggactacagctacctgctggggctgctggaggacatgcaggcacactgggaagaggctccttcactgccccaggagcaggaggagagcctggctgatagcctttccgccttctctgagttcgggctgcagctgctgcgccagctccgagactacttccctgccaccaacagcaccgctgtccaccgcctggagctgctgctgaagtgtctgggcaagctgcagctcttccaaccctcctttgagatctgccccttcgagtcggagctgaacatggacattgctgcggccctgaagagaggcaaccgtgagtggtacgacaggatcctgaatgacaagagtccccgagagcagccaggaccacagcgcctgcctgggctggttgtgctggctgacgccgtctatgatgaccttcagttctgctacagtgtgtacgccagcctcttccacagcatcctcaatgtggacgtcttcaccctgaccttccggcagctggagcgtctggtggctgaggaggcgtgggtgctgacggaggagctgagccccaagatgaccctggaggtggcctcggggctctttgagctctacctgaccctggctgacctccagcgcttctgggatagcatccctggccgggacagccgctctctggccctggctggcatccacgcccccttcctgcctgctgtgaagctctggttccaagtgctgagggaccaggccaagtggaggcttcagggagccgtggacatggacacgctggagcccgtggacgcctcctccaggcacagcagctccgcagccactgctggtctctgcctcagccacatccaggagttgtgggtgcgcctggcgtggcctgaccctgcccaggctcaggggctgggcacccagcttggccaggacgtgtgtgaggccaccctcttctatacggagctgcttcggaagaaggtggacactcagccaggggcggccggtgaagcagtgagcgaggcgctctgcgtggtcctcaacaatgtggagctcgtgcgcaaggctgctgggcaggccttgaagggcctggcatggccagagggggccacggggcccgagggggtgctcccccgccctctgctcagctgcacacaggccctggacgatgatctgcaacgggaggcccacacggtgacagcgcacctgacctctaagatggtgggcgacatccgcaagtatgtacagcacatcagtctctcgcctgactccatccagaacgatgaggccgtggccccgctcatgaagtacctggatgagaagctggccctgctgaacgcctcgctggtgaaggggaacctgagcagggtgctggaggccctgtgggagctactcctccaggccattctgcaggcgctgggtgcaaaccgtgacgtctctgctgatttctacagccgcttccatttcacgctggaggccctggtcagttttttccacgcagagggtcagggtttgcccctggagagcctgagggatggaagctacaagaggctgaaggaggagctgcggctgcacaaatgttccacccgcgagtgcatcgagcagttctacctggacaagctcaaacagaggaccctggagcagaaccggtttggacgcctgagcgtccgttgccattacgaggcggctgagcagcggctggccgtggaggtgctgcacgccgcggacctgctccccctggacgccaacggcttaagtgacccctttgtgatcgtggagctgggcccaccgcatctctttccactggtccgcagccagaggacccaggtgaagacccggacgctgcaccctgtatacgacgaactcttctacttttccgtgcctgccgaggcgtgccgccgccgcgcggcctgtgtgttgttcaccgtcatggaccacgactggctgtccaccaacgacttcgctggggaggcggccctcggcctaggtggcgtcactggtgtcgcccggccccaggtgggcgggggtgcaagggctgggcagcctgtcaccctgcacctgtgccggcccagagcccaggtgagatctgcgctgaggaggctggaaggccgcaccagcaaggaggcgcaggagttcgtgaagaaactcaaggagctggagaagtgcatggaggcggacccctgagtccatcagctgccagccccggccctggcccccaccccaagttccctgaagcatcctccagctcactgtggccagctttgtgcaaccagggcccacggcgcccctcctgtgctgtgacgtgtgtgtcgtggctggccccgcggcgcctaccgccctggccgtgtctgtctggtgtgtgctgtgaacccctgcacccaaccccacatctgggtggccaacttggcaggacttggccagcagctgcccaggacacagtgcaggccagagcgggct

SEQ ID NO: 110682 - DNA, 699 bp, Homo sapiens
  Payload ID: 1704
  Gene Symbol: BAIAP3
  Gene Name: BAI1-associated protein 3
  ENST ID: ENST00000566162
  CDS Start-End: 1-653
gctacagtgtgtacgccagcctcttccacagcatcctcaatgtggacgtcttcaccctgaccttccggcagctggagcgtctggtggctgaggaggcgtgggtgctgacggaggagctgagccccaagatgaccctggaggtggcctcggggctctttgagctctacctgaccctggctgacctccagcgcttctgggatagcatccctggccgggacagccgctctctggccctggctggcatccacgcccccttcctgcctgctgtgaagctctggttccaagtgctgagggaccaggccaagtggaggcttcagggagccgtggacatggacacgctggagcccgtggacgcctcctccaggcacagcagctccgcagccactgctggtctctgcctcagccacatccaggagttgtgggtgcgcctggcgtggcctgaccctgcccaggctcaggggctgggcacccagcttggccaggacgtgtgtgaggccaccctcttctatacggagctgcttcggaagaaggtggacactcagccaggggcggccggtgaagcagtgagcgaggcgctctgcgtggtcctcaacaatgtggagctcgtgcgcaaggctgctgggcaggcccatttatgtccctcatgtctctagattttctcgtcacccagcctcaaaaatatatgtgtctgcaaccctc

SEQ ID NO: 110683 - DNA, 3663 bp, Homo sapiens
  Payload ID: 1704
  Gene Symbol: BAIAP3
  Gene Name: BAI1-associated protein 3
  Uniprot ID: O94812
  ENST ID: ENST00000562208
  CDS Start-End: 116-3505
agtcgtcggcgcgcgcggctgggagcggtagctgtgcctcggcgtccccgagctggtgccgagcgcagcgccccaggagcccccccatccccgcgccggcccacggtcacccgccatgtcgaccttgctggacattaagagcagcgtgctcaggcaggtgcaggtgtgcccgtccttccgccgcaggactgagcaggacccagggagtgccagcgccgacccgcaggagcctgccacgggggcctggaaacccggggatggcgtggagttctttgcccacatgcgcctcatgctgaagaagggggaaggcagacagggcttgccgtgcctcgaggtccccctgcgcagtggctcgccagcacccccggagcctgtggatcccagcctcggcctgagagccctggccccagaggaggtggacgacgaggaggccctgctcagctatctccagcaggtgtttggcaccagccttgaggagcacactgaggccatcgagcgagtgaggaaggccaaggcccccacgtatgccctgaaagtctctgtcatgcgtgccaagaaccttctggccaaggaccccaacggcttcagcgacccatactgcatgctgggcatcctgcctgcctcggacgccacgcgggagccccgtgcacagaaggagcagcgcttcggcttccgcaagggcagcaagcgcggtggacccctgcctgccaagtgcatccaggtcaccgaggtgaagagcagcaccctgaaccccgtctggaaggagcacttcctcttcgagattgaggatgtgagcacggaccagctgcacctggacatctgggatcatgacgacgatgtatccctggtagaagcgtgcaggaagctgaatgaagtcatcggcctgaagggcatgggcaggtacttcaaacagatcgtcaagtcagcccgcgcaaacgggacagcaggacccaccgaggaccacaccgatgacttcctggggtgcctcaacatacctgtccgggaggtgcctgtggctggcgtcgaccgctggttcaagctggagccacgctccagtgcctcgcgtgtgcagggacactgccacctggttctcaagctgatcactacgcagagggatacggccatgagccagcgcgggcgatccggcttcctgtcccacctgctgctgctcagccatctgctgcggttggagcactcagcagaggagcccaactccagcagctggcgaggagagctcagcacaccagccgccaccatcctctgcctgcacggagcccagagcaacctgtcacccttgcagctggccgtgctgcactggcaggtcagcagccgccaccatcaaacctgcacgctggactacagctacctgctggggctgctggaggacatgcaggcacactgggaagaggctccttcactgccccaggagcaggaggagagcctggctgatagcctttccgccttctctgagttcgggctgcagctgctgcgccagctccgagactacttccctgccaccaacagcaccgctgtccaccgcctggagctgctgctgaagtgtctgggcaagctgcagctcttccaaccctcctttgagatctgccccttcgagtcggagctgaacatggacattgctgcggccctgaagagaggcaaccgtgagtggtacgacaggatcctgaatgacaagagtccccgagagcagccaggaccacagcgcctgcctgggctggttgtgctggctgacgccgtctatgatgaccttcagttctgctacagtgtgtacgccagcctcttccacagcatcctcaatgtggacgtcttcaccctgaccttccggcagctggagcgtctggtggctgaggaggcgtgggtgctgacggaggagctgagccccaagatgaccctggaggtggcctcggggctctttgagctctacctgaccctggctgacctccagcgcttctgggatagcatccctggccgggacagccgctctctggccctggctggcatccacgcccccttcctgcctgctgtgaagctctggttccaagtgctgagggaccaggccaagtggaggcttcagggagccgtggacatggacacgctggagcccgtggacgcctcctccaggcacagcagctccgcagccactgctggtctctgcctcagccacatccaggagttgtgggtgcgcctggcgtggcctgaccctgcccaggctcaggggctgggcacccagcttggccaggacgtgtgtgaggccaccctcttctatacggagctgcttcggaagaaggtggacactcagccaggggcggccggtgaagcagtgagcgaggcgctctgcgtggtcctcaacaatgtggagctcgtgcgcaaggctgctgggcaggccttgaagggcctggcatggccagagggggccacggggcccgagggggtgctcccccgccctctgctcagctgcacacaggccctggacgatgatctgcaacgggaggcccacacggtgacagcgcacctgacctctaagatggtgggcgacatccgcaagtatgtacagcacatcagtctctcgcctgactccatccagaacgatgaggccgtggccccgctcatgaagtacctggatgagaagctggccctgctgaacgcctcgctggtgaaggggaacctgagcagggtgctggaggccctgtgggagctactcctccaggccattctgcaggcgctgggtgcaaaccgtgacgtctctgctgatttctacagccgcttccatttcacgctggaggccctggtcagttttttccacgcagagggtcagggtttgcccctggagagcctgagggatggaagctacaagaggctgaaggaggagctgcggctgcacaaatgttccacccgcgagtgcatcgagcagttctacctggacaagctcaaacagaggaccctggagcagaaccggtttggacgcctgagcgtccgttgccattacgaggcggctgagcagcggctggccgtggaggtgctgcacgccgcggacctgctccccctggacgccaacggcttaagtgacccctttgtgatcgtggagctgggcccaccgcatctctttccactggtccgcagccagaggacccaggtgaagacccggacgctgcaccctgtatacgacgaactcttctacttttccgtgcctgccgaggcgtgccgccgccgcgcggcctgtgtgttgttcaccgtcatggaccacgactggctgtccaccaacgacttcgctggggaggcggccctcggcctaggtggcgtcactggtgtcgcccggccccaggtgggcgggggtgcaagggctgggcagcctgtcaccctgcacctgtgccggcccagagcccaggtgagatctgcgctgaggaggctggaaggccgcaccagcaaggaggcgcaggagttcgtgaagaaactcaaggagctggagaagtgcatggaggcggacccctgagtccatcagctgccagccccggccctggcccccaccccaagttccctgaagcatcctccagctcactgtggccagctttgtgcaaccagggcccacggcgcccctcctgtgctgtgacgtgtgtgtcgtggctggccccgcggcgcctaccgccctgg

SEQ ID NO: 110684 - DNA, 4732 bp, Homo sapiens
  Payload ID: 1704
  Gene Symbol: BAIAP3
  Gene Name: BAI1-associated protein 3
  Uniprot ID: O94812
  ENST ID: ENST00000628027
  CDS Start-End: 264-3773
agacacgggcgaggggaggaagaaggcgcctcgggctccggtctcctgcgctcctgctgggcgccagcggctggaccttggcagccgtctgaggcttcggggagcccaaggccaccggcagcgcttgttagaatgcagattcccggggttcgactggaatgagaccccggggagcagcgtttgcagcgggcccgccaggtgacctgcacctgggcaccgccatcggcttcgcaggggccatctggaggagtcggtcacccgccatgtcgaccttgctggacattaagagcagcgtgctcaggcaggtgcaggtgtgcccgtccttccgccgcaggactgagcaggacccagggagtgccagcgccgacccgcaggagcctgccacgggggcctggaaacccggggatggcgtggagttctttgcccacatgcgcctcatgctgaagaagggggaaggcagacagggcttgccgtgcctcgaggcctggggctctccctgccgtcagagccctcaccctgggccccacacacaggtccccctgcgcagtggctcgccagcacccccggagcctgtggatcccagcctcggcctgagagccctggccccagaggaggtggagatgctctacgaggaggccctgtacacggtgctttaccgcgcgggtaccatgggccctgaccaggtggacgacgaggaggccctgctcagctatctccagcaggtgtttggcaccagccttgaggagcacactgaggccatcgagcgagtgaggaaggccaaggcccccacgtatgccctgaaagtctctgtcatgcgtgccaagaaccttctggccaaggaccccaacggcttcagcgacccatactgcatgctgggcatcctgcctgcctcggacgccacgcgggagccccgtgcacagaaggagcagcgcttcggcttccgcaagggcagcaagcgcggtggacccctgcctgccaagtgcatccaggtcaccgaggtgaagagcagcaccctgaaccccgtctggaaggagcacttcctcttcgagattgaggatgtgagcacggaccagctgcacctggacatctgggatcatgacgacgatgtatccctggtagaagcgtgcaggaagctgaatgaagtcatcggcctgaagggcatgggcaggtacttcaaacagatcgtcaagtcagcccgcgcaaacgggacagcaggacccaccgaggaccacaccgatgacttcctggggtgcctcaacatacctgtccgggaggtgcctgtggctggcgtcgaccgctggttcaagctggagccacgctccagtgcctcgcgtgtgcagggacactgccacctggttctcaagctgatcactacgcagagggatacggccatgagccagcgcgggcgatccggcttcctgtcccacctgctgctgctcagccatctgctgcggttggagcactcagcagaggagcccaactccagcagctggcgaggagagctcagcacaccagccgccaccatcctctgcctgcacggagcccagagcaacctgtcacccttgcagctggccgtgctgcactggcaggtcagcagccgccaccatcaaacctgcacgctggactacagctacctgctggggctgctggaggacatgcaggcacactgggaagaggctccttcactgccccaggagcaggaggagagcctggctgatagcctttccgccttctctgagttcgggctgcagctgctgcgccagctccgagactacttccctgccaccaacagcaccgctgtccaccgcctggagctgctgctgaagtgtctgggcaagctgcagctcttccaaccctcctttgagatctgccccttcgagtcggagctgaacatggacattgctgcggccctgaagagaggcaaccgtgagtggtacgacaggatcctgaatgacaagagtccccgagagcagccaggaccacagcgcctgcctgggctggttgtgctggctgacgccgtctatgatgaccttcagttctgctacagtgtgtacgccagcctcttccacagcatcctcaatgtggacgtcttcaccctgaccttccggcagctggagcgtctggtggctgaggaggcgtgggtgctgacggaggagctgagccccaagatgaccctggaggtggcctcggggctctttgagctctacctgaccctggctgacctccagcgcttctgggatagcatccctggccgggacagccgctctctggccctggctggcatccacgcccccttcctgcctgctgtgaagctctggttccaagtgctgagggaccaggccaagtggaggcttcagggagccgtggacatggacacgctggagcccgtggacgcctcctccaggcacagcagctccgcagccactgctggtctctgcctcagccacatccaggagttgtgggtgcgcctggcgtggcctgaccctgcccaggctcaggggctgggcacccagcttggccaggacgtgtgtgaggccaccctcttctatacggagctgcttcggaagaaggtggacactcagccaggggcggccggtgaagcagtgagcgaggcgctctgcgtggtcctcaacaatgtggagctcgtgcgcaaggctgctgggcaggccttgaagggcctggcatggccagagggggccacggggcccgagggggtgctcccccgccctctgctcagctgcacacaggccctggacgatgatctgcaacgggaggcccacacggtgacagcgcacctgacctctaagatggtgggcgacatccgcaagtatgtacagcacatcagtctctcgcctgactccatccagaacgatgaggccgtggccccgctcatgaagtacctggatgagaagctggccctgctgaacgcctcgctggtgaaggggaacctgagcagggtgctggaggccctgtgggagctactcctccaggccattctgcaggcgctgggtgcaaaccgtgacgtctctgctgatttctacagccgcttccatttcacgctggaggccctggtcagttttttccacgcagagggtcagggtttgcccctggagagcctgagggatggaagctacaagaggctgaaggaggagctgcggctgcacaaatgttccacccgcgagtgcatcgagcagttctacctggacaagctcaaacagaggaccctggagcagaaccggtttggacgcctgagcgtccgttgccattacgaggcggctgagcagcggctggccgtggaggtgctgcacgccgcggacctgctccccctggacgccaacggcttaagtgacccctttgtgatcgtggagctgggcccaccgcatctctttccactggtccgcagccagaggacccaggtgaagacccggacgctgcaccctgtatacgacgaactcttctacttttccgtgcctgccgaggcgtgccgccgccgcgcggcctgtgtgttgttcaccgtcatggaccacgactggctgtccaccaacgacttcgctggggaggcggccctcggcctaggtggcgtcactggtgtcgcccggccccaggtgggcgggggtgcaagggctgggcagcctgtcaccctgcacctgtgccggcccagagcccaggtgagatctgcgctgaggaggctggaaggccgcaccagcaaggaggcgcaggagttcgtgaagaaactcaaggagctggagaagtgcatggaggcggacccctgagtccatcagctgccagccccggccctggcccccaccccaagttccctgaagcatcctccagctcactgtggccagctttgtgcaaccagggcccacggcgcccctcctgtgctgtgacgtgtgtgtcgtggctggccccgcggcgcctaccgccctggccgtgtctgtctggtgtgtgctgtgaacccctgcacccaaccccacatctgggtggccaacttggcaggacttggccagcagctgcccaggacacagtgcaggccagagcgggcttgaccacctggtgggcctccctgcccgcttccttgggctccccggccctgggtgggcggtgggcagctggtctccagggactcagtgagtggctgtgctctctgcacaacgggcaatgtgcagacgcatttttggtaatcacagctggggagtgaaaagggtgccactggcaccactgggtggatggtccagagcctccacccacagaggggatgcaaagggcaggtgagtcaagaaccgcataggtctccagtccccacggggctcccaggccggggaaaggttcccctgaggtcactctgaggccagggacgtcacccaaggctggtggtcagtgtgaagggctccgtgccaactggtcagctgtccttcacgcacatatccgtggccacctgagacctgctccacgacccttccaggcagagccgagagttcgccccaacccttccccaggcccagtgtgaaaaacagactcacaaggggcttcttggcctgcagcttcatttgcgagagcgccgaggcaggacacagagcacagctgtgctggaagtgtggggagaacccggacagctcagtcctgccagcagccgcaaagagccgaggctgccaggcccatttatgtccctcatgtctctagattttctcgtcacccagcctcaaaaatatatgtgtctgcaaccctcagt

SEQ ID NO: 110685 - DNA, 3423 bp, Homo sapiens
  Payload ID: 1705
  Gene Symbol: BBS1
  Gene Name: Bardet-Biedl syndrome 1
  Uniprot ID: Q8NFJ9
  ENST ID: ENST00000318312
  CDS Start-End: 52-1833
attgggcgttacgcgagggcggggccggttgccaggacgacgcctgcgaagatggccgctgcgtcctcatcggattccgacgcctgcggagctgagagcaatgaggccaattcgaagtggttggatgcgcactacgacccaatggccaatatccacaccttttctgcctgcctagcgctggcagatttacatggggatggggaatacaagctggtggtaggggaccttggccctggtgggcagcagccccgcctgaaggtgctcaaaggaccactggtgatgaccgaaagcccgctacctgctctgccagctgctgctgccaccttcctcatggagcaacatgagccccggaccccagctctggcacttgcttcaggcccttgtgtctatgtgtataagaatctcagaccctacttcaagttcagcctgccccaattgcctccaaatcctctggaacaagacctttggaaccaggccaaagaggaccgaatcgaccccttaaccctgaaggagatgctggagagcatccgggagacggcagaggagcctttgtccatccagtcactcaggtttctgcagctggagctaagtgaaatggaggcatttgtaaaccaacacaagtccaactccatcaagcggcagacagtcatcaccaccatgaccaccttgaagaagaacctggctgacgaggatgctgtgtcttgcctggtgctgggcaccgagaacaaggagctcctggtgcttgaccccgaggccttcaccattttagccaagatgagccttcccagcgtccccgtcttcctagaggtttctggccagtttgatgttgagttccggcttgccgcggcctgccgcaatggaaacatctatattctgagaagagactccaagcaccccaagtactgcatcgagctgagcgcccagcctgtgggacttatccgggtacacaaggtcctagtggtgggcagcacccaagacagcctgcatggcttcacccacaaggggaagaagctgtggacagtgcagatgcccgcagccatcctgaccatgaacctcctggagcagcattcccggggcctgcaggccgtcatggctgggctggccaatggagaggtccgcatttatcgtgacaaggccctgctcaatgtcatccacaccccggatgcagtgaccagcctttgctttggccggtacgggcgggaggacaacaccctcatcatgaccactcgaggtggtggcctgatcatcaagatcctgaagcgtacagcagtgtttgtagagggaggaagtgaggtgggtcccccaccagcccaggccatgaaactcaatgtgccccgaaagacccggctttacgtggatcagacactgcgagagcgggaggctggcaccgccatgcaccgggccttccagacagacctatacctgctgcgcctacgtgctgcccgcgcctacctgcaggccctcgagtccagcctgagccccctgtccacgacagcccgagagccactcaagctgcacgccgtggttcagggccttggccccacctttaagctcacacttcacctgcagaacacctcaacaacccgtcctgtcctggggctgctggtctgcttcctgtacaacgaggcgctctattccctgccccgggccttcttcaaggtacccttgctggtgccagggctcaactaccccctggagacctttgtggagagtctcagtaacaagggcatctcagacatcatcaaggtgctggtgcttcgagaaggccaaagtgcacccctgctgagtgcccacgtcaacatgcctgggagcgaggggctggcggccgcctgagacctgagctgctgtgaaagcccctgcacaatcagccagggagaactgggcgggtttagtggccccaggcccactcctcatgcagcagtgtgctggggcgacagctcgtctcccctctcttaagcacccgcttcctcaccacccccactgttgggcctatagtagcaggttagtgagtacctagggcggctcaactcctcccacagcaccaacccagcatggtcccactgaagtcctactacgccctcccctccccagccttttccagaaaccatactgggctcagatcagagctccgaagcggtcaaagtgagctgagcaggacaggcccagcctttctccactgccacgtccctcatgcacatcactcatctcctgctgcaggccaaggccaaaattgggctagtcctggccagggaaatcagaagctcttcttgggtgagattgagcctcctgttgctccctggagttccggaggctgggctgcagcccactcagcttgcgggcaaaatacgtgctctcctctctccttgtcagctgagcaaacccagggaatagccctcctctccccaggaaacttctctgaaatcttagacttagccagtcttaggcctacgatgccacacaaaggttgttcagggagaagggggtgcaggaggcagagggtgccccgcagggagctggtggctccagccccactagagctcctaaagatcacacagcagctgctcctgacagggatgctcatgcccagaaagcaagcccaggagaggaaggcagagtgtgacagagcagagccagggccaggcgcaccaggagaggcgtttctggggctccagagaagtgccacgggaggcagaagtccagaactgcccatatagatgcccttctacatcctggagcccaaatcagtcatgtgggtgggaagttcccagggcagtggtcacatcgtgagaattagcaggaaaggcggggcctttcttgtcatagctatttctgaggatgaaatgggagacatatgcccagcacctgatgtaagtttatataatgtaatattatgtacctaccactaagaaatacatgaaccgtgccatgaggacagtaagtgttcataaagcaacatgaagcaagaaacagtgcagggtgcccagtgcacacactagagagaaattgtgaacattaaggacaaggagaattggtgtctttctaaaacatacttatttaaaaacacatacccacttactaatgtggaattacacagtttgtaacaagaaaacagtctctcccattctctagtactgctcccctacccagcagtcacttccagttcattcagctatttttaaaatgtgcttatatgactcttgcttgatatatcaatcttagacattacctgttgactccctgttgtcatacatgaggctttagctctcttttgtcagcaaccctcccccatccctagttattaggttaaaaaatactcagattactatttctattactatgtgaaagttaactgcggagccaagagttggactataattaaattaccttccttgtactttctttttaatggagttaatgagttgc

SEQ ID NO: 110686 - DNA, 1790 bp, Homo sapiens
  Payload ID: 1705
  Gene Symbol: BBS1
  Gene Name: Bardet-Biedl syndrome 1
  Uniprot ID: Q8NFJ9
  ENST ID: ENST00000393994
  CDS Start-End: 6-1346
cgaagatggccgctgcgtcctcatcggattccgacgcctgcggagctgagagcaatgaggccaattcgaagtggttggatgcgcactacgacccaatggccaatatccacaccttttctgcctgcctagcgctggcagatttacatggggatggggaatacaagctggtggtaggggaccttggccctggtgggcagcagccccgcctgaaggtgctcaaaggaccactggtgatgaccgaaagcccgctacctgctctgccagctgctgctgccaccttcctcatggagcaacatgagccccggaccccagctctggcacttgcttcaggcccttgtgtctatgtgtataagaatctcagaccctacttcaagttcagcctgccccaattgcctccaaatcctctggaacaagacctttggaaccaggccaaagaggaccgaatcgaccccttaaccctgaaggagatgctggagagcatccgggagacggcagaggagcctttgtccatccagtcactcaggtttctgcagctggagctaagtgaaatggaggcatttgtaaaccaacacaagtccaactccatcaagcggcagacagtcatcaccaccatgaccaccttgaagaagaacctggctgacgaggatgctgtgtcttgcctggtgctgggcaccgagaacaaggagctcctggtgcttgaccccgaggccttcaccattttagccaaggatgcagtgaccagcctttgctttggccggtacgggcgggaggacaacaccctcatcatgaccactcgaggtggtggcctgatcatcaagatcctgaagcgtacagcagtgtttgtagagggaggaagtgaggtgggtcccccaccagcccaggccatgaaactcaatgtgccccgaaagacccggctttacgtggatcagacactgcgagagcgggaggctggcaccgccatgcaccgggccttccagacagacctatacctgctgcgcctacgtgctgcccgcgcctacctgcaggccctcgagtccagcctgagccccctgtccacgacagcccgagagccactcaagctgcacgccgtggttcagggccttggccccacctttaagctcacacttcacctgcagaacacctcaacaacccgtcctgtcctggggctgctggtctgcttcctgtacaacgaggcgctctattccctgccccgggccttcttcaaggtacccttgctggtgccagggctcaactaccccctggagacctttgtggagagtctcagtaacaagggcatctcagacatcatcaaggtaggccccgcacttgtaccacgtggaaggtgagcaggaccctggggaggacagtaagggtgagtgccaacaaagaccttagggggctcctgggtgggggtgggggtatctgcacagtggagccctgtggcctgtcattagggccagcgcagaccaggcaaggggtcaggggtgtatgccccctgctgccatggccactcctccataggtgctggtgcttcgagaaggccaaagtgcacccctgctgagtgcccacgtcaacatgcctgggagcgaggggctggcggccgcctgagacctgagctgctgtgaaagcccctgcacaatcagccagggagaactgggcgggtttagtggccccaggcccactcctcatgcagcagtgtgctggggcgacagctcgtctcccctctcttaagcacccgcttcctcaccacccccactgttgggcctatagtagcaggttagtgagtacct

SEQ ID NO: 110687 - DNA, 1552 bp, Homo sapiens
  Payload ID: 1705
  Gene Symbol: BBS1
  Gene Name: Bardet-Biedl syndrome 1
  ENST ID: ENST00000455748
  CDS Start-End: 19-1509
aggacgacgcctgcgaagatggccgctgcgtcctcatcggattccgacgcctgcggagctgagagcaatgaggccaattcgaagtggttggatgcgcactacgacccaatggccaatatccacaccttttctgcctgcctagcgctggcagatttacatggggatggggaatacaagctggtggtaggggaccttggccctggtgggcagcagccccgcctgaaggtgctcaaaggaccactggtgatgaccgaaagcccgctacctgctctgccagctgctgctgccaccttcctcatggagcaacatgagccccggaccccagctctggcacttgcttcaggcccttgtgtctatgtgtataagaatctcagaccctacttcaagttcagcctgccccaattgcctccaaatcctctggaacaagacctttggaaccaggccaaagagatgagccttcccagcgtccccgtcttcctagaggtttctggccagtttgatgttgagttccggcttgccgcggcctgccgcaatggaaacatctatattctgagaagagactccaagcaccccaagtactgcatcgagctgagcgcccagcctgtgggacttatccgggtacacaaggtcctagtggtgggcagcacccaagacagcctgcatggcttcacccacaaggggaagaagctgtggacagtgcagatgcccgcagccatcctgaccatgaacctcctggagcagcattcccggggcctgcaggccgtcatggctgggctggccaatggagaggtccgcatttatcgtgacaaggccctgctcaatgtcatccacaccccggatgcagtgaccagcctttgctttggccggtacgggcgggaggacaacaccctcatcatgaccactcgaggtggtggcctgatcatcaagatcctgaagcgtacagcagtgtttgtagagggaggaagtgaggtgggtcccccaccagcccaggccatgaaactcaatgtgccccgaaagacccggctttacgtggatcagacactgcgagagcgggaggctggcaccgccatgcaccgggccttccagacagacctatacctgctgcgcctacgtgctgcccgcgcctacctgcaggccctcgagtccagcctgagccccctgtccacgacagcccgagagccactcaagctgcacgccgtggttcagggccttggccccacctttaagctcacacttcacctgcagaacacctcaacaacccgtcctgtcctggggctgctggtctgcttcctgtacaacgaggcgctctattccctgccccgggccttcttcaaggtacccttgctggtgccagggctcaactaccccctggagacctttgtggagagtctcagtaacaagggcatctcagacatcatcaaggtgctggtgcttcgagaaggccaaagtgcacccctgctgagtgcccacgtcaacatgcctgggagcgaggggctggcggccgcctgagacctgagctgctgtgaaagcccctgcacaatcagccagggag

SEQ ID NO: 110688 - DNA, 601 bp, Homo sapiens
  Payload ID: 1705
  Gene Symbol: BBS1
  Gene Name: Bardet-Biedl syndrome 1
  ENST ID: ENST00000525809
  CDS Start-End: 25-601
gttgccaggacgacgcctgcgaagatggccgctgcgtcctcatcggattccgacgcctgcggagctgagagcaatgaggccaattcgaagtggttggatgcgcactacgacccaatggccaatatccacaccttttctgcctgcctagcgctggcagatttacatggggatggggaatacaaggaccgaatcgaccccttaaccctgaaggagatgctggagagcatccgggagacggcagaggagcctttgtccatccagtcactcaggtttctgcagctggagctaagtgaaatggaggcatttgtaaaccaacacaagtccaactccatcaagcggcagacagtcatcaccaccatgaccaccttgaagaagaacctggctgacgaggatgctgtgtcttgcctggtgctgggcaccgagaacaaggagctcctggtgcttgaccccgaggccttcaccattttagccaagatgagccttcccagcgtccccgtcttcctagaggtttctggccagtttgatgttgagttccggcttgccgcggcctgccgcaatggaaacatctatattctgagaagagactccaagcaccccaagt

SEQ ID NO: 110689 - DNA, 1001 bp, Homo sapiens
  Payload ID: 1705
  Gene Symbol: BBS1
  Gene Name: Bardet-Biedl syndrome 1
  ENST ID: ENST00000532908
  CDS Start-End: 12-269
cgcctgcgaagatggccgctgcgtcctcatcggattccgacgcctgcggagctgagagcaatgaggccaattcgaagtggttggatgcgcactacgacccaatggccaatatccacaccttttctgcctgcctagctggtggtaggggaccttggccctggtgggcagcagccccgcctgaaggtgctcaaaggaccactggtgatgaccgaaagcccgctacctgctctgccagctgctgctgccaccttcctcatggagcaacatgagccccggaccccagctctggcacttgcttcaggcccttgtgtctatgtgtataagaatctcagaccctacttcaagttcagcctgccccaattgcctccaaatcctctggaacaagacctttggaaccaggccaaagagggagacggcagaggagcctttgtccatccagtcactcaggtttctgcagctggagctaagtgaaatggaggcatttgtaaaccaacacaagtccaactccatcaagcggcagacagtcatcaccaccatgaccaccttgaagaagaacctggctgacgaggatgctgtgtcttgcctggtgctgggcaccgagaacaaggagctcctggtgcttgaccccgaggccttcaccattttagccaagatgagccttcccagcgtccccgtcttcctagaggtttctggccagtttgatgttgagttccggcttgccgcggcctgccgcaatggaaacatctatattctgagaagagactccaagcaccccaagtactgcatcgagctgagcgcccagcctgtgggacttatccgggtacacaaggtcctagtggtgggcagcacccaagacagcctgcatggcttcacccacaaggggaagaagctgtggacagtgcagatgcccgcagccatcctgaccatgaacctcctggagcagcattcccggggcctgcaggccgtcatggctgggctggccaatggagaggtccgcattt

SEQ ID NO: 110690 - DNA, 3585 bp, Homo sapiens
  Payload ID: 1705
  Gene Symbol: BBS1
  Gene Name: Bardet-Biedl syndrome 1
  ENST ID: ENST00000526760
  CDS Start-End: 55-312
actattgggcgttacgcgagggcggggccggttgccaggacgacgcctgcgaagatggccgctgcgtcctcatcggattccgacgcctgcggagctgagagcaatgaggccaattcgaagtggttggatgcgcactacgacccaatggccaatatccacaccttttctgcctgcctagctggtggtaggggaccttggccctggtgggcagcagccccgcctgaaggtgctcaaaggaccactggtgatgaccgaaagcccgctacctgctctgccagctgctgctgccaccttcctcatggagcaacatgagccccggaccccagctctggcacttgcttcaggcccttgtgtctatgtgtataagaatctcagaccctacttcaagttcagcctgccccaattgcctccaaatcctctggaacaagacctttggaaccaggccaaagaggaccgaatcgaccccttaaccctgaaggagatgctggagagcatccgggagacggcagaggagcctttgtccatccagtcactcaggtttctgcagctggagctaagtgaaatggaggcatttgtaaaccaacacaagtccaactccatcaagcggcagacagtcatcaccaccatgaccaccttgaagaagaacctggctgacgaggatgctgtgtcttgcctggtgctgggcaccgagaacaaggagctcctggtgcttgaccccgaggccttcaccattttagccaagatgagccttcccagcgtccccgtcttcctagaggtttctggccagtttgatgttgagttccggcttgccgcggcctgccgcaatggaaacatctatattctgagaagagactccaagcaccccaagtactgcatcgagctgagcgcccagcctgtgggacttatccgggtacacaaggtcctagtggtgggcagcacccaagacagcctgcatggcttcacccacaaggggaagaagctgtggacagtgcagatgcccgcagccatcctgaccatgaacctcctggagcagcattcccggggcctgcaggccgtcatggctgggctggccaatggagaggtccgcatttatcgtgacaaggccctgctcaatgtcatccacaccccggatgcagtgaccagcctttgctttggccggtacgggcgggaggacaacaccctcatcatgaccactcgaggtggtggcctgatcatcaagatcctgaagcgtacagcagtgtttgtagagggaggaagtgaggtgggtcccccaccagcccaggccatgaaactcaatgtgccccgaaagacccggctttacgtggatcagacactgcgagagcgggaggctggcaccgccatgcaccgggccttccagacagacctatacctgctgcgcctacgtgctgcccgcgcctacctgcaggccctcgagtccagcctgagccccctgtccacgacagcccgagagccactcaagctgcacgccgtggttcagggccttggccccacctttaagctcacacttcacctgcagaacacctcaacaacccgtcctgtcctggggctgctggtctgcttcctgtacaacgaggcgctctattccctgccccgggccttcttcaaggtacccttgctggtgccagggctcaactaccccctggagacctttgtggagagtctcagtaacaagggcatctcagacatcatcaaggtaggccccgcacttgtaccacgtggaaggtgagcaggaccctggggaggacagtaagggtgagtgccaacaaagaccttagggggctcctgggtgggggtgggggtatctgcacagtggagccctgtggcctgtcattagggccagcgcagaccaggcaaggggtcaggggtgtatgccccctgctgccatggccactcctccataggtgctggtgcttcgagaaggccaaagtgcacccctgctgagtgcccacgtcaacatgcctgggagcgaggggctggcggccgcctgagacctgagctgctgtgaaagcccctgcacaatcagccagggagaactgggcgggtttagtggccccaggcccactcctcatgcagcagtgtgctggggcgacagctcgtctcccctctcttaagcacccgcttcctcaccacccccactgttgggcctatagtagcaggttagtgagtacctagggcggctcaactcctcccacagcaccaacccagcatggtcccactgaagtcctactacgccctcccctccccagccttttccagaaaccatactgggctcagatcagagctccgaagcggtcaaagtgagctgagcaggacaggcccagcctttctccactgccacgtccctcatgcacatcactcatctcctgctgcaggccaaggccaaaattgggctagtcctggccagggaaatcagaagctcttcttgggtgagattgagcctcctgttgctccctggagttccggaggctgggctgcagcccactcagcttgcgggcaaaatacgtgctctcctctctccttgtcagctgagcaaacccagggaatagccctcctctccccaggaaacttctctgaaatcttagacttagccagtcttaggcctacgatgccacacaaaggttgttcagggagaagggggtgcaggaggcagagggtgccccgcagggagctggtggctccagccccactagagctcctaaagatcacacagcagctgctcctgacagggatgctcatgcccagaaagcaagcccaggagaggaaggcagagtgtgacagagcagagccagggccaggcgcaccaggagaggcgtttctggggctccagagaagtgccacgggaggcagaagtccagaactgcccatatagatgcccttctacatcctggagcccaaatcagtcatgtgggtgggaagttcccagggcagtggtcacatcgtgagaattagcaggaaaggcggggcctttcttgtcatagctatttctgaggatgaaatgggagacatatgcccagcacctgatgtaagtttatataatgtaatattatgtacctaccactaagaaatacatgaaccgtgccatgaggacagtaagtgttcataaagcaacatgaagcaagaaacagtgcagggtgcccagtgcacacactagagagaaattgtgaacattaaggacaaggagaattggtgtctttctaaaacatacttatttaaaaacacatacccacttactaatgtggaattacacagtttgtaacaagaaaacagtctctcccattctctagtactgctcccctacccagcagtcacttccagttcattcagctatttttaaaatgtgcttatatgactcttgcttgatatatcaatcttagacattacctgttgactccctgttgtcatacatgaggctttagctctcttttgtcagcaaccctcccccatccctagttattaggttaaaaaatactcagattactatttctattactatgtgaaagttaactgcggagccaagagttggactataattaaattaccttccttgtactttctttttaatgg

SEQ ID NO: 110691 - DNA, 822 bp, Homo sapiens
  Payload ID: 1705
  Gene Symbol: BBS1
  Gene Name: Bardet-Biedl syndrome 1
  ENST ID: ENST00000526035
  CDS Start-End: 17-274
gacgacgcctgcgaagatggccgctgcgtcctcatcggattccgacgcctgcggagctgagagcaatgaggccaattcgaagtggttggatgcgcactacgacccaatggccaatatccacaccttttctgcctgcctagctggtggtaggggaccttggccctggtgggcagcagccccgcctgaaggtgctcaaaggaccactggtgatgaccgaaagcccgctacctgctctgccagctgctgctgccaccttcctcatggagcaacatgagccccggaccccagctctggcacttgcttcaggcccttgtgtctatgtgtataagaatctcagaccctacttcaagttcagcctgccccaattgcctccaaatcctctggaacaagacctttggaaccaggccaaagaggaccgaatcgaccccttaaccctgaaggagatgctggagagcatccgggagacggcagaggagcctttgtccatccagtcactcaggtttctgcagctggagctaagtgaaatggaggcatttgtaaaccaacacaagtccaactccatcaagcggcagtcatcaccaccatgaccaccttgaagaagaacctggctgacgaggatgctgtgtcttgcctggtgctgggcaccgagaacaaggagctcctggtgcttgaccccgaggccttcaccattttagccaagatgagccttcccagcgtccccgtcttcctagaggtttctggccagtttgatgttgagttccggcttgccgcggcctgccgcaatggaaacatctatattctgagaagagactccaagcaccc

SEQ ID NO: 110692 - DNA, 1034 bp, Homo sapiens
  Payload ID: 1705
  Gene Symbol: BBS1
  Gene Name: Bardet-Biedl syndrome 1
  ENST ID: ENST00000527251
  CDS Start-End: 441-608
gttacgcgagggcggggccggttgccaggacgacgcctgcgaagatggccgctgcgtcctcatcggattccgacgcctgcggagctgagaggtgaaggcagggctcctcaaggcctcttttcccacccgtgtaaagagggtcccttggtccccgggctctgggctcctgctgttctcgggcagtctggaaggactcttaagaggtcagatagggaaaccgaggcctaagatgtgcatatgtgtgtctggaggtcgctcggtgagccagtggcggagcctggacttgtacccagacgttctgtaccttatgttcagagtgacctgtaccagcttcctcaaagtttttttttcccctcccatgggactcactccccaactgtctttcccccacttccagcaatgaggccaattcgaagtggttggatgcgcactacgacccaatggccaatatccacaccttttctgcctgcctagctggtggtaggggaccttggccctggtgggcagcagccccgcctgaaggtgctcaaaggaccactggtgatgaccgaaagcccgctacctgctctgccagctgctgctgccaccttcctcatggagcaacatgagccccggaccccagctctggcacttgcttcaggcccttgtgtctatgtgtataagaatctcagaccctacttcaagttcagcctgccccaattgcctccaaatcctctggaacaagacctttggaaccaggccaaagaggaccgaatcgaccccttaaccctgaaggagatgctggagagcatccgggagacggcagaggagcctttgtccatccagtcactcaggtttctgcagctggagctaagtgaaatggaggcatttgtaaaccaacacaagtccaactccatcaagcggcagacagtcatcaccaccatgaccaccttgaagaagaacctggctgacgaggatgctgtgtcttgcctggtgctgggcaccgagaacaaggagctcctggtgcttgaccccgaggccttcaccattttagc

SEQ ID NO: 110693 - DNA, 1043 bp, Homo sapiens
  Payload ID: 1705
  Gene Symbol: BBS1
  Gene Name: Bardet-Biedl syndrome 1
  ENST ID: ENST00000533557
  CDS Start-End: 26-283
ggttgccaggacgacgcctgcgaagatggccgctgcgtcctcatcggattccgacgcctgcggagctgagagcaatgaggccaattcgaagtggttggatgcgcactacgacccaatggccaatatccacaccttttctgcctgcctagctggtggtaggggaccttggccctggtgggcagcagccccgcctgaaggtgctcaaaggaccactggtgatgaccgaaagcccgctacctgctctgccagctgctgctgccaccttcctcatggagcaacatgagccccggaccccagctctggcacttgcttcaggcccttgtgtctatgtgtataagaatctcagaccctacttcaagttcagcctgccccaattgcctccaaatcctctggaacaagacctttggaaccaggccaaagagggagacggcagaggagcctttgtccatccagtcactcaggtttctgcagctggagctaagtgaaatggaggcatttgtaaaccaacacaagtccaactccatcaagcggcagacagtcatcaccaccatgaccaccttgaagaagaacctggctgacgaggatgctgtgtcttgcctggtgctgggcaccgagaacaaggagctcctggtgcttgaccccgaggccttcaccattttagccaagatgagccttcccagcgtccccgtcttcctagaggtttctggccagtttgatgttgagttccggcttgccgcggcctgccgcaatggaaacatctatattctgagaagatgatcatacaagccaccatagtgaaggtgggcggaagacaagacaccatagtgaaggtgggaggaagacaagacaccatagtgaaggtgggaggaagacacacttgatgttttccaaggccacacatttactaaggtggcagaagtggaaataatcccagggtcatctgctttggggccagtgttcctcccagagactccaagcaccccaagtactgcatcgagctgagcgcccagcctgtgggacttatccgggtacacaaggtccta

SEQ ID NO: 110694 - DNA, 910 bp, Homo sapiens
  Payload ID: 1705
  Gene Symbol: BBS1
  Gene Name: Bardet-Biedl syndrome 1
  ENST ID: ENST00000533644
  CDS Start-End: 52-546
attgggcgttacgcgagggcggggccggttgccaggacgacgcctgcgaagatggccgctgcgtcctcatcggattccgacgcctgcggagctgagagcaatgaggccaattcgaagtggttggatgcgcactacgacccaatggccaatatccacaccttttctgcctgcctagcgctggcagatttacatggggatggggaatacaagctggtggtaggggaccttggccctggtgggcagcagccccgcctgaaggtgctcaaaggaccactggtgatgaccgaaagcccgctacctgctctgccagctgctgctgccaccttcctcatggagcaacatgagccccggaccccagctctggcacttgcttcaggcccttgtgtctatgtgtataagaatctcagaccctacttcaagttcagcctgccccaattgcctccaaatcctctggaacaagacctttggaaccaggccaaagagggagacggcagaggagcctttgtccatccagtcactcaggtttctgcagctggagctaagtgaaatggaggcatttgtaaaccaacacaagtccaactccatcaagcggcagacagtcatcaccaccatgaccaccttgaagaagaacctggctgacgaggatgctgtgtcttgcctggtgctgggcaccgagaacaaggagctcctggtgcttgaccccgaggccttcaccattttagccaagatgagccttcccagcgtccccgtcttcctagaggtttctggccagtttgatgttgagttccggcttgccgcggcctgccgcaatggaaacatctatattctgagaagagactccaagcaccccaagtactgcatcgagctgagcgcccagcctgtgggacttatccgggtacacaaggtccta

SEQ ID NO: 110695 - DNA, 891 bp, Homo sapiens
  Payload ID: 1705
  Gene Symbol: BBS1
  Gene Name: Bardet-Biedl syndrome 1
  ENST ID: ENST00000524458
  CDS Start-End: 38-205
ggccaattcgaagtggttggatgcgcactacgacccaatggccaatatccacaccttttctgcctgcctagctggtggtaggggaccttggccctggtgggcagcagccccgcctgaaggtgctcaaaggaccactggtgatgaccgaaagcccgctacctgctctgccagctgctgctgccaccttcctcatggagcaacatgagccccggaccccagctctggcacttgcttcaggcccttgtgtctatgtgtataagaatctcagaccctacttcaagttcagcctgccccaattgcctccaaatcctctggaacaagacctttggaaccaggccaaagagggagacggcagaggagcctttgtccatccagtcactcaggtaaggaccctgtggagggccagggtttgggaggctccagggagaggaagcagccgccagaatgtgccagaatgatggaggagggcagcgaggccggggcctgcagatgccagttctctgtgtgtctaggtttctgcagctggagctaagtgaaatggaggcatttgtaaaccaacacaagtccaactccatcaagcggcagacagtcatcaccaccatgaccaccttgaagaagaacctggctgacgaggatgctgtgtcttgcctggtgctgggcaccgagaacaaggagctcctggtgcttgaccccgaggccttcaccattttagccaagatgagccttcccagcgtccccgtcttcctagaggtttctggccagtttgatgttgagttccggcttgccgcggcctgccgcaatggaaacatctatattctgagaagagactccaagcaccccaagtactgcatcgagctgagcgcccagcctgtgggacttatccgggtacac

SEQ ID NO: 110696 - DNA, 584 bp, Homo sapiens
  Payload ID: 1705
  Gene Symbol: BBS1
  Gene Name: Bardet-Biedl syndrome 1
  ENST ID: ENST00000526815
  CDS Start-End: 423-584
cggttgccaggacgacgcctgcgaagatggccgctgcgtcctcatcggattccgacgcctgcggagctgagaggtgaaggcagggctcctcaaggcctcttttcccacccgtgtaaagagggtcccttggtccccgggctctgggctcctgctgttctcgggcagtctggaaggactcttaagaggtcagatagggaaaccgaggcctaagatgtgcatatgtgtgtctggaggtcgctcggtgagccagtggcggagcctggacttgtacccagacgttctgtaccttatgttcagagtgacctgtaccagcttcctcaaagtttttttttcccctcccatgggactcactccccaactgtctttcccccacttccagcaatgaggccaattcgaagtggttggatgcgcactacgacccaatggccaatatccacaccttttctgcctgcctagcgctggcagatttacatggggatggggaatacaagctggtggtaggggaccttggccctggtgggcagcagccccgcctgaaggtgctcaaaggaccactggtgatgaccgaaagcccgctacctgct

SEQ ID NO: 110697 - DNA, 333 bp, Homo sapiens
  Payload ID: 1705
  Gene Symbol: BBS1
  Gene Name: Bardet-Biedl syndrome 1
  ENST ID: ENST00000524705
  CDS Start-End: 134-333
gcaatgaggccaattcgaagtggttggatgcgcactacgacccaatggccaatatccacaccttttctgcctgcctagcgctggcagatttacatggggatggggaatacaagctgctgctgccaccttcctcatggagcaacatgagccccggaccccagctctggcacttgcttcaggcccttgtgtctatgtgtataagaatctcagaccctacttcaagttcagcctgccccaattgcctccaaatcctctggaacaagacctttggaaccaggccaaagaggaccgaatcgaccccttaaccctgaaggagatgctggagagcatccg

SEQ ID NO: 110698 - DNA, 1934 bp, Homo sapiens
  Payload ID: 1705
  Gene Symbol: BBS1
  Gene Name: Bardet-Biedl syndrome 1
  ENST ID: ENST00000630659
  CDS Start-End: 6-263
cgaagatggccgctgcgtcctcatcggattccgacgcctgcggagctgagagcaatgaggccaattcgaagtggttggatgcgcactacgacccaatggccaatatccacaccttttctgcctgcctagctggtggtaggggaccttggccctggtgggcagcagccccgcctgaaggtgctcaaaggaccactggtgatgaccgaaagcccgctacctgctctgccagctgctgctgccaccttcctcatggagcaacatgagccccggaccccagctctggcacttgcttcaggcccttgtgtctatgtgtataagaatctcagaccctacttcaagttcagcctgccccaattgcctccaaatcctctggaacaagacctttggaaccaggccaaagaggaccgaatcgaccccttaaccctgaaggagatgctggagagcatccgggagacggcagaggagcctttgtccatccagtcactcaggtttctgcagctggagctaagtgaaatggaggcatttgtaaaccaacacaagtccaactccatcaagcggcagacagtcatcaccaccatgaccaccttgaagaagaacctggctgacgaggatgctgtgtcttgcctggtgctgggcaccgagaacaaggagctcctggtgcttgaccccgaggccttcaccattttagccaagatgagccttcccagcgtccccgtcttcctagaggtttctggccagtttgatgttgagttccggcttgccgcggcctgccgcaatggaaacatctatattctgagaagagactccaagcaccccaagtactgcatcgagctgagcgcccagcctgtgggacttatccgggtacacaaggtcctagtggtgggcagcacccaagacagcctgcatggcttcacccacaaggggaagaagctgtggacagtgcagatgcccgcagccatcctgaccatgaacctcctggagcagcattcccggggcctgcaggccgtcatggctgggctggccaatggagaggtccgcatttatcgtgacaaggccctgctcaatgtcatccacaccccggatgcagtgaccagcctttgctttggccggtacgggcgggaggacaacaccctcatcatgaccactcgaggtggtggcctgatcatcaagatcctgaagcgtacagcagtgtttgtagagggaggaagtgaggtgggtcccccaccagcccaggccatgaaactcaatgtgccccgaaagacccggctttacgtggatcagacactgcgagagcgggaggctggcaccgccatgcaccgggccttccagacagacctatacctgctgcgcctacgtgctgcccgcgcctacctgcaggccctcgagtccagcctgagccccctgtccacgacagcccgagagccactcaagctgcacgccgtggttcagggccttggccccacctttaagctcacacttcacctgcagaacacctcaacaacccgtcctgtcctggggctgctggtctgcttcctgtacaacgaggcgctctattccctgccccgggccttcttcaaggtacccttgctggtgccagggctcaactaccccctggagacctttgtggagagtctcagtaacaagggcatctcagacatcatcaaggtgctggtgcttcgagaaggccaaagtgcacccctgctgagtgcccacgtcaacatgcctgggagcgaggggctggcggccgcctgagacctgagctgctgtgaaagcccctgcacaatcagccagggagaactgggcgggtttagtggccccaggcccactcctcatgcagcagtgtgctggggcgacagctcgtctcccctctcttaagcacccgcttcctcaccacccccactgttgggcctatagtagcaggttagtgagtacct

SEQ ID NO: 110699 - DNA, 3595 bp, Homo sapiens
  Payload ID: 1706
  Gene Symbol: BBS10
  Gene Name: Bardet-Biedl syndrome 10
  Uniprot ID: Q8TAM1
  ENST ID: ENST00000393262
  CDS Start-End: 85-2256
attccgtttccggccgttcccacccctgttttcggtcggcccgggtgttctgcaagctggtcaaaaaggggaagcggcccagatatgttaagttctatggccgctgcagggtctgtgaaggcggcgttgcaggtggccgaggtgctggaagccatcgtgagctgctgcgtggggcccgagggacggcaagttttgtgtacgaagcccactggcgaggtgcttctcagccggaatggaggccgcctcctggaggcgctacacttagagcatcccatagccaggatgatagtggactgtgtttccagtcatctcaaaaaaacaggagatggtgcaaaaacatttattatctttctttgccatttgcttagaggacttcatgcaatcacagacagagaaaaggatcctttgatgtgtgaaaacattcaaacccatggaaggcattggaaaaattgttctcggtggaaatttatttcccaggctctcctaacgtttcagacacaaatattagacggtattatggaccagtacctaagtagacactttttgtctatcttttcgtctgctaaagagagaacattgtgtaggagctctttagagttgctcttagaagcatacttttgtggaagagtgggaagaaataatcataaatttatttcacagttgatgtgtgactactttttcaagtgtatgacttgtaaaagtgggattggtgtatttgagttagtggatgaccattttgtagagttgaatgttggtgtcactggccttcctgtttcagattccaggatcatagctggtcttgtgcttcagaaagatttttctgtgtaccgcccagcagatggtgacatgcgaatggtgatagtaacagaaaccattcagcctcttttttccacttctggatcagagtttattctaaattcagaagcacagtttcagacatctcaattttggattatggaaaagacaaaagcaataatgaaacatctacatagtcagaatgtaaaattgctcatatctagtgtgaaacaaccagatttagttagttattatgcaggggtgaatggcatatcagtggttgagtgtttatcatcagaagaagtttctcttatccggaggatcattggtctttctccatttgtaccaccacaggccttttcgcagtgtgaaatacctaacactgctttggtgaaattttgtaaacctcttatccttagatccaaaagatatgttcatctaggcttgataagcacatgtgcatttataccacactctatagttctttgtggaccagtgcatggtctcattgaacaacatgaggatgctttacatggagcacttaaaatgcttcggcaattatttaaagaccttgatctaaattacatgacacaaaccaatgaccaaaatggcacttcaagtctttttatttataagaacagtggagaaagttatcaagcaccagatcctggtaatggctcaatacaaaggccttatcaggacacagttgcagagaacaaagatgcattggaaaaaactcaaacatatttaaaagtacattctaatttggtaattccagatgtagaattagaaacatatattccgtattcaacccccacactgacaccaacagatacattccaaacagttgaaacgctgacatgtttgtctttggaaagaaacaggctaactgattattatgaaccattactcaagaacaattccactgcttattcaacaaggggaaatagaatagaaatttcttacgaaaatttacaggtcacaaatattactagaaagggaagcatgttaccagtgagctgtaagttaccgaatatgggtacttcccagagttacctttcctcatctatgccagctggttgtgttttgccagtaggtggtaattttgagatcttgttacattactatcttctcaattatgccaaaaaatgccatcaatcagaagaaaccatggttagtatgataatagctaatgcacttttaggcattcccaaagtcctttataaatctaaaacaggaaagtacagctttccacatacatatataagagctgtccatgcactgcaaaccaatcaacccttggtaagcagtcagacaggtttggaatcagtaatgggtaaataccagctactaacttcagttcttcagtgtttgacaaaaatattaaccattgacatggtaatcactgttaagagacaccctcagaaagttcacaatcaagattcagaagatgaactataacatcagaagtttttaattaaccaaacttttcatctaactcaagccaagtaaagcagtcatgtgaccactggttctaaagtcagttcagtctacttaggaaaatagcgtaactttaaaagtctttagaagaagcacactaaggtcaccagaccagatacaaatattaaattactttatggaacaaatctagaggggaagccaagatttggctaagtgtgtctgttttttccctattttatgcctctgtgtctcagctctgtgttagcctatgtgtttaggggagggtttttctttatagctcctttttactctcctgtatctttttcactccagccctccttcatcgttacatgtttagttcatagaatcatttaatctctgatttgggtgggcttattctaattgtttttaatattgaatacattatttgcattaattttccctactcatactttgtaaagctgagtaaaaggctcaaattatttttttcaaaaagcataaaattaaattagcagtgagtaaaaggctcaaattttttttcaaaaagcataaaattaatttttacttttatgtggtcattggtttactgccacttcatttggaaaacttggatagattttcacctttgatatacctttgaatatatgttacctgaaatataactgtgcattgttaactctttcatttctgtagtaaaaggttaatactagaaaggatatgcaattaatactttgattttctcctgaccccaagagcttgtaaggatatgtcatgtatttactggtttttcttgtatctggtgcatagccagagttccacagtaacaaataatttgacaatttttatttctaatgtttatttctgttttatttttaatttttatttctaatttatttcatttacaaatgttcatattttaaaaacttgtcaatgtaaataatatgatgcatcttatcatggacaaggacagtgttttctacctttatcagttctctgtaatacccaaaacagtgctgtatttactccaagtattcagaagtgcttgttgaacaaaacagtgttatctttaattcattcctttaaatacatgtttccagtttacttattcaacagattcttacttgggattgactgaagaaaaaaaactttaattatagttgaataagtgttgactaatgtattttaaaaactataatatcaaaattttttatattaaatgtaattctgattttttaaacatttatgctatatgatgcattattttgtttctgtgaatatggagagaataaattagctcttttgctgaattcatggatgaatgaactttaaaactgctgca

SEQ ID NO: 110700 - DNA, 3244 bp, Homo sapiens
  Payload ID: 1707
  Gene Symbol: BBS12
  Gene Name: Bardet-Biedl syndrome 12
  Uniprot ID: Q6ZW61
  ENST ID: ENST00000314218
  CDS Start-End: 194-2326
gtctcttagcaactaagcccccggctcctccagaagcccctcttcgcacatgcgcaaactgcggacggggaactgggctccctagccctggcgtttttggtgttgctgtcccagccagaatcgcgtctggccggtgggaagccgggaactccagccccctgtaggagaggagaaaggagcgagatcatgatacatggtgatggcttgcagagtcgtaaacaaaagaagacacatgggacttcaacaactttcatcattcgcggaaacaggaagaactttcctaggcccactaaaatcatccaaatttattatagatgaagaatgtcatgaaagtgtattaatcagttcaacagtaaggcttcttgaaagtttggatttaaccagtgcagtgggacaacttctcaatgaagcagttcaagcacaaaacaacacatatagaactggaatcagtactcttttgtttcttgttggtgcttggagcagtgcagttgaagaatgtcttcatcttggtgtccccatttccataatagtatcagtaatgtcagaaggcttaaacttttgtagtgaagaggtagtttctcttcatgtacctgttcacaatatatttgactgtatggacagcacaaaaacattttctcaacttgaaacatttagtgtaagtttgtgtccttttctacaggtcccttcagatactgatttgatagaggaattgcatggtctcaaagatgttgcctctcaaacactgaccatttccaacctttctgggagacctcttaaatcatatgaattatttaaacctcagacaaaggttgaagcagataacaacacatcacgaactctgaaaaacagcctgcttgcagatacctgctgcagacagtcaatactaatccacagtaggcattttaataggacagataatactgaaggggtaagcaaaccagatggatttcaagaacatgttacagctactcacaaaacttacagatgtaatgatttggtagagttggcagtaggcttgagtcatggagatcacagcagcatgaagttagtagaagaagcagtacagctgcaatatcagaatgcttgtgtgcaacaaggcaactgtacaaaaccatttatgtttgacatttcaagaattttcacttgctgtctaccaggcttacctgaaacttcttcttgtgtttgtccaggatatatcactgttgtgtcagtatctaataatcctgtgatcaaggaattgcagaatcagcctgtgcgaatagttctcattgagggtgacctcacagagaattaccgccacctgggatttaataagtctgcaaatattaaaacagtattagatagcatgcggcttcaagaagacagctcagaagaactgtgggcaaatcacgtgttacaggtgttaatccagttcaaggtgaaccttgtcctggtacaaggaaatgtgtccgaacgcttaattgaaaaatgtataaacagtaagcggttggtaatcggctcagtgaatggcagtgtgatgcaggcttttgcagaggctgcaggagcagtacaggtggcctacattacacaagtgaatgaagattgtgtgggcgacggggtctgcgtgaccttctggagaagcagccctttggatgttgtagataggaacaacagaatcgcaatcttattaaaaacagaaggaattaatttggttacggccgtgctcactaacccagttactgcacagatgcaaatcaaagaagataggttctggacatgtgcctatcgtttgtattatgctctaaaagaggaaaaggtcttccttggaggtggtgcagttgaatttttgtgtcttagctgtcttcatattcttgcagagcaatctctgaaaaaagaaaaccatgcctgctcagggtggctgcataatacttcctcttggctggcttcatctctggcaatatacagaccaactgtgcttaaattcctggcaaatggatggcagaaatacctttcaactctcctatataacactgccaattactcatcagaatttgaagccagcacatacattcaacatcatctgcaaaatgccacagactctggctctccttcatcttacatcttgaatgaatatagtaaactaaatagtagaatttttaattcagacatttcaaataaactggagcagattccgagagtttatgacgttgttacaccaaagattgaggcgtggcgccgagcattggatttagtattgttagtacttcagacagacagtgaaataattactggacatggacacacacagataaattcacaggaattaacgggctttctatttttgtagtgttactggctaagtctttggaaaataatttttcataatatgtcatgctaataataaatatattgatagccaagtcatggtgcctaaaatgccagctattgccaagaagaaaatagttgatgtctgtcaataactgtgcatggtctgagattttaccctacttataagctaacaagttagcctgttactgtttcgtgggatgctacagaatgcataagacacctgggtcagaaacaaaggacttatcgctcacagcaaaagctgtagccagagcttcatgttggttttattcagttcctcatttttctagttcccacaggaggaacacaaagggcccatgatgaaagcctgcacacagtgggttatgttgtaagcttgggttattaactgcttttatagtaagcaaaaaaatcctggtctttgtccaaagggagttattaccccatacttgaagatagcttagtgtaaacacaagcctaggacatggactaggtaaagacaaagtccttgcattcttgacatacccagtaagtatgcagggacactcagagcccatagtggatagtctcttccaacagtctgctcctcagcctgagatgttcttggccaaacttgaattttcacatgagtatgccactctatcagctactctgattaacctgacagtcgggttgtttagtcagtaccaaatttgttcatttggtctcatatagcaattaatgcaggctattatcagacacagcagcaggatgaagccaacctgcagtattaacctcagtcctgtcccccaaggtcttgactcaatcaactctaagttccaagggaggaccaataggtctttttattaggcagccagaatgtagtgaaggacaatttattatactttatgacccaataaagggagctttgactgacgta

SEQ ID NO: 110701 - DNA, 859 bp, Homo sapiens
  Payload ID: 1707
  Gene Symbol: BBS12
  Gene Name: Bardet-Biedl syndrome 12
  ENST ID: ENST00000433287
  CDS Start-End: 287-859
tttggtgttgctgtcccagccagaatcgcgtctggccggtgggaagccgggaactccagccccctgtaggagaggagaaaggagcgaggcaggagaggaaaacaagtgcaaagtgcattcttgaagcactctgtcaaatcacttttcatgcttcattgagtagaaacatggcacattttccaaagccatcagcctgtcttgttcatattatatcccagacagacacgcaagtattgtaatcattgataaaaatctcattaggcttctggaaaatagatcatgatacatggtgatggcttgcagagtcgtaaacaaaagaagacacatgggacttcaacaactttcatcattcgcggaaacaggaagaactttcctaggcccactaaaatcatccaaatttattatagatgaagaatgtcatgaaagtgtattaatcagttcaacagtaaggcttcttgaaagtttggatttaaccagtgcagtgggacaacttctcaatgaagcagttcaagcacaaaacaacacatatagaactggaatcagtactcttttgtttcttgttggtgcttggagcagtgcagttgaagaatgtcttcatcttggtgtccccatttccataatagtatcagtaatgtcagaaggcttaaacttttgtagtgaagaggtagtttctcttcatgtacctgttcacaatatatttgactgtatggacagcacaaaaacattttctcaacttgaaacatttagtgtaagtttgtgtccttttctacaggtcccttcagatactgatttgatagaggaattgcatggtctcaaagatgttgcctctcaaacactgaccatttccaacctttctggg

SEQ ID NO: 110702 - DNA, 3431 bp, Homo sapiens
  Payload ID: 1707
  Gene Symbol: BBS12
  Gene Name: Bardet-Biedl syndrome 12
  Uniprot ID: Q6ZW61
  ENST ID: ENST00000542236
  CDS Start-End: 382-2514
gtctcttagcaactaagcccccggctcctccagaagcccctcttcgcacatgcgcaaactgcggacggggaactgggctccctagccctggcgtttttggtgttgctgtcccagccagaatcgcgtctggccggtgggaagccgggaactccagccccctgtaggagaggagaaaggagcgaggcaggagaggaaaacaagtgcaaagtgcattcttgaagcactctgtcaaatcacttttcatgcttcattgagtagaaacatggcacattttccaaagccatcagcctgtcttgttcatattatatcccagacagacacgcaagtattgtaatcattgataaaaatctcattaggcttctggaaaatagatcatgatacatggtgatggcttgcagagtcgtaaacaaaagaagacacatgggacttcaacaactttcatcattcgcggaaacaggaagaactttcctaggcccactaaaatcatccaaatttattatagatgaagaatgtcatgaaagtgtattaatcagttcaacagtaaggcttcttgaaagtttggatttaaccagtgcagtgggacaacttctcaatgaagcagttcaagcacaaaacaacacatatagaactggaatcagtactcttttgtttcttgttggtgcttggagcagtgcagttgaagaatgtcttcatcttggtgtccccatttccataatagtatcagtaatgtcagaaggcttaaacttttgtagtgaagaggtagtttctcttcatgtacctgttcacaatatatttgactgtatggacagcacaaaaacattttctcaacttgaaacatttagtgtaagtttgtgtccttttctacaggtcccttcagatactgatttgatagaggaattgcatggtctcaaagatgttgcctctcaaacactgaccatttccaacctttctgggagacctcttaaatcatatgaattatttaaacctcagacaaaggttgaagcagataacaacacatcacgaactctgaaaaacagcctgcttgcagatacctgctgcagacagtcaatactaatccacagtaggcattttaataggacagataatactgaaggggtaagcaaaccagatggatttcaagaacatgttacagctactcacaaaacttacagatgtaatgatttggtagagttggcagtaggcttgagtcatggagatcacagcagcatgaagttagtagaagaagcagtacagctgcaatatcagaatgcttgtgtgcaacaaggcaactgtacaaaaccatttatgtttgacatttcaagaattttcacttgctgtctaccaggcttacctgaaacttcttcttgtgtttgtccaggatatatcactgttgtgtcagtatctaataatcctgtgatcaaggaattgcagaatcagcctgtgcgaatagttctcattgagggtgacctcacagagaattaccgccacctgggatttaataagtctgcaaatattaaaacagtattagatagcatgcggcttcaagaagacagctcagaagaactgtgggcaaatcacgtgttacaggtgttaatccagttcaaggtgaaccttgtcctggtacaaggaaatgtgtccgaacgcttaattgaaaaatgtataaacagtaagcggttggtaatcggctcagtgaatggcagtgtgatgcaggcttttgcagaggctgcaggagcagtacaggtggcctacattacacaagtgaatgaagattgtgtgggcgacggggtctgcgtgaccttctggagaagcagccctttggatgttgtagataggaacaacagaatcgcaatcttattaaaaacagaaggaattaatttggttacggccgtgctcactaacccagttactgcacagatgcaaatcaaagaagataggttctggacatgtgcctatcgtttgtattatgctctaaaagaggaaaaggtcttccttggaggtggtgcagttgaatttttgtgtcttagctgtcttcatattcttgcagagcaatctctgaaaaaagaaaaccatgcctgctcagggtggctgcataatacttcctcttggctggcttcatctctggcaatatacagaccaactgtgcttaaattcctggcaaatggatggcagaaatacctttcaactctcctatataacactgccaattactcatcagaatttgaagccagcacatacattcaacatcatctgcaaaatgccacagactctggctctccttcatcttacatcttgaatgaatatagtaaactaaatagtagaatttttaattcagacatttcaaataaactggagcagattccgagagtttatgacgttgttacaccaaagattgaggcgtggcgccgagcattggatttagtattgttagtacttcagacagacagtgaaataattactggacatggacacacacagataaattcacaggaattaacgggctttctatttttgtagtgttactggctaagtctttggaaaataatttttcataatatgtcatgctaataataaatatattgatagccaagtcatggtgcctaaaatgccagctattgccaagaagaaaatagttgatgtctgtcaataactgtgcatggtctgagattttaccctacttataagctaacaagttagcctgttactgtttcgtgggatgctacagaatgcataagacacctgggtcagaaacaaaggacttatcgctcacagcaaaagctgtagccagagcttcatgttggttttattcagttcctcatttttctagttcccacaggaggaacacaaagggcccatgatgaaagcctgcacacagtgggttatgttgtaagcttgggttattaactgcttttatagtaagcaaaaaaatcctggtctttgtccaaagggagttattaccccatacttgaagatagcttagtgtaaacacaagcctaggacatggactaggtaaagacaaagtccttgcattcttgacatacccagtaagtatgcagggacactcagagcccatagtggatagtctcttccaacagtctgctcctcagcctgagatgttcttggccaaacttgaattttcacatgagtatgccactctatcagctactctgattaacctgacagtcgggttgtttagtcagtaccaaatttgttcatttggtctcatatagcaattaatgcaggctattatcagacacagcagcaggatgaagccaacctgcagtattaacctcagtcctgtcccccaaggtcttgactcaatcaactctaagttccaagggaggaccaataggtctttttattaggcagccagaatgtagtgaaggacaatttattatactttatgacccaataaagggagctttgactgacgt

SEQ ID NO: 110703 - DNA, 2963 bp, Homo sapiens
  Payload ID: 1708
  Gene Symbol: BBS2
  Gene Name: Bardet-Biedl syndrome 2
  Uniprot ID: Q9BXC9
  ENST ID: ENST00000245157
  CDS Start-End: 422-2587
tgtcaagtttgcagggtgcagcttggatgtggtgctagaaggggaagcctctgggctgagcatgtaggctcgtcagtagagttcaacccgcaggagtaaattactgcagtgggaaacaaccgcacccgcggcccagcaggggttccactgcgcagccgcaaaaggcgccgaggctccactgcgcagccacagaaggcgccgaggctccaccgcgcagccgcaaaaagagcggacgggtctgcgccgccgcaggaggagcaggcggtacctggacgggttcgtcccgggctgtttcgcgtccggcctgaggcggctggggccgcgcaggtagtgtccctgcacttcttgcccgggcgcgtgaggccagctccgctgcgcttgtctccagcttccagccctcctcccctaagccgccgccatcatgctgctgcctgtgttcaccctgaaactgcgccacaaaatcagcccccgaatggtggccatagggcgctacgacgggactcacccgtgcctggcggccgccacccaaacgggcaaggtttttattcataatcctcatacacggaaccagcatgtcagtgcatccagggtcttccagagccccctggaatctgatgtttctcttctcagcattaaccaggcagtcagctgtctgactgcaggcgtattgaaccctgagcttggctatgatgcccttttagtggggacacagactaatcttttggcttatgatgtctacaataattcggatttgttctacagagaggtagcagatggggcaaatgcaattgtgctggggacattgggagacatttcttcccctcttgcgattattggtggcaattgtgctctgcaaggtttcaatcatgaaggaagtgatctcttttggacggttactggagacaatgttaattccttggccttgtgtgactttgatggtgatggaaagaaagagcttcttgttggatctgaggattttgatatccgagtttttaaggaagatgagattgtggcagaaatgacagaaacagagatagtcacctctctttgtcccatgtatggcagtcgatttggttatgccctttccaatggcacagttggagtttatgacaaaacatcccgatactggagaattaaatcgaaaaatcatgccatgagcattcatgcttttgaccttaattctgatggagtgaatgaactgataactggttggtccaatgggaaggttgatgctcgaagtgaccgaactggggaggtcatctttaaggacaatttttcttctgcaattgccggtgtggtagagggagattaccggatggatggccacatacagttaatctgctgctcagtggatggggaaatccggggctacctgcctggcacggctgagatgaggggcaacctcatggacaccagtgcagagcaggacctgatccgagagctgagtcagaagaagcagaatctgttgctggaactccgtaactatgaggaaaatgccaaggctgaattggccagtccactgaacgaggctgatgggcatcggggcataatcccagccaataccaggctccacaccacgctctcagtcagcctggggaatgagacccaaactgctcatacagaattacgcatttccacttctaatgacaccatcatccgagcagtattgatttttgcagaaggaatttttacaggtgaaagccacgtggtacatcccagcattcacaacctctccagttccatctgcatccctattgtgcctcccaaagatgtccctgtggatctgcacttgaaggcattcgtgggttacagaagcagcacccagtttcatgtatttgaatcgacaagacagctccctcgattctccatgtatgcgctgaccagcctggaccctgccagtgagccaatcagttatgttaactttaccattgcagaacgggcacagagggttgttgtatggctcggtcagaactttctgttaccagaagacactcacattcagaatgctccatttcaagtgtgtttcacatctttacggaatggcggccacctgcatataaaaataaaacttagtggagagatcactataaatactgatgatattgatttggctggtgatatcatccagtcaatggcatcattttttgctattgaagaccttcaagtagaagcggattttcctgtctattttgaggaattacgaaaggtgctagttaaggtggatgaatatcattcagtgcatcagaagctcagtgctgatatggctgatcattctaatttgatccgaagtttgctggtcggagctgaggatgctcgtctgatgagggacatgaaaacaatgaagagtcgttatatggaactctatgaccttaatagagacttgctaaatggatataaaattcgctgtaacaatcacacagagctgttgggaaacctcaaagcagtaaatcaagcaattcaaagagcaggtcgtctgcgggttggaaaaccaaagaaccaggtgatcactgcttgtcgggatgcaattcgaagcaataacatcaacacactgttcaaaatcatgcgagtggggacagcttcttcctaggtgaggaaaatacaggtcatgaagttcctggcaaagattttctgttaaaaacctatgctggtttgctttggatcacaccctggtgaaccccgggtgctaagaatgaaaataaccttggtgagttgtacaaattaaagacaaagaactacatgtgaagatagacttgctttctatttttaaatcagtagtagtactgttgctgaataatactaggtttttatggaataggatgaatgcttttgaagtattagggcttcagagtccaattttgcttatttatggtatataaatacatatttttttcttgaaattgcaattgagtttgtacttttcaaatagattatctactttttcattaaaatgtaaagatgttaaa

SEQ ID NO: 110704 - DNA, 588 bp, Homo sapiens
  Payload ID: 1708
  Gene Symbol: BBS2
  Gene Name: Bardet-Biedl syndrome 2
  ENST ID: ENST00000561877
  CDS Start-End: 1-229
caacctctccagttccatctgcatccctattgtgcctcccaaagatgtccctgtggatctgcacttgaaggcattcgtgggttacagaagcagcacccagtttcatgtatttgaatcgacaagacagctccctcgattctccatgtatgcgctgaccagcctggaccctgccagtgagccaatcagttatgttaactttaccattgcagaacgggcacagaggcagtaaaactagaaagaaggagaactcttccctcaagaatggctgtaccttcatatctagaggcacattaaaaaaaagaacgtctgtaccttaaaaatggaggtcatttcattgtgttcattttcaaggttgttgtatggctcggtcagaactttctgttaccagaagacactcacattcagaatgctccatttcaagtgtgtttcacatctttacggaatggcggccacctgcatataaaaataaaacttagtggagagatcactataaatactgatgatattgatttggctggtgatatcatccagtcaatggcatcattttttgctattgaagaccttcaagtagaagcggattttcctgtc

SEQ ID NO: 110705 - DNA, 865 bp, Homo sapiens
  Payload ID: 1708
  Gene Symbol: BBS2
  Gene Name: Bardet-Biedl syndrome 2
  ENST ID: ENST00000562012
  CDS Start-End: 1-360
gatgagattgtggcagaaatgacagaaacagagatagtcacctctctttgtcccatgtatggcagtcgatttggttatgccctttccaatggcacagttggagtttatgacaaaacatcccgatactggagaattaaatcgaaaaatcatgccatgagcattcatgcttttgaccttaattctgatggagtgaatgaactgataactggttggtccaatgggaaggttgatgctcgaagtgaccgaactggggaggtcatctttaaggacaatttttcttctgcaattgccggtgtggtagagggagattaccggatggatggccacatacatccggggctacctgcctggcacggctgagatgaggggcaacctcatggacaccagtgcagagcaggacctgatccgagagctgagtcagaagaagcagaatctgttgctggaactccgtaactatgaggaaaatgccaaggctgaattggccagtccactgaacgaggctgatgggcatcggggcataatcccagccaataccaggctccacaccacgctctcagtcagcctggggaatgagacccaaactgctcatacagaattacgcatttccacttctaatgacaccatcatccgagcagtattgatttttgcagaaggaatttttacaggtgaaagccacgtggtacatcccagcattcacaacctctccagttccatctgcatccctattgtgcctcccaaagatgtccctgtggatctgcacttgaaggcattcgtgggttacagaagcagcacccagtttcatgtatttgaatcgacaagacagctccctcgattctccatgtatgcgctgaccagcctggaccct

SEQ ID NO: 110706 - DNA, 2623 bp, Homo sapiens
  Payload ID: 1708
  Gene Symbol: BBS2
  Gene Name: Bardet-Biedl syndrome 2
  ENST ID: ENST00000568104
  CDS Start-End: 180-2207
gccgccgcaggaggagcaggcggtacctggacgggttcgtcccgggctgtttcgcgtccggcctgaggcggctggggccgcgcaggtagtgtccctgcacttcttgcccgggcgcgtgaggccagctccgctgcgcttgtctccagcttccagccctcctcccctaagccgccgccatcatgctgctgcctgtgttcaccctgaaactgcgccacaaaatcagcccccgaatggtggccatagggcgctacgacgggactcacccgtgcctggcggccgccacccaaacgggcaaggtttttattcataatcctcatacacggaaccagcatgtcagtgcatccagggtcttccagagccccctggaatctgatgtttctcttctcagcattaaccaggcagtcagctgtctgactgcaggcgtattgaaccctgagcttggctatgatgcccttttagtggggacacagactaatcttttggcttatgatgtctacaataattcggatttgttctacagagaggtagcagatggggcaaatgcaattgtgctggggacattgggagacatttcttcccctcttgcgattattggtggcaattgtgctctgcaaggtttcaatcatgaaggaagtgatctcttttggacggttactggagacaatgttaattccttggccttgtgtgactttgatggtgatggaaagaaagagcttcttgttggatctgaggattttgatatccgagtttttaaggaagatgagattgtggcagaaatgacagaaacagagatagtcacctctctttgtcccatgtatggcagtcgatttggttatgccctttccaatggcacagttggagtttatgacaaaacatcccgatactggagaattaaatcgaaaaatcatgccatgagcattcatgcttttgaccttaattctgatggagtgaatgaactgataactggttggtccaatgggaaggttgatgctcgaagtgaccgaactggggaggtcatctttaaggacaatttttcttctgcaattgccggtgtggtagagggagattaccggatggatggccacatacagttaatctgctgctcagtggatggggaaatccggggctacctgcctggcacggctgagatgaggggcaacctcatggacaccagtgcagagcaggacctgatccgagagctgagtcagaagaagcagaatctgttgctggaactccgtaactatgaggaaaatgccaaggctgaattggccagtccactgaacgaggctgatgggcatcggggcataatcccagccaataccaggctccacaccacgctctcagtcagcctggggaatgagacccaaactgctcatacagaattacgcatttccacttctaatgacaccatcatccgagcagtattgatttttgcagaaggaatttttacaggtgaaagccacgtggtacatcccagcattcacaacctctccagttccatctgcatccctattgtgcctcccaaagatgtccctgtggatctgcacttgaaggcattcgtgggttacagaagcagcacccagtttcatgtatttgaatcgacaagacagctccctcgattctccatgtatgcgctgaccagcctggaccctgccagtgagccaatcagttatgttaactttaccattgcagaacgggcacagagggttgttgtatggctcggtcagaactttctgttaccagaagacactcacattcagaatgctccatttcaagtgtgtttcacatctttacggaatggcggccacctgcatataaaaataaaacttagtggagaggtggatgaatatcattcagtgcatcagaagctcagtgctgatatggctgatcattctaatttgatccgaagtttgctggtcggagctgaggatgctcgtctgatgagggacatgaaaacaatgaagagtcgttatatggaactctatgaccttaatagagacttgctaaatggatataaaattcgctgtaacaatcacacagagctgttgggaaacctcaaagcagtaaatcaagcaattcaaagagcaggtcgtctgcgggttggaaaaccaaagaaccaggtgatcactgcttgtcgggatgcaattcgaagcaataacatcaacacactgttcaaaatcatgcgagtggggacagcttcttcctaggtgaggaaaatacaggtcatgaagttcctggcaaagattttctgttaaaaacctatgctggtttgctttggatcacaccctggtgaaccccgggtgctaagaatgaaaataaccttggtgagttgtacaaattaaagacaaagaactacatgtgaagatagacttgctttctatttttaaatcagtagtagtactgttgctgaataatactaggtttttatggaataggatgaatgcttttgaagtattagggcttcagagtccaattttgcttatttatggtatataaatacatatttttttcttgaaattgcaattgagtttgtacttttcaaatagattatctactttttcattaaaatgtaaagatgttaaactttgtgttgattgattataaaatcaccaccaaatcagaa

SEQ ID NO: 110707 - DNA, 564 bp, Homo sapiens
  Payload ID: 1708
  Gene Symbol: BBS2
  Gene Name: Bardet-Biedl syndrome 2
  ENST ID: ENST00000569941
  CDS Start-End: 550-564
actgggggaaagtctgactcctgagatccttgttgctcttgacaaaaattgcaaactctttccattccggtttttattcataatcctcatacacggaaccagcatgtcagtgcatccagggtcttccagagccccctggaatctgatgtttctcttctcagcattaaccaggcagtcagctgtctgactgcaggcgtattgaaccctgagcttggctatgatgcccttttagtggggacacagactaatcttttggcttatgatgtctacaataattcggatttgttctacagagaggtagcagatggggcaaatgcaattgtgctggggacattgggagacatttcttcccctcttgcgattattggtggcaattgtgctctgcaaggtttcaatcatgaaggaagtgatctcttttggacggttactggagacaatgttaattccttggccttgtgtgactttgatggtgatggaaagaaagagcttcttgttggatctgaggattttgatatccgagtttttaaggaagatgagattgtggcagaaatgacagaaacagag

SEQ ID NO: 110708 - DNA, 395 bp, Homo sapiens
  Payload ID: 1708
  Gene Symbol: BBS2
  Gene Name: Bardet-Biedl syndrome 2
  ENST ID: ENST00000564123
  CDS Start-End: 1-256
gaaaacaatgaagagtcgttatatggaactctatgaccttaatagagacttgctaaatggatataaaattcgctgtaacaatcacacagagctgttgggaaacctcaaagcagtaaatcaagcaattcaaagagcaggtcgtctgcgggttggaaaaccaaagaaccaggtgatcactgcttgtcgggatgcaattcgaagcaataacatcaacacactgttcaaaatcatgcgagtggggacagcttcttcctagtctttacctggtgaaaggacacaggagatacttcaaagaaaaccagtttgttccacgaagggataagagacttgacaatctgcttcggctgaaagtgttctgcaccaggaaagaacacatcaataaattatcattaacc

SEQ ID NO: 110709 - DNA, 641 bp, Homo sapiens
  Payload ID: 1708
  Gene Symbol: BBS2
  Gene Name: Bardet-Biedl syndrome 2
  ENST ID: ENST00000564459
  CDS Start-End: 1-429
cttcaagtagaagcggattttcctgtctattttgaggaattacgaaaggtgctagttaaggtggatgaatatcattcagtgcatcagaagctcagtgctgatatggctgatcattctaatttgatccgaagtttgctggtcggagctgaggatgctcgtctgatgagggacatgaaaacaatgaagagtcgttatatggaactctatgaccttaatagagacttgctaaatggatataaaattcgctgtaacaatcacacagagctgttgggaaacctcaaagcagtaaatcaagcaattcaaagagcaggtcgtctgcgggttggaaaaccaaagaaccaggtgatcactgcttgtcgggatgcaattcgaagcaataacatcaacacactgttcaaaatcatgcgagtggggacagcttcttcctaggggccaagaaatgaagcttcaggcctgtgaagttggagagcagcaagaatagtgcctcagagcgaaataacttcatgcactccttcaatatctcaggaagcttactctcctcagctttctcataaaacctgaaaaacagcaatgtcaagttgttcatcaaagccacagatgtaaaatgactcacagaataaaagctgatcgttagctttgta

SEQ ID NO: 110710 - DNA, 2490 bp, Homo sapiens
  Payload ID: 1709
  Gene Symbol: BBS4
  Gene Name: Bardet-Biedl syndrome 4
  Uniprot ID: Q96RK4
  ENST ID: ENST00000268057
  CDS Start-End: 42-1601
aaccgccgacttccggccgcgcagcggtgggctgagctaaaatggctgaggagagagtcgcgacgagaactcaatttcctgtatctactgagtctcaaaaaccccggcagaaaaaagctccagagtttcctattttggagaagcagaactggttgattcatcttcattatatccggaaagattatgaagcctgcaaggctgttatcaaagaacagcttcaagagactcagggattgtgtgaatatgctatctatgtccaagcattgatatttcgcctagaaggaaatatccaagaatccctagaactcttccagacatgtgcagttcttagtcctcagagtgctgataacctcaagcaggtggccagatctttatttcttttgggaaaacataaagctgccattgaagtatataatgaagcagctaaactcaaccagaaagattgggagatcagccataacctaggagtttgctacatatacctgaagcagttcaacaaggcacaagaccagttgcacaatgccctgaatcttaataggcacgatctgacttatataatgctggggaagatccacttgctggagggagacttggacaaggccattgaagtctacaagaaagcagtggagttctcaccagaaaatacagagcttcttacaactttaggattactctacttacagctcggcatttaccagaaggcatttgaacatcttggcaatgcactgacttatgaccctaccaactacaaggccatcttggcagcaggcagcatgatgcagacccacggggactttgatgttgccctcaccaaatacagagttgtggcttgtgctgttccagaaagtcctccactctggaataacattggaatgtgtttctttggcaagaagaaatatgtggcggccatcagctgcctgaaacgagccaactacttggcaccctttgattggaagattctgtataatttgggccttgtccatttgaccatgcagcagtatgcatcagcttttcattttctcagtgcggccatcaacttccagccaaagatgggggagctctacatgctcttggcagtggctctgaccaatctggaagatatagaaaatgccaagagagcctacgcagaagcagtccacctggataagtgtaaccctttagtaaacctgaactatgctgtgctgctgtacaaccagggcgagaagaagaacgccctggcccaatatcaggagatggagaagaaagtcagcctactcaaggacaatagctctctggaatttgactctgagatggtggagatggctcagaagttgggagctgctctccaggttggggaggcactggtctggaccaaaccagttaaagatcccaaatcaaagcaccagaccacttcaaccagcaaacctgccagtttccagcagcctctgggctctaatcaagctctaggacaggcaatgtcttcagcagctgcatacaggacgctcccctcaggtgctggaggaacatcccagttcacaaagcccccatctcttcctctggagccagagcctgcggtggaatcaagtccaactgaaacatcagaacaaataagagagaaataagaatagaatgaatgaccccaaaatagggttttcttgggcgaggatgtgctggattaggaaaggtgacatgacacaggcagagcagagtggcacccaccacagaatacagtgtgtgttattacgaggagccagcagttgagcctaaggtccttctacctacctggtattggcatttgaggtcggaaaccctctactgccccataagccaggaaaagtgaaaagagaacacagttcctttaagaactggcagcaaggcttgaggccttatgtatgtagctgagtcagcaaggtacatgatgctgtctgctttcaaaaggacttttctctcctagctgactgactccttccttagttcaaggaacagctgagacagacctctgctgagtagctctgtgatgacaaagccttggtttaactgaggtgatcctcaggttgtgaggtttattagtccccaaggcaaacacaaatattagattaataatccaactttaatagtatacatttaaaagaaaaaaaacaaaagccctggaagttgaggccaagcctgctgagtattgcagctgcatttgcccaaagggaatccagaacaagtccctccctgtattttgttcttgagaggggtcagtctagaagctagatcctatcaggatgaggagcagcagcccagggcttgtctggatcagcaccaacgattttaaagaaaaaaggaagagtttcttagatgagtaattgttattgaagatagtcagtgataaccactgaccagatgctatcaatacactatgtgtcctttttagaataaagattacatatcatcattcctttggggaaaattgttattcaggtataaaaacaagagatcataataaaaacctaaaagaacctatga

SEQ ID NO: 110711 - DNA, 2450 bp, Homo sapiens
  Payload ID: 1709
  Gene Symbol: BBS4
  Gene Name: Bardet-Biedl syndrome 4
  Uniprot ID: Q96RK4
  ENST ID: ENST00000395205
  CDS Start-End: 519-1562
gtctgggaaaccgccgacttccggccgcgcagcggtgggctgagctaaaatggctgaggagagagtcgcgacgctccagagtttcctattttggagaagcagaactggttgattcatcttcattatatccggaaagattatgaagcctgcaaggctgttatcaaagaacagcttcaagagactcagggattgtgtgaatatgctatctatgtccaagcattgatatttcgcctagaaggaaatatccaagaatccctagaactcttccagacatgtgcagttcttagtcctcagagtgctgataacctcaagcaggtggccagatctttatttcttttgggaaaacataaagctgccattgaagtatataatgaagcagctaaactcaaccagaaagattggcctaggagatcagccataacctaggagtttgctacatatacctgaagcagttcaacaaggcacaagaccagttgcacaatgccctgaatcttaataggcacgatctgacttatataatgctggggaagatccacttgctggagggagacttggacaaggccattgaagtctacaagaaagcagtggagttctcaccagaaaatacagagcttcttacaactttaggattactctacttacagctcggcatttaccagaaggcatttgaacatcttggcaatgcactgacttatgaccctaccaactacaaggccatcttggcagcaggcagcatgatgcagacccacggggactttgatgttgccctcaccaaatacagagttgtggcttgtgctgttccagaaagtcctccactctggaataacattggaatgtgtttctttggcaagaagaaatatgtggcggccatcagctgcctgaaacgagccaactacttggcaccctttgattggaagattctgtataatttgggccttgtccatttgaccatgcagcagtatgcatcagcttttcattttctcagtgcggccatcaacttccagccaaagatgggggagctctacatgctcttggcagtggctctgaccaatctggaagatatagaaaatgccaagagagcctacgcagaagcagtccacctggataagtgtaaccctttagtaaacctgaactatgctgtgctgctgtacaaccagggcgagaagaagaacgccctggcccaatatcaggagatggagaagaaagtcagcctactcaaggacaatagctctctggaatttgactctgagatggtggagatggctcagaagttgggagctgctctccaggttggggaggcactggtctggaccaaaccagttaaagatcccaaatcaaagcaccagaccacttcaaccagcaaacctgccagtttccagcagcctctgggctctaatcaagctctaggacaggcaatgtcttcagcagctgcatacaggacgctcccctcaggtgctggaggaacatcccagttcacaaagcccccatctcttcctctggagccagagcctgcggtggaatcaagtccaactgaaacatcagaacaaataagagagaaataagaatagaatgaatgaccccaaaatagggttttcttgggcgaggatgtgctggattaggaaaggtgacatgacacaggcagagcagagtggcacccaccacagaatacagtgtgtgttattacgaggagccagcagttgagcctaaggtccttctacctacctggtattggcatttgaggtcggaaaccctctactgccccataagccaggaaaagtgaaaagagaacacagttcctttaagaactggcagcaaggcttgaggccttatgtatgtagctgagtcagcaaggtacatgatgctgtctgctttcaaaaggacttttctctcctagctgactgactccttccttagttcaaggaacagctgagacagacctctgctgagtagctctgtgatgacaaagccttggtttaactgaggtgatcctcaggttgtgaggtttattagtccccaaggcaaacacaaatattagattaataatccaactttaatagtatacatttaaaagaaaaaaaacaaaagccctggaagttgaggccaagcctgctgagtattgcagctgcatttgcccaaagggaatccagaacaagtccctccctgtattttgttcttgagaggggtcagtctagaagctagatcctatcaggatgaggagcagcagcccagggcttgtctggatcagcaccaacgattttaaagaaaaaaggaagagtttcttagatgagtaattgttattgaagatagtcagtgataaccactgaccagatgctatcaatacactatgtgtcctttttagaataaagattacatatcatcattcctttggggaaaattgttattcaggtataaaaacaagagatcataataaaaacctaaaagaacctatg

SEQ ID NO: 110712 - DNA, 1864 bp, Homo sapiens
  Payload ID: 1709
  Gene Symbol: BBS4
  Gene Name: Bardet-Biedl syndrome 4
  ENST ID: ENST00000562084
  CDS Start-End: 9-242
gagctaaaatggctgaggagagagtcgcgacggtgagcgccgagattctctttagttgcccggccgcagggcaaggcaagctggcgggtggcttttgtcccatgcagcggttcctggagagaggcggagctgggtgccgagcgtctcagggtgggcggggcgacacggtcccctttttactgtcccgggaactggtcgcctggggcaagtctggatacttagcagcacaggtcctgttctaggactgtagtccctcttggggtgcgctggacggagaagggagacttttcaccagtaatggctcttaccgtagtgccatctttttctgtctcgggggtttggaagagaactcaatttcctgtatctactgagtctcaaaaaccccggcagaaaaaagctccagagtttcctattttggagaagcagaactggttgattcatcttcattatatccggaaagattatgaagcctgcaaggctgttatcaaagaacagcttcaagagactcagggattgtgtgaatatgctatctatgtccaagcattgatatttcgcctagaaggaaatatccaagaatccctagaactcttccagacatgtgcagttcttagtcctcagagtgctgataacctcaagcaggtggccagatctttatttcttttgggaaaacataaagctgccattgaagtatataatgaagcagctaaactcaaccagaaagattgggagatcagccataacctaggagtttgctacatatacctgaagcagttcaacaaggcacaagaccagttgcacaatgccctgaatcttaataggcacgatctgacttatataatgctggggaagatccacttgctggagggagacttggacaaggccattgaagtctacaagaaagcagtggagttctcaccagaaaatacagagcttcttacaactttaggattactctacttacagctcggcatttaccagaaggcatttgaacatcttggcaatgcactgacttatgaccctaccaactacaaggccatcttggcagcaggcagcatgatgcagacccacggggactttgatgttgccctcaccaaatacagagttgtggcttgtgctgttccagaaagtcctccactctggaataacattggaatgtgtttctttggcaagaagaaatatgtggcggccatcagctgcctgaaacgagccaactacttggcaccctttgattggaagattctgtataatttgggccttgtccatttgaccatgcagcagtatgcatcagcttttcattttctcagtgcggccatcaacttccagccaaagatgggggagctctacatgctcttggcagtggctctgaccaatctggaagatatagaaaatgccaagagagcctacgcagaagcagtccacctggataagtgtaaccctttagtaaacctgaactatgctgtgctgctgtacaaccagggcgagaagaagaacgccctggcccaatatcaggagatggagaagaaagtcagcctactcaaggacaatagctctctggaatttgactctgagatggtggagatggctcagaagttgggagctgctctccaggttggggaggcactggtctggaccaaaccagttaaagatcccaaatcaaagcaccagaccacttcaaccagcaaacctgccagtttccagcagcctctgggctctaatcaagctctaggacaggcaatgtcttcagcagctgcatacaggacgctcccctcaggtgctggaggaacatcccagttcacaaagcccccatctcttcctctggagccagagcctgcggtggaatcaagtccaactgaaacatcagaac

SEQ ID NO: 110713 - DNA, 681 bp, Homo sapiens
  Payload ID: 1709
  Gene Symbol: BBS4
  Gene Name: Bardet-Biedl syndrome 4
  ENST ID: ENST00000565160
  CDS Start-End: 35-463
gacttccggccgcgcagcggtgggctgagctaaaatggctgaggagagagtcgcgacgagaactcaatttcctgtatctactgagtctcaaaaaccccggcagaaaaaagctccagagtttcctattttggagaagcagaactggttgattcatcttcattatatccggaaagattatgaagcctgcaaggctgttatcaaagaacagcttcaagagactcagggattgtgtgaatatgctatctatgtccaagcattgatatttcgcctagaaggaaatatccaagaatccctagaactcttccagacatgtgcagttcttagtcctcagagtgctgataacctcaagcaggtggccagatctttatttcttttgggaaaacataaagctgccattgaagtatataatgaagcagctaaactcaaccagaaagattggcctaggagatcagccataacctaggagtttgctacatatacctgaagcagttcaacaaggcacaagaccagttgcacaatgccctgaatcttaataggcacgatctgacttatataatgctggggaagatccacttgctggagggagacttggacaaggccattgaagtctacaagaaagcagtggagttctcaccagaaaatacagagcttcttacaactttaggattactctacttacag

SEQ ID NO: 110714 - DNA, 551 bp, Homo sapiens
  Payload ID: 1709
  Gene Symbol: BBS4
  Gene Name: Bardet-Biedl syndrome 4
  ENST ID: ENST00000566829
  CDS Start-End: 128-551
ccctttttactgtcccgggaactggtcgcctggggcaagtctggatacttagcagcacaggtcctgttctaggactgtagtccctcttggggtgcgctggacggagaagggagacttttcaccagtaatggctcttaccgtagtgccatctttttctgtctcgggggtttggaagagaactcaatttcctgtatctactgagtctcaaaaaccccggcagaaaaaagagtttcctattttggagaagcagaactggttgattcatcttcattatatccggaaagattatgaagcctgcaaggctgttatcaaagaacagcttcaagagactcagggattgtgtgaatatgctatctatgtccaagcattgatatttcgcctagaaggaaatatccaagaatccctagaactcttccagacatgtgcagttcttagtcctcagagtgctgataacctcaagcaggtggccagatctttatttcttttgggaaaacataaagctgccattgaagtatataatgaagcagctaaactcaaccagaaagattggg

SEQ ID NO: 110715 - DNA, 563 bp, Homo sapiens
  Payload ID: 1709
  Gene Symbol: BBS4
  Gene Name: Bardet-Biedl syndrome 4
  ENST ID: ENST00000566938
  CDS Start-End: 22-84
gcagcggtgggctgagctaaaatggctgaggagagagtcgcgacgctccagagtttcctattttggagaagcagaactggttgattcatcttcattatatccggaaagattatgaagcctgcaaggctgttatcaaagaacagcttcaagagactcagggattgtgtgaatatgctatctatgtccaagcattgatatttcgcctagaaggaaatatccaagaatccctagaactcttccagacatgtgcagttcttagtcctcagagtgctgataacctcaagcaggtggccagatctttatttcttttgggaaaacataaagctgccattgaagtatataatgaagcagctaaactcaaccagaaagattggcctaggagatcagccataacctaggagtttgctacatatacctgaagcagttcaacaaggcacaagaccagttgcacaatgccctgaatcttaataggcacgatctgacttatataatgctggggaagatccacttgctggagggagacttggacaaggccattgaagtctacaagaaagcagtggagt

SEQ ID NO: 110716 - DNA, 1876 bp, Homo sapiens
  Payload ID: 1709
  Gene Symbol: BBS4
  Gene Name: Bardet-Biedl syndrome 4
  ENST ID: ENST00000567279
  CDS Start-End: 22-225
gcagcggtgggctgagctaaaatggctgaggagagagtcgcgacgagaactcaatttcctgtatctactgagtctcaaaaaccccggcagaaaaaagggggagttggagtgagcaatgatttggaataccagaaattcaacttatatatttacagctccagagtttcctattttggagaagcagaactggttgattcatcttcattatatccggaaagattatgaagcctgcaaggctgttatcaaagaacagcttcaagagactcagggattgtgtgaatatgctatctatgtccaagcattgatatttcgcctagaaggaaatatccaagaatccctagaactcttccagacatgtgcagttcttagtcctcagagtgctgataacctcaagcaggtggccagatctttatttcttttgggaaaacataaagctgccattgaagtatataatgaagcagctaaactcaaccagaaagattgggagatcagccataacctaggagtttgctacatatacctgaagcagttcaacaaggcacaagaccagttgcacaatgccctgaatcttaataggcacgatctgacttatataatgctggggaagatccacttgctggagggagacttggacaaggccattgaagtctacaagaaagcagtggagttctcaccagaaaatacagagcttcttacaactttaggattactctacttacagctcggcatttaccagaaggcatttgaacatcttggcaatgcactgacttatgaccctaccaactacaaggccatcttggcagcaggcagcatgatgcagacccacggggactttgatgttgccctcaccaaatacagagttgtggcttgtgctgttccagaaagtcctccactctggaataacattggaatgtgtttctttggcaagaagaaatatgtggcggccatcagctgcctgaaacgagccaactacttggcaccctttgattggaagattctgtataatttgggccttgtccatttgaccatgcagcagtatgcatcagcttttcattttctcagtgcggccatcaacttccagccaaagatgggggagctctacatgctcttggcagtggctctgaccaatctggaagatatagaaaatgccaagagagcctacgcagaagcagtccacctggataagtgtaaccctttagtaaacctgaactatgctgtgctgctgtacaaccagggcgagaagaagaacgccctggcccaatatcaggagatggagaagaaagtcagcctactcaaggacaatagctctctggaatttgactctgagatggtggagatggctcagaagttgggagctgctctccaggttggggaggcactggtctggaccaaaccagttaaagatcccaaatcaaagcaccagaccacttcaaccagcaaacctgccagtttccagcagcctctgggctctaatcaagctctaggacaggcaatgtcttcagcagctgcatacaggacgctcccctcaggtgctggaggaacatcccagttcacaaagcccccatctcttcctctggagccagagcctgcggtggaatcaagtccaactgaaacatcagaacaaataagagagaaataagaatagaatgaatgaccccaaaatagggttttcttgggcgaggatgtgctggattaggaaaggtgacatgacacaggcagagcagagtggcacccaccacagaatacagtgtgtgttattacgaggagccagcagttgagcctaaggtccttctacctacctggtattggcatttgaggtcggaaaccctctactgccccataagccaggaaaagtgaaaagagaacacagttcctt

SEQ ID NO: 110717 - DNA, 843 bp, Homo sapiens
  Payload ID: 1709
  Gene Symbol: BBS4
  Gene Name: Bardet-Biedl syndrome 4
  ENST ID: ENST00000569338
  CDS Start-End: 1-843
gagagagtcgcgacgagaactcaatttcctgtatctactgagtctcaaaaaccccggcagaaaaaagctccagagtttcctattttggagaagcagaactggttgattcatcttcattatatccggaaagattatgaagcctgcaaggctgttatcaaagaacagcttcaagagactcagggattgtgtgaatatgctatctatgtccaagcattgatatttcgcctagaaggaaatatccaagaatccctagaactcttccagacatgtgcagttcttagtcctcagagtgctgataacctcaagcaggtggccagatctttatttcttttgggaaaacataaagctgccattgaagtatataatgaagcagctaaactcaaccagaaagattgggagatcagccataacctaggagtttgctacatatacctgaagcagttcaacaaggcacaagaccagttgcacaatgccctgaatcttaataggcacgatctgacttatataatgctggggaagatccacttgctggagggagacttggacaaggccattgaagtctacaagaaagcagtggagttctcaccagaaaatacagagcttcttacaactttaggattactctacttacaggccatcttggcagcaggcagcatgatgcagacccacggggactttgatgttgccctcaccaaatacagagttgtggcttgtgctgttccagaaagtcctccactctggaataacattggaatgtgtttctttggcaagaagaaatatgtggcggccatcagctgcctgaaacgagccaactacttggcaccctttgattggaagattctg

SEQ ID NO: 110718 - DNA, 2055 bp, Homo sapiens
  Payload ID: 1709
  Gene Symbol: BBS4
  Gene Name: Bardet-Biedl syndrome 4
  ENST ID: ENST00000566400
  CDS Start-End: 43-105
aaaccgccgacttccggccgcgcagcggtgggctgagctaaaatggctgaggagagagtcgcgacgctccagagtttcctattttggagaagcagaactggttgattcatcttcattatatccggaaagattatgaagcctgcaaggctgttatcaaagaacagcttcaagagactcagggattgtgtgaatatgctatctatgtccaagcattgatatttcgcctagaaggaaatatccaagaatccctagaactcttccagacatgtgcagttcttagtcctcagagtgctgataacctcaagcaggtggccagatctttatttcttttgggaaaacataaagctgccattgaagtatataatgaagcagctaaactcaaccagaaagattggcctaggagatcagccataacctaggagtttgctacatatacctgaagcagttcaacaaggcacaagaccagttgcacaatgccctgaatcttaataggcacgatctgacttatataatgctggggaagatccacttgctggagggagacttggacaaggccattgaagtctacaagaaagcagtggagttctcaccagaaaatacagagcttcttacaactttaggattactctacttacagctcggcatttaccagaaggcatttgaacatcttggcaatgcactgacttatgaccctaccaactacaaggccatcttggcagcaggcagcatgatgcagacccacggggactttgatgttgccctcaccaaatacagagttgtggcttgtgctgttccagaaagtcctccactctggaataacattggaatgtgtttctttggcaagaagaaatatgtggcggccatcagctgcctgaaacgagccaactacttggcaccctttgattggaagattctgtataatttgggccttgtccatttgaccatgcagcagtatgcatcagcttttcattttctcagtgcggccatcaacttccagccaaagatgggggagctctacatgctcttggcagtggctctgaccaatctggaagatatagaaaatgccaagagagcctacgcagaagcagtccacctggataagtgtaaccctttagtaaacctgaactatgctgtgctgctgtacaaccagggcgagaagaagaacgccctggcccaatatcaggagatggagaagaaagtcagcctactcaaggacaatagctctctggaatttgactctgagatggtggagatggctcagaagttgggagctgctctccaggttggggaggcactggtctggaccaaaccagttaaagatcccaaatcaaagcaccagaccacttcaaccagcaaacctgccagtttccagcagcctctgggctctaatcaagctctaggacaggcaatgtcttcagcagctgcatacaggacgctcccctcaggtgctggaggaacatcccagttcacaaagcccccatctcttcctctggagccagagcctgcggtggaatcaagtccaactgaaacatcagaacaaataagagagaaataagaatagaatgaatgaccccaaaatagggttttcttgggcgaggatgtgctggattaggaaaggtgacatgacacaggcagagcagagtggcacccaccacagaatacagtgtgtgttattacgaggagccagcagttgagcctaaggtccttctacctacctggtattggcatttgaggtcggaaaccctctactgccccataagccaggaaaagtgaaaagagaacacagttcctttaagaactggcagcaaggcttgaggccttatgtatgtagctgagtcagcaaggtacatgatgctgtctgctttcaaaaggacttttctctcctagctgactgactccttccttagttcaaggaacagctgagacagacctctgctgagtagctctgtgatgacaaagccttggtttaactgaggtgatcctcaggttgtgaggtttattagtccccaaggcaaacacaaatattagattaataatccaactttaatagtatac

SEQ ID NO: 110719 - DNA, 541 bp, Homo sapiens
  Payload ID: 1709
  Gene Symbol: BBS4
  Gene Name: Bardet-Biedl syndrome 4
  ENST ID: ENST00000566197
  CDS Start-End: 1-541
tcaacttccagccaaagatgggggagctctacatgctcttggcagctgagctctccagctgcagtgctttctttgttgcagtggctctgaccaatctggaagatatagaaaatgccaagagagcctacgcagaagcagtccacctggataagtgtaaccctttagtaaacctgaactatgctgtgctgctgtacaaccagggcgagaagaagaacgccctggcccaatatcaggagatggagaagaaagtcagcctactcaaggacaatagctctctggaatttgactctgagatggtggagatggctcagaagttgggagctgctctccaggttggggaggcactggtctggaccaaaccagttaaagatcccaaatcaaagcaccagaccacttcaaccagcaaacctgccagtttccagcagcctctgggctctaatcaagctctaggacaggcaatgtcttcagcagctgcatacaggacgctcccctcaggtgctggaggaacatcccagttcacaaagcccccatctcttcctct

SEQ ID NO: 110720 - DNA, 557 bp, Homo sapiens
  Payload ID: 1709
  Gene Symbol: BBS4
  Gene Name: Bardet-Biedl syndrome 4
  ENST ID: ENST00000563600
  CDS Start-End: 22-174
gcagcggtgggctgagctaaaatggctgaggagagagtcgcgacggactgtagtccctcttggggtgcgctggacggagaagggagacttttcaccagtaatggctcttaccgtagtgccatctttttctgtctcgggggtttggaagagaactcaatttcctgtatctactgagtctcaaaaaccccggcagaaaaaagctccagagtttcctattttggagaagcagaactggttgattcatcttcattatatccggaaagattatgaagcctgcaaggctgttatcaaagaacagcttcaagagactcagggattgtgtgaatatgctatctatgtccaagcattgatatttcgcctagaaggaaatatccaagaatccctagaactcttccagacatgtgcagttcttagtcctcagagtgctgataacctcaagcaggtggccagatctttatttcttttgggaaaacataaagctgccattgaagtatataatgaagcagctaaactcaaccagaaagattgggagatcagccataacctaggagtttgct

SEQ ID NO: 110721 - DNA, 777 bp, Homo sapiens
  Payload ID: 1709
  Gene Symbol: BBS4
  Gene Name: Bardet-Biedl syndrome 4
  ENST ID: ENST00000561914
  CDS Start-End: 25-336
cgcgcagcggtgggctgagctaaaatggctgaggagagagtcgcgacgagaactcaatttcctgtatctactgagtctcaaaaaccccggcagaaaaaagctccagagtttcctattttggagaagcagaactggttgattcatcttcattatatccggaaagattatgaagcctgcaaggctgttatcaaagaacagcttcaagagactcagggattgtgtgaatatgctatctatgtccaagatttcttttgggaaaacataaagctgccattgaagtatataatgaagcagctaaactcaaccagaaagattgggagatcagccataacctaggagtttgctacatatacctgaagcagttcaacaaggcacaagaccagttgcacaatgccctgaatcttaataggcacgatctgacttatataatgctggggaagatccacttgctggagggagacttggacaaggccattgaagtctacaagaaagcagtggagttctcaccagaaaatacagagcttcttacaactttaggattactctacttacagctcggcatttaccagaaggcatttgaacatcttggcaatgcactgacttatgaccctaccaactacaaggccatcttggcagcaggcagcatgatgcagacccacggggactttgatgttgccctcaccaaatacagagttgtggcttgtgctgttccagaaagtcctccactctggaataacattggaatgtgtttctttggcaagaagaaatatgtggcgg

SEQ ID NO: 110722 - DNA, 579 bp, Homo sapiens
  Payload ID: 1709
  Gene Symbol: BBS4
  Gene Name: Bardet-Biedl syndrome 4
  ENST ID: ENST00000569440
  CDS Start-End: 22-123
gcagcggtgggctgagctaaaatggctgaggagagagtcgcgacgagaactcaatttcctgtatctactgagtctcaaaaaccccggcagaaaaaaggtgactttcttctggctttcagttgaagatcttacccatcattgagctccagagtttcctattttggagaagcagaactggttgattcatcttcattatatccggaaagattatgaagcctgcaaggctgttatcaaagaacagcttcaagagactcagggattgtgtgaatatgctatctatgtccaagcattgatatttcgcctagaaggaaatatccaagaatccctagaactcttccagacatgtgcagttcttagtcctcagagtgctgataacctcaagcaggtggccagatctttatttcttttgggaaaacataaagctgccattgaagtatataatgaagcagctaaactcaaccagaaagattggcctaggagatcagccataacctaggagtttgctacatatacctgaagcagttcaacaaggcacaagaccagttgcacaatgccctgaatcttaataggcacgatctg

SEQ ID NO: 110723 - DNA, 3475 bp, Homo sapiens
  Payload ID: 1710
  Gene Symbol: BBS5
  Gene Name: Bardet-Biedl syndrome 5
  Uniprot ID: Q8N3I7
  ENST ID: ENST00000295240
  CDS Start-End: 377-1402
aaactgcagggattacaggcagaagccaccatgcccggctaataacctgaatctcttgacggtgaagagaaataaggagaggggtaaaatggctaaaggatgtctgtttggaggcaaggaaggtcgcccagaggtcaggcacgctccccttggcggacacagctgggcttctcagagactcctaaatcctgcctcgcatctcaaatcggcttaacgacgcgaaagagctgggcgacgcgcgcgcactctcgcggaagcttgagtctcggcgcccgccgtagacgtcgtgacagaggcggcccgttgccttggagccagagagacgcagctaggcctgcacggctgtggagagatcctgccacgggccttgttcaccatgtcggtgctggatgcgctttgggaggatcgggatgtccgtttcgacctgtccgcgcagcaaatgaaaacaagacctggagaagtccttattgattgtttagattccattgaagacaccaaaggaaataatggagatagaggtagactcttggtaacaaatttaagaattctctggcactctttggcattatcaagagtcaatgtttctgtcggttacaattgcatattgaatattacaacaaggactgctaactctaaattacgaggccaaactgaagctctctatatactaacaaaatgtaacagtactcgttttgaatttatatttacaaatttggttcctggaagccctagactttttacttctgtgatggcagtacacagagcttatgaaacttctaaaatgtatcgtgattttaaattaagaagtgcactaattcagaacaagcaactaagactgttgccacaagaacatgtatatgataaaataaatggagtttggaatttatccagtgatcagggcaatttaggaaccttttttattaccaatgtgagaattgtgtggcatgcaaatatgaatgatagttttaatgtcagtataccatatctgcaaattcgttcaataaagattagagattcaaaatttggtttagctcttgtcatagaaagctctcagcagagtggtggatatgttcttggctttaaaatagatcctgtggaaaaactacaagaatcagttaaggaaatcaattcacttcacaaagtctattctgccagtcccatatttggagttgattatgagatggaagaaaagccccagccgctcgaagctctgacagtcgaacaaattcaagatgatgtagaaatagactctgatggtcacacggatgcttttgtggcttattttgctgatggcaataagcaacaagatcgtgaacctgtattttcagaagaactggggcttgcaatagagaaattgaaggatggattcaccctacagggactttgggaagtaatgagttgattgaccttgagttgagatggatttctattaaagatatctctagtttaaagatactagtcacctgccataagtcatggaatagtttttatatttacagcttttatatttaaaacttgtaagagtttttttaatgattgaggaaaaagtcatttagaaaacttcagttttcggccagcgcgtcgagggaggggccagcgacacatggcctagtaaccgtccggccgcggcgctggcttaagccatggctgagggtagctggattcctcaggcccgggcgctcctacagcagtgcctgcacgcccggctgcaaattcgcccagccaatggggacgttgcggcccagtgggtggaggtccaaagaggactggtgatctacgtgtgctttttcaagggagctgataaagaacttcttcccaaaatggccgaagctggactgtactgctgccatctctggctcactgcaacctccctgcctgattctcctgcctcagcctgccgagtgcctgcgattacaggcgcgcgccgccacacctgactggttttcgtatttttttggtggagacggggtttcgctgtgttggccgggctggtctccagctcctaaccgcgagtgatccgccagcctcggcctcccgaggtgccgggattgcagacggagtctggttcacttagtgctcaatggtgcccaggctggagtgcagtggcgtgatctccgctcgctacaacctccacctcccagctgcctgccttggcctcccgaagtgccaagagtgcagcctctgcccggccgccaccccgtctgggaagtgaggagcgtctctgcctggctgcccattgtctgggacgtgagcagcccctctgcctggctgcccagtctggaaagtgaggagcgtctctgcccggccgccatcccatctaggaagtgaggagcgcctcttcccacccgccatcccatctaggaagtgaggagcttctctgcctggccgcccatcgtctgagatgtggggagcacctctgcccggccgcgaccccatttgggaggtgaggagcaactctgcccagccgccccgtctgagaagtgaggagaccctccgcctggcaaccgccccgtctgataagtaaggagcccctctgcccagcagccgccccgtctgagaagtgaggagcccctctgcccagcagccaccctgtctgggaagtgaggagcgtctccgcccggcagccacccagtccgggagggaggtgggggggtcagtcccccgtccggccagccgccccgtccgggaggtgaggggcgcctctgcccagctgcccctactgggaagtgaggagcccctctgccccgccagccaccccgtccgggagggaggtgggggggtcagccccccgcccggccagccgccccgtccgggagggaggtgggggatcagccccccgcccggctagccgccccgtccgggaggcgaggggcgcctctgcccggctgcccctactgggaagtgaggagcccctctgcccggccagccgccccgtccaggagggaggtgggggggtcagccccccgcccggccagccgcccggtccgggagggaggtgggggggtcagccccccgcccggccagccgccccgtccgggaggttaggggcgcctctgcccggccgcccctactgggaagtgaggagcccctctgcccggccaccaccccgtctgggaggtgtacccaacagctcattgagagcgggcgatgatgacagtggcggctttgtggagtggaggtggggggaaggtggggaaaagattgagaaatcggatggttgccgtgtctgtgtagaaagaagtagacatgggagacttttcattttgttctgtactaagaaaaattcttaccctaaaacttaaagtataataaaaaaaaaaaaacttcagttttctaaaaattatatttaaaattgtaatcaaaatgtacctagtttataaatgtttattttgtacttaatacctgtaaagtcttagttttcagacattaagtgactgtatcatgttcggtttaataaagaatttatgcagcacca

SEQ ID NO: 110724 - DNA, 3107 bp, Homo sapiens
  Payload ID: 1710
  Gene Symbol: BBS5
  Gene Name: Bardet-Biedl syndrome 5
  Uniprot ID: Q8N3I7
  ENST ID: ENST00000392663
  CDS Start-End: 72-1034
gccttggagccagagagacgcagctaggcctgcacggctgtggagagatcctgccacgggccttgttcaccatgtcggtgctggatgcgctttgggaggatcgggatgtccgtttcgacctgtccgcgcagcaaatgaaaacaagacctggagaagtccttattgattgtttagattccattgaagacaccaaaggaaataatggagatagaggtagactcttggtaacaaatttaagaattctctggcactctttggcattatcaagagtcaatgtttctgtcggttacaattgcatattgaatattacaacaaggactgctaactctaaattacgaggccaaactgaagctctctatatactaacaaaatgtaacagtactcgttttgaatttatatttacaaatttggttcctggaagccctagactttttacttctgtgatggcagtacacagagcttatgaaacttctaaaatgtatcgtgattttaaattaagaagtgcactaattcagaacaagcaactaagactgttgccacaagaacatgtatatgataaaataaatggagtttggaatttatccagtgatcagggcaatttaggaaccttttttattaccaatgtgagaattgtgtggcatgcaaatatgaatgatagttttaatgtcagtataccatatctgcaaattagtggtggatatgttcttggctttaaaatagatcctgtggaaaaactacaagaatcagttaaggaaatcaattcacttcacaaagtctattctgccagtcccatatttggagttgattatgagatggaagaaaagccccagccgctcgaagctctgacagtcgaacaaattcaagatgatgtagaaatagactctgatggtcacacggatgcttttgtggcttattttgctgatggcaataagcaacaagatcgtgaacctgtattttcagaagaactggggcttgcaatagagaaattgaaggatggattcaccctacagggactttgggaagtaatgagttgattgaccttgagttgagatggatttctattaaagatatctctagtttaaagatactagtcacctgccataagtcatggaatagtttttatatttacagcttttatatttaaaacttgtaagagtttttttaatgattgaggaaaaagtcatttagaaaacttcagttttcggccagcgcgtcgagggaggggccagcgacacatggcctagtaaccgtccggccgcggcgctggcttaagccatggctgagggtagctggattcctcaggcccgggcgctcctacagcagtgcctgcacgcccggctgcaaattcgcccagccaatggggacgttgcggcccagtgggtggaggtccaaagaggactggtgatctacgtgtgctttttcaagggagctgataaagaacttcttcccaaaatggccgaagctggactgtactgctgccatctctggctcactgcaacctccctgcctgattctcctgcctcagcctgccgagtgcctgcgattacaggcgcgcgccgccacacctgactggttttcgtatttttttggtggagacggggtttcgctgtgttggccgggctggtctccagctcctaaccgcgagtgatccgccagcctcggcctcccgaggtgccgggattgcagacggagtctggttcacttagtgctcaatggtgcccaggctggagtgcagtggcgtgatctccgctcgctacaacctccacctcccagctgcctgccttggcctcccgaagtgccaagagtgcagcctctgcccggccgccaccccgtctgggaagtgaggagcgtctctgcctggctgcccattgtctgggacgtgagcagcccctctgcctggctgcccagtctggaaagtgaggagcgtctctgcccggccgccatcccatctaggaagtgaggagcgcctcttcccacccgccatcccatctaggaagtgaggagcttctctgcctggccgcccatcgtctgagatgtggggagcacctctgcccggccgcgaccccatttgggaggtgaggagcaactctgcccagccgccccgtctgagaagtgaggagaccctccgcctggcaaccgccccgtctgataagtaaggagcccctctgcccagcagccgccccgtctgagaagtgaggagcccctctgcccagcagccaccctgtctgggaagtgaggagcgtctccgcccggcagccacccagtccgggagggaggtgggggggtcagtcccccgtccggccagccgccccgtccgggaggtgaggggcgcctctgcccagctgcccctactgggaagtgaggagcccctctgccccgccagccaccccgtccgggagggaggtgggggggtcagccccccgcccggccagccgccccgtccgggagggaggtgggggatcagccccccgcccggctagccgccccgtccgggaggcgaggggcgcctctgcccggctgcccctactgggaagtgaggagcccctctgcccggccagccgccccgtccaggagggaggtgggggggtcagccccccgcccggccagccgcccggtccgggagggaggtgggggggtcagccccccgcccggccagccgccccgtccgggaggttaggggcgcctctgcccggccgcccctactgggaagtgaggagcccctctgcccggccaccaccccgtctgggaggtgtacccaacagctcattgagagcgggcgatgatgacagtggcggctttgtggagtggaggtggggggaaggtggggaaaagattgagaaatcggatggttgccgtgtctgtgtagaaagaagtagacatgggagacttttcattttgttctgtactaagaaaaattcttaccctaaaacttaaagtataataaaaaaaaaaaaacttcagttttctaaaaattatatttaaaattgtaatcaaaatgtacctagtttataaatgtttattttgtacttaatacctgtaaagtcttagttttcagacattaagtgactgtatcatgttcggtttaataaagaatttatgcagcacca

SEQ ID NO: 110725 - DNA, 583 bp, Homo sapiens
  Payload ID: 1710
  Gene Symbol: BBS5
  Gene Name: Bardet-Biedl syndrome 5
  ENST ID: ENST00000443151
  CDS Start-End: 53-214
gcagctaggcctgcacggctgtggagagatcctgccacgggccttgttcaccatgtcggtgctggatgcgctttgggaggatcgggatgtccgtttcgacctgtccgcgcagcaaatgaaaacaagacctggagaagtccttattgattgtttagattccattgaagacaccaaaggaaataatggagatagagaaattacgaggccaaactgaagctctctatatactaacaaaatgtaacagtactcgttttgaatttatatttacaaatttggttcctggaagccctagactttttacttctgtgatggcagtacacagagcttatgaaacttctaaaatgtatcgtgattttaaattaagaagtgcactaattcagaacaagcaactaagactgttgccacaagaacatgtatatgataaaataaatggagtttggaatttatccagtgatcagggcaatttaggaaccttttttattaccaatgtgagaattgtgtggcatgcaaatatgaatgatagttttaatgtcagtataccatatctgcaaattcgttcaataaagattagagattcaaaatt

SEQ ID NO: 110726 - DNA, 3752 bp, Homo sapiens
  Payload ID: 1711
  Gene Symbol: BBS7
  Gene Name: Bardet-Biedl syndrome 7
  Uniprot ID: Q8IWZ6
  ENST ID: ENST00000264499
  CDS Start-End: 185-2332
gacgtcacgcaggacgccactgccctgtcgccccgcctgtgcagcccaggacctaggcgcggtagctggggctggcttttgaggggcgcgggcagccttctgactgggtcggaggcctgcgggcccgaagcctctgtccctcctgttcttgtccggcgctgcttagcccctccgcgtagtcatcatggatctgattttaaaccgaatggattatctgcaggtgggagtaacatctcagaagactatgaagctaattcctgcctcaagacacagagctacacaaaaggtggttattggagatcatgatggggtagttatgtgctttggcatgaagaaaggagaagcagcagcagtgttcaagactttacccgggccgaagattgcaaggctggaactgggaggggttatcaacacacctcaggagaaaatttttattgctgcagcatctgagattagaggcttcacaaaaagaggaaaacagttcctctcctttgaaacaaacctcactgaaagcattaaagctatgcacatatctggctcagacctctttctcagtgcaagttacatctataaccattattgtgactgcaaagaccaacattattacctttctggggataaaatcaatgatgtgatctgccttccagtggaaagattatctcgtatcacacctgtattggcctgccaggacagagtgctcagagttttacagggatctgatgtgatgtatgcagttgaagttcctggaccccctactgtcttagcactacacaatggaaatggcggtgactctggagaagaccttttgtttgggacatcagacggaaaacttgcgcttatacagattactacatccaaaccagtacgcaagtgggaaattcaaaatgagaaaaagagaggaggtattttgtgtattgacagctttgacattgtgggtgatggggttaaagatttacttgttgggagagatgacggaatggtggaagtgtatagttttgataatgcaaatgaacctgttctacgatttgatcagatgttgtctgaaagcgtcacatctatccagggtggttgtgtaggaaaagacagctatgatgaaatcgtggtgtccacatattcaggctgggttacaggtctgacaacagagcccattcataaggaaagtggaccaggagaagaactaaaaattaatcaggagatgcagaataaaatttcttccttacggaatgagttggaacatttgcagtataaggtattgcaggaaagagagaattatcaacagtcttctcaatcaagcaaagcaaaatcagcagtaccttcctttggtataaatgataaatttacactaaataaagatgatgccagttacagccttatcttagaggtacagactgcaatagataatgtcttaatacagagtgatgttccaatagatttacttgatgtggataaaaattctgctgttgttagctttagcagctgtgattctgagtcaaacgacaacttccttcttgccacttatcggtgccaggcagatactacaaggctggaactcaagattcgctcaattgaaggccagtatggcacactacaagcatatgtgactccaagaattcaacccaaaacctgtcaggtccgccagtaccacatcaaacctctttcactccatcaaagaactcactttattgatcatgacagacccatgaatacactgaccctaacaggccagttcagttttgctgaagttcactcctgggtggttttttgtctgcctgaagttccagaaaaacctccagcaggagaatgtgtgacattttactttcagaacacctttctagatacacaacttgaaagtacctacagaaaaggagagggagtttttaaatctgacaacatttctactatctccatcctaaaagatgtgctttctaaagaagctacaaaaaggaaaattaacctcaacatatcatacgagataaatgaagtatcagtcaaacacactttaaagctaatccacccaaagctggagtaccagttgcttttggctaagaaagtgcagttaattgatgctttaaaagaattacagattcatgagggaaatacgaactttctgataccagaatatcactgtattctagaagaggcagatcacctacaggaagaatacaaaaagcaacctgcacatcttgaaagactctatggcatgatcactgatcttttcatagataaatttaagtttaaaggcaccaatgtaaaaactaaagtaccccttctattggaaattctggacagttatgaccaaaatgcattgatttcattcttcgatgcagcatgacatacaaataaggtaaagtcccaaagaagtggtctgtttaaatgaaaaatgttaaaagagaattagaagttaactgtgtatgtactttaatttcaaatgcttttttatatctaaaaatatttgagatataatggctttttaaagtaatgcttctatttcttttgacaaattgaactttctaaaactaaaagagtctttttatttttaaaacacaagtagaatgatttaaataggattttaatgaatttttggcaagtggctgttttaatttttaaattgagaagtaatatgtggaaaattaaaatatattcaaatgtattacaaggtacataaacacataaacatgtagaccgctttataggcttcaaaatgtatttttatatattaccttatttgatcttcacaactgttgtaaaatttgtcaaatcatataagaaaactgattctcagtgaaattttgtgattaagaggacatgctaatattttgtaaagctgggaccagaacccaagtactggtacttgctttgtgtcctggttactatgtatgttgccagctagtggaaataacctaccaattgttttttctaggagataggattgatttgcaactgatattccttttgcttggtagtgttttatgactctgctgcagtttgtggaaatgctggacttggctcagtgctataaattgtagccaggaaataagaagagcttacacagagtcgggggatcttaattagacatgctgtaaccagtggagctattcagcgtgcttcaagtgaagagtgcagaaatagtgatgccatcttagattttcctacactagtatcttctagatctctttttatcatatatgacattaaggctacagaagttttgtgcattaatcttaattcatatttattaatttcaagggaatattgaaaggttttaaaatggcatacagataatggaaaataagctttatgtttcaagaagggcagactcacgaattttttagaaaacagtgcttcttaatgatatgctattatacttattagttatgtgcaagctttgtatattcttatatttatatataaatataaaaatttgttaaaggcacgtatagttaagagagttttattttaataaggtcatattgtttttactatgtttaaaaaactttacttctgaaaggaacataattatatctaggtcactagaacgtcattgtgttttttgttggttgccacagcttggggaaaaatagaaaaaaattaatgactgtatttgaatattttgtaatgcactgctatttattatatatatcaacagtagttcaaggtgccatcttaaattaattgcatcttcattaggaaaaataaaaagcataaaacacaatttctggttactatgaataaacgcctaaatgttaagatga

SEQ ID NO: 110727 - DNA, 734 bp, Homo sapiens
  Payload ID: 1711
  Gene Symbol: BBS7
  Gene Name: Bardet-Biedl syndrome 7
  ENST ID: ENST00000507814
  CDS Start-End: 1-417
gatgtgctttctaaagaagctacaaaaaggaaaattaacctcaacatatcatacgagataaatgaagtatcagtcaaacacactttaaagctaatccacccaaagctggagtaccagttgcttttggctaagaaagtgcagttaattgatgctttaaaagaattacagattcatgagggaaatacgaactttctgataccagaatatcactgtattctagaagaggcagatcacctacaggaagaatacaaaaagcaacctgcacatcttgaaagactctatggcatgatcactgatcttttcatagataaatttaagtttaaaggcaccaatgtaaaaactaaagtaccccttctattggaaattctggacagttatgaccaaaatgcattgatttcattcttcgatgcagcatgacatacaaataagtgttttatgactctgctgcagtttgtggaaatgctggacttggctcagtgctataaattgtagccaggaaataagaagagcttacacagagtcgggggatcttaattagacatgctgtaaccagtggagctattcagcgtgcttcaagtgaagagtgcagaaatagtgatgccatcttagattttcctacactagtatcttctagatctctttttatcatatatgacattaaggctacagaagttttgtgcattaatcttaattcatatttattaatttcaagggaatattgaaaggttttaaaa

SEQ ID NO: 110728 - DNA, 2570 bp, Homo sapiens
  Payload ID: 1711
  Gene Symbol: BBS7
  Gene Name: Bardet-Biedl syndrome 7
  Uniprot ID: Q8IWZ6
  ENST ID: ENST00000506636
  CDS Start-End: 138-2156
aggacctaggcgcggtagctggggctggcttttgaggggcgcgggcagccttctgactgggtcggaggcctgcgggcccgaagcctctgtccctcctgttcttgtccggcgctgcttagcccctccgcgtagtcatcatggatctgattttaaaccgaatggattatctgcaggtgggagtaacatctcagaagactatgaagctaattcctgcctcaagacacagagctacacaaaaggtggttattggagatcatgatggggtagttatgtgctttggcatgaagaaaggagaagcagcagcagtgttcaagactttacccgggccgaagattgcaaggctggaactgggaggggttatcaacacacctcaggagaaaatttttattgctgcagcatctgagattagaggcttcacaaaaagaggaaaacagttcctctcctttgaaacaaacctcactgaaagcattaaagctatgcacatatctggctcagacctctttctcagtgcaagttacatctataaccattattgtgactgcaaagaccaacattattacctttctggggataaaatcaatgatgtgatctgccttccagtggaaagattatctcgtatcacacctgtattggcctgccaggacagagtgctcagagttttacagggatctgatgtgatgtatgcagttgaagttcctggaccccctactgtcttagcactacacaatggaaatggcggtgactctggagaagaccttttgtttgggacatcagacggaaaacttgcgcttatacagattactacatccaaaccagtacgcaagtgggaaattcaaaatgagaaaaagagaggaggtattttgtgtattgacagctttgacattgtgggtgatggggttaaagatttacttgttgggagagatgacggaatggtggaagtgtatagttttgataatgcaaatgaacctgttctacgatttgatcagatgttgtctgaaagcgtcacatctatccagggtggttgtgtaggaaaagacagctatgatgaaatcgtggtgtccacatattcaggctgggttacaggtctgacaacagagcccattcataaggaaagtggaccaggagaagaactaaaaattaatcaggagatgcagaataaaatttcttccttacggaatgagttggaacatttgcagtataaggtattgcaggaaagagagaattatcaacagtcttctcaatcaagcaaagcaaaatcagcagtaccttcctttggtataaatgataaatttacactaaataaagatgatgccagttacagccttatcttagaggtacagactgcaatagataatgtcttaatacagagtgatgttccaatagatttacttgatgtggataaaaattctgctgttgttagctttagcagctgtgattctgagtcaaacgacaacttccttcttgccacttatcggtgccaggcagatactacaaggctggaactcaagattcgctcaattgaaggccagtatggcacactacaagcatatgtgactccaagaattcaacccaaaacctgtcaggtccgccagtaccacatcaaacctctttcactccatcaaagaactcactttattgatcatgacagacccatgaatacactgaccctaacaggccagttcagttttgctgaagttcactcctgggtggttttttgtctgcctgaagttccagaaaaacctccagcaggagaatgtgtgacattttactttcagaacacctttctagatacacaacttgaaagtacctacagaaaaggagagggagtttttaaatctgacaacatttctactatctccatcctaaaagatgtgctttctaaagaagctacaaaaaggaaaattaacctcaacatatcatacgagataaatgaagtatcagtcaaacacactttaaagctaatccacccaaagctggagtaccagttgcttttggctaagaaagtgcagttaattgatgctttaaaagaattacagattcatgagggaaatacgaactttctgataccagaatatcactgtattctagaagaggcagatcacctacaggaagaatacaaaaagcaacctgcacatcttgaaagactctatggttagtggaccattctagaataccttgccatatttcttttcaactggctatttcccaaggatcatgtaagagaagctgggcagaaagataaaaagattacatcagtcatgattcatgaaccagtcatgaatcagttgacaacaaatttattgcacagaatatttctgtattttgtcaagctacttttaatatttaattcttttacttgataaaatgcaagtatattaagaaataagtatactgtgatgaattaatctatatatatgaacaaacctggtataaaatgaatgtaatctatgaacctttagagcttagactgtatttcacacaaataattgtcatgttttgttgctattgtgaattataaaaatgcagcatttaaaatttttaaggcaaaatttaataaaggatatacagta

SEQ ID NO: 110729 - DNA, 4027 bp, Homo sapiens
  Payload ID: 1712
  Gene Symbol: BBS9
  Gene Name: Bardet-Biedl syndrome 9
  Uniprot ID: Q3SYG4
  ENST ID: ENST00000242067
  CDS Start-End: 522-3185
acctgcgcagtggcgtccgttgtaagtgctatgacaacagggcgaagatggctcagagttaggctggagaggggaggtgtcccttccgctgcggccgtcgggtttctgctacatcccattcaccgcctcctccatcctttcctcctcggtgtgagcagcaggacttgcatttgttctcgcctgcctagtgtcttccaagggatagatgccgtttcctctgctggtctctgggggtgacggggggcgcaggggagcttcttgggggaatcactccaactctgtggagctggtggtgctgcctggtggggctctctctttgcccgggacgtggaacaactttcagctggaggacgagagggaatagtgaagctaaaggttgcttttctctgcaccgtccgttcttgctccctctgctccatcactgggaccttgtcaggcgttcataaagcaaaatttgccgaacgagggttcgcagaaaggtggggcagagctcatctgacgtggcatcagtgtgaaagaaaatgtctttatttaaagcccgtgattggtggtctactattctgggagataaagaagaatttgatcaaggctgtttgtgtctggctaatgttgacaatagtggaaatggacaagataaaataattgtgggtagctttatgggatacctaaggatctttagcccccatcctgcaaaaacaggagatggagctcaagccgaagatttgcttctagaagtggatctacgagatccagtacttcaagtggaagtaggaaagtttgtttcaggtaccgaaatgctacatttggctgtgttacattctagaaaactttgtgtctactctgtctcaggaaccttgggtaatgtggaacatgggaaccaatgtcagatgaaattgatgtatgaacataatcttcagagaacagcctgcaatatgacctatggatcatttggtggtgtaaaaggtcgagatttaatttgcatccagtctatggatgggatgctgatggtatttgagcaggagagctatgcttttggaagatttctccctggctttcttctgcctggtcctcttgcctacagttcccgtacagattccttccttactgtctcttcctgccaacaagtggaaagttataagtaccaggtacttgcttttgcaacagatgcagataaaaggcaggagactgaacagcaaaaacttggttctggaaaaagactagttgtggattggactctaaatattggagagcaagcccttgacatatgtattgtctctttcaatcagtcggcatcctctgtttttgttcttggtgagagaaactttttttgccttaaggataatggacaaattcgattcatgaagaagcttgattggagcccaagttgttttctgccatattgctcagtttctgaaggaacaataaatactttgattggaaatcataataacatgctgcatatttatcaagatgtgacactgaagtgggccacccaacttccccacattcctgtagcagtaagagtgggctgtttgcatgatttaaagggagtgatagtcactctgagtgatgatggtcacttgcagtgttcatacctggggacagatccttctctgttccaagctccaaacgttcaatctcgagaactaaactatgatgaacttgatgtagaaatgaaagaacttcagaaaatcatcaaagatgttaacaaatcacaaggtgtttggcccatgactgagagagaagatgacttgaacgtttctgtcgtggtttctcctaactttgattcagtttctcaagcgaccgatgttgaggtgggaactgaccttgtcccttctgtcacggtgaaggtcacactgcagaacagagtgatattgcaaaaagccaaattatcagtctacgtgcaaccaccattagaattgacttgtgatcagttcacctttgaatttatgacaccagatttgactagaacagtaagcttttctgtttatctgaaaagaagttatacaccatcagaattggaaggaaatgctgttgtttcttattccagaccaacagatcgaaatcctgatggcattccgcgagttatccaatgtaaatttagacttcccctaaagttaatttgcctaccaggtcagccttcaaaaactgcaagccacaaaattactattgataccaacaaatctccagtcagtcttcttagtctcttcccaggttttgccagtcagtcagatgatgatcaggtgaatgtaatgggttttcacttcttaggaggtgctcgaattactgttcttgcttccaaaacttctcaacgatatcgcattcagagtgaacaatttgaagatctttggctcataaccaatgagcttattcttcgccttcaagaatattttgaaaaacagggagtcaaagattttgcatgttctttttcgggatctataccccttcaagaatattttgagttgattgatcatcattttgagctacggataaatggtgaaaaattagaagaactcttatctgagagagctgtacaatttcgggccattcaacgccggctactagcaagattcaaagataaaactcctgcccctcttcaacacctggacaccttgttagatggaacctacaagcaggtaattgctctagcagatgcagtggaggaaaaccaaggcaatctgttccagtcattcaccaggctgaagagtgccacccatttggtgattctgctgatcgcgctgtggcagaagcttagtgctgaccaggttgctattctggaagcggcatttctgccgctacaagaagacactcaagaattgggctgggaagaaacggtggatgccgccatttcccacctgttgaagacttgcctgtcgaagagttctaaggagcaggctttgaacctcaacagccagctgaacatacccaaagacacaagccaactgaagaaacatatcaccttgctctgcgatagattatccaaaggtggccgtctctgcctaagtaccgatgcagcagccccacagaccatggtcatgccaggtggttgtactacaatcccagagtcagacctagaagaaagatcagtagaacaagactctacagaactgtttaccaaccacagacatctcactgcagagacacccaggcctgaagtttcacccctccaaggagtctcggaataattcaagtagagttgtttggttgagaggaacatccccatctcaaggccgaacctgtgtgaacctcatgccaagcacagatatagggctggcgcaggtgcttcctaaagctcaccttcctggagatgacatgcatagaaagaggggttgggactttttacttcactaggagaacttgtaacaccatggggaagtcagctgaaacttgtcttgttttgccaggaaaggaagtagttgcctttggtcatccatctgctaatagtcacagaatacagtgaaatgacatagttttgggttagattttataatgcaaagattcagatccaaaataatttcataccccattttttcacagaattcttatatagtaaatgtatcaagtttaataaagcatctcattgtcaaataatatcttggattttatttataattagagggatttatgagtgattgctctacattatttcttcaaaggaaaggaaaggaattgaagactttgctactctctggtaagacttgaatgtgattattttataaataaaagaaccactatgaaactttcatgtgatttgttctattaagctaaacgtggaagaagggaagttttctagtattgtatgaaaatgtttaaatattttcaaggaagctagtacattaacatccccttttcattaccccattgggtggcaccttttaaaaatccaggttattaaaggattcacactttattacagttaaaatttaaggtttttatgtgtaagaagtgaaagaaactttgctaatttcaagttcgaattacagttgtgagattgatttatttaaataaaaatatgcctttgccagtt

SEQ ID NO: 110730 - DNA, 3899 bp, Homo sapiens
  Payload ID: 1712
  Gene Symbol: BBS9
  Gene Name: Bardet-Biedl syndrome 9
  Uniprot ID: Q3SYG4
  ENST ID: ENST00000350941
  CDS Start-End: 514-3057
agtggcgtccgttgtaagtgctatgacaacagggcgaagatggctcagagttaggctggagaggggaggtgtcccttccgctgcggccgtcgggtttctgctacatcccattcaccgcctcctccatcctttcctcctcggtgtgagcagcaggacttgcatttgttctcgcctgcctagtgtcttccaagggatagatgccgtttcctctgctggtctctgggggtgacggggggcgcaggggagcttcttgggggaatcactccaactctgtggagctggtggtgctgcctggtggggctctctctttgcccgggacgtggaacaactttcagctggaggacgagagggaatagtgaagctaaaggttgcttttctctgcaccgtccgttcttgctccctctgctccatcactgggaccttgtcaggcgttcataaagcaaaatttgccgaacgagggttcgcagaaaggtggggcagagctcatctgacgtggcatcagtgtgaaagaaaatgtctttatttaaagcccgtgattggtggtctactattctgggagataaagaagaatttgatcaaggctgtttgtgtctggctaatgttgacaatagtggaaatggacaagataaaataattgtgggtagctttatgggatacctaaggatctttagcccccatcctgcaaaaacaggagatggagctcaagccgaagatttgcttctagaagtggatctacgagatccagtacttcaagtggaagtaggaaagtttgtttcaggtaccgaaatgctacatttggctgtgttacattctagaaaactttgtgtctactctgtctcaggaaccttgggtaatgtggaacatgggaaccaatgtcagatgaaattgatgtatgaacataatcttcagagaacagcctgcaatatgacctatggatcatttggtggtgtaaaaggtcgagatttaatttgcatccagtctatggatgggatgctgatggtatttgagcaggagagctatgcttttggaagatttctccctggctttcttctgcctggtcctcttgcctacagttcccgtacagattccttccttactgtctcttcctgccaacaagtggaaagttataagtaccaggtacttgcttttgcaacagatgcagataaaaggcaggagactgaacagcaaaaacttggttctggaaaaagactagttgtggattggactctaaatattggagagcaagcccttgacatatgtattgtctctttcaatcagtcggcatcctctgtttttgttcttggtgagagaaactttttttgccttaaggataatggacaaattcgattcatgaagaagcttgattggagcccaagttgttttctgccatattgctcagtttctgaaggaacaataaatactttgattggaaatcataataacatgctgcatatttatcaagatgtgacactgaagtgggccacccaacttccccacattcctgtagcagtaagagtgggctgtttgcatgatttaaagggagtgatagtcactctgagtgatgatggtcacttgcagtgttcatacctggggacagatccttctctgttccaagctccaaacgttcaatctcgagaactaaactatgatgaacttgatgtagaaatgaaagaacttcagaaaatcatcaaagatgttaacaaatcacaaggtgtttggcccatgactgagagagaagatgacttgaacgtttctgtcgtggtttctcctaactttgattcagtttctcaagcgaccgatgttgaggtgggaactgaccttgtcccttctgtcacggtgaaggtcacactgcagaacagagtgatattgcaaaaagccaaattatcagtctacgtgcaaccaccattagaattgacttgtgatcagttcacctttgaatttatgagcattccgcgagttatccaatgtaaatttagacttcccctaaagttaatttgcctaccaggtcagccttcaaaaactgcaagccacaaaattactattgataccaacaaatctccagtcagtcttcttagtctcttcccaggttttgccagtcagtcagatgatgatcaggtgaatgtaatgggttttcacttcttaggaggtgctcgaattactgttcttgcttccaaaacttctcaacgatatcgcattcagagtgaacaatttgaagatctttggctcataaccaatgagcttattcttcgccttcaagaatattttgaaaaacagggagtcaaagattttgcatgttctttttcgggatctataccccttcaagaatattttgagttgattgatcatcattttgagctacggataaatggtgaaaaattagaagaactcttatctgagagagctgtacaatttcgggccattcaacgccggctactagcaagattcaaagataaaactcctgcccctcttcaacacctggacaccttgttagatggaacctacaagcaggtaattgctctagcagatgcagtggaggaaaaccaaggcaatctgttccagtcattcaccaggctgaagagtgccacccatttggtgattctgctgatcgcgctgtggcagaagcttagtgctgaccaggttgctattctggaagcggcatttctgccgctacaagaagacactcaagaattgggctgggaagaaacggtggatgccgccatttcccacctgttgaagacttgcctgtcgaagagttctaaggagcaggctttgaacctcaacagccagctgaacatacccaaagacacaagccaactgaagaaacatatcaccttgctctgcgatagattatccaaaggtggccgtctctgcctaagtaccgatgcagcagccccacagaccatggtcatgccaggtggttgtactacaatcccagagtcagacctagaagaaagatcagtagaacaagactctacagaactgtttaccaaccacagacatctcactgcagagacacccaggcctgaagtttcacccctccaaggagtctcggaataattcaagtagagttgtttggttgagaggaacatccccatctcaaggccgaacctgtgtgaacctcatgccaagcacagatatagggctggcgcaggtgcttcctaaagctcaccttcctggagatgacatgcatagaaagaggggttgggactttttacttcactaggagaacttgtaacaccatggggaagtcagctgaaacttgtcttgttttgccaggaaaggaagtagttgcctttggtcatccatctgctaatagtcacagaatacagtgaaatgacatagttttgggttagattttataatgcaaagattcagatccaaaataatttcataccccattttttcacagaattcttatatagtaaatgtatcaagtttaataaagcatctcattgtcaaataatatcttggattttatttataattagagggatttatgagtgattgctctacattatttcttcaaaggaaaggaaaggaattgaagactttgctactctctggtaagacttgaatgtgattattttataaataaaagaaccactatgaaactttcatgtgatttgttctattaagctaaacgtggaagaagggaagttttctagtattgtatgaaaatgtttaaatattttcaaggaagctagtacattaacatccccttttcattaccccattgggtggcaccttttaaaaatccaggttattaaaggattcacactttattacagttaaaatttaaggtttttatgtgtaagaagtgaaagaaactttgctaatttcaagttcgaattacagttgtgagattgatttatttaaataaaaatatgcctttgccagtt

SEQ ID NO: 110731 - DNA, 4004 bp, Homo sapiens
  Payload ID: 1712
  Gene Symbol: BBS9
  Gene Name: Bardet-Biedl syndrome 9
  Uniprot ID: Q3SYG4
  ENST ID: ENST00000355070
  CDS Start-End: 514-3162
agtggcgtccgttgtaagtgctatgacaacagggcgaagatggctcagagttaggctggagaggggaggtgtcccttccgctgcggccgtcgggtttctgctacatcccattcaccgcctcctccatcctttcctcctcggtgtgagcagcaggacttgcatttgttctcgcctgcctagtgtcttccaagggatagatgccgtttcctctgctggtctctgggggtgacggggggcgcaggggagcttcttgggggaatcactccaactctgtggagctggtggtgctgcctggtggggctctctctttgcccgggacgtggaacaactttcagctggaggacgagagggaatagtgaagctaaaggttgcttttctctgcaccgtccgttcttgctccctctgctccatcactgggaccttgtcaggcgttcataaagcaaaatttgccgaacgagggttcgcagaaaggtggggcagagctcatctgacgtggcatcagtgtgaaagaaaatgtctttatttaaagcccgtgattggtggtctactattctgggagataaagaagaatttgatcaaggctgtttgtgtctggctaatgttgacaatagtggaaatggacaagataaaataattgtgggtagctttatgggatacctaaggatctttagcccccatcctgcaaaaacaggagatggagctcaagccgaagatttgcttctagaagtggatctacgagatccagtacttcaagtggaagtaggaaagtttgtttcaggtaccgaaatgctacatttggctgtgttacattctagaaaactttgtgtctactctgtctcaggaaccttgggtaatgtggaacatgggaaccaatgtcagatgaaattgatgtatgaacataatcttcagagaacagcctgcaatatgacctatggatcatttggtggtgtaaaaggtcgagatttaatttgcatccagtctatggatgggatgctgatggtatttgagcaggagagctatgcttttggaagatttctccctggctttcttctgcctggtcctcttgcctacagttcccgtacagattccttccttactgtctcttcctgccaacaagtggaaagttataagtaccaggtacttgcttttgcaacagatgcagataaaaggcaggagactgaacagcaaaaacttggttctggaaaaagactagttgtggattggactctaaatattggagagcaagcccttgacatatgtattgtctctttcaatcagtcggcatcctctgtttttgttcttggtgagagaaactttttttgccttaaggataatggacaaattcgattcatgaagaagcttgattggagcccaagttgttttctgccatattgctcagtttctgaaggaacaataaatactttgattggaaatcataataacatgctgcatatttatcaagatgtgacactgaagtgggccacccaacttccccacattcctgtagcagtaagagtgggctgtttgcatgatttaaagggagtgatagtcactctgagtgatgatggtcacttgcagtgttcatacctggggacagatccttctctgttccaagctccaaacgttcaatctcgagaactaaactatgatgaacttgatgtagaaatgaaagaacttcagaaaatcatcaaagatgttaacaaatcacaaggtgtttggcccatgactgagagagaagatgacttgaacgtttctgtcgtggtttctcctaactttgattcagtttctcaagcgaccgatgttgaggtgggaactgaccttgtcccttctgtcacggtgaaggtcacactgcagaacagagtgatattgcaaaaagccaaattatcagtctacgtgcaaccaccattagaattgacttgtgatcagttcacctttgaatttatgacaccagatttgactagaacagtaagcttttctgtttatctgaaaagaagttatacaccatcagaattggaaggaaatgctgttgtttcttattccagaccaacaggcattccgcgagttatccaatgtaaatttagacttcccctaaagttaatttgcctaccaggtcagccttcaaaaactgcaagccacaaaattactattgataccaacaaatctccagtcagtcttcttagtctcttcccaggttttgccagtcagtcagatgatgatcaggtgaatgtaatgggttttcacttcttaggaggtgctcgaattactgttcttgcttccaaaacttctcaacgatatcgcattcagagtgaacaatttgaagatctttggctcataaccaatgagcttattcttcgccttcaagaatattttgaaaaacagggagtcaaagattttgcatgttctttttcgggatctataccccttcaagaatattttgagttgattgatcatcattttgagctacggataaatggtgaaaaattagaagaactcttatctgagagagctgtacaatttcgggccattcaacgccggctactagcaagattcaaagataaaactcctgcccctcttcaacacctggacaccttgttagatggaacctacaagcaggtaattgctctagcagatgcagtggaggaaaaccaaggcaatctgttccagtcattcaccaggctgaagagtgccacccatttggtgattctgctgatcgcgctgtggcagaagcttagtgctgaccaggttgctattctggaagcggcatttctgccgctacaagaagacactcaagaattgggctgggaagaaacggtggatgccgccatttcccacctgttgaagacttgcctgtcgaagagttctaaggagcaggctttgaacctcaacagccagctgaacatacccaaagacacaagccaactgaagaaacatatcaccttgctctgcgatagattatccaaaggtggccgtctctgcctaagtaccgatgcagcagccccacagaccatggtcatgccaggtggttgtactacaatcccagagtcagacctagaagaaagatcagtagaacaagactctacagaactgtttaccaaccacagacatctcactgcagagacacccaggcctgaagtttcacccctccaaggagtctcggaataattcaagtagagttgtttggttgagaggaacatccccatctcaaggccgaacctgtgtgaacctcatgccaagcacagatatagggctggcgcaggtgcttcctaaagctcaccttcctggagatgacatgcatagaaagaggggttgggactttttacttcactaggagaacttgtaacaccatggggaagtcagctgaaacttgtcttgttttgccaggaaaggaagtagttgcctttggtcatccatctgctaatagtcacagaatacagtgaaatgacatagttttgggttagattttataatgcaaagattcagatccaaaataatttcataccccattttttcacagaattcttatatagtaaatgtatcaagtttaataaagcatctcattgtcaaataatatcttggattttatttataattagagggatttatgagtgattgctctacattatttcttcaaaggaaaggaaaggaattgaagactttgctactctctggtaagacttgaatgtgattattttataaataaaagaaccactatgaaactttcatgtgatttgttctattaagctaaacgtggaagaagggaagttttctagtattgtatgaaaatgtttaaatattttcaaggaagctagtacattaacatccccttttcattaccccattgggtggcaccttttaaaaatccaggttattaaaggattcacactttattacagttaaaatttaaggtttttatgtgtaagaagtgaaagaaactttgctaatttcaagttcgaattacagttgtgagattgatttatttaaataaaaatatgcctttgccagtt

SEQ ID NO: 110732 - DNA, 3914 bp, Homo sapiens
  Payload ID: 1712
  Gene Symbol: BBS9
  Gene Name: Bardet-Biedl syndrome 9
  Uniprot ID: Q3SYG4
  ENST ID: ENST00000396127
  CDS Start-End: 514-3072
agtggcgtccgttgtaagtgctatgacaacagggcgaagatggctcagagttaggctggagaggggaggtgtcccttccgctgcggccgtcgggtttctgctacatcccattcaccgcctcctccatcctttcctcctcggtgtgagcagcaggacttgcatttgttctcgcctgcctagtgtcttccaagggatagatgccgtttcctctgctggtctctgggggtgacggggggcgcaggggagcttcttgggggaatcactccaactctgtggagctggtggtgctgcctggtggggctctctctttgcccgggacgtggaacaactttcagctggaggacgagagggaatagtgaagctaaaggttgcttttctctgcaccgtccgttcttgctccctctgctccatcactgggaccttgtcaggcgttcataaagcaaaatttgccgaacgagggttcgcagaaaggtggggcagagctcatctgacgtggcatcagtgtgaaagaaaatgtctttatttaaagcccgtgattggtggtctactattctgggagataaagaagaatttgatcaaggctgtttgtgtctggctaatgttgacaatagtggaaatggacaagataaaataattgtgggtagctttatgggatacctaaggatctttagcccccatcctgcaaaaacaggagatggagctcaagccgaagatttgcttctagaagtggatctacgagatccagtacttcaagtggaagtaggaaagtttgtttcaggtaccgaaatgctacatttggctgtgttacattctagaaaactttgtgtctactctgtctcaggaaccttgggtaatgtggaacatgggaaccaatgtcagatgaaattgatgtatgaacataatcttcagagaacagcctgcaatatgacctatggatcatttggtggtgtaaaaggtcgagatttaatttgcatccagtctatggatgggatgctgatggtatttgagcaggagagctatgcttttggaagatttctccctggctttcttctgcctggtcctcttgcctacagttcccgtacagattccttccttactgtctcttcctgccaacaagtggaaagttataagtaccaggtacttgcttttgcaacagatgcagataaaaggcaggagactgaacagcaaaaacttggttctggaaaaagactagttgtggattggactctaaatattggagagcaagcccttgacatatgtattgtctctttcaatcagtcggcatcctctgtttttgttcttggtgagagaaactttttttgccttaaggataatggacaaattcgattcatgaagaagcttgattggagcccaagttgttttctgccatattgctcagtttctgaaggaacaataaatactttgattggaaatcataataacatgctgcatatttatcaagatgtgacactgaagtgggccacccaacttccccacattcctgtagcagtaagagtgggctgtttgcatgatttaaagggagtgatagtcactctgagtgatgatggtcacttgcagtgttcatacctggggacagatccttctctgttccaagctccaaacgttcaatctcgagaactaaactatgatgaacttgatgtagaaatgaaagaacttcagaaaatcatcaaagatgttaacaaatcacaaggtgtttggcccatgactgagagagaagatgacttgaacgtttctgtcgtggtttctcctaactttgattcagtttctcaagcgaccgatgttgaggtgggaactgaccttgtcccttctgtcacggtgaaggtcacactgcagaacagagtgatattgcaaaaagccaaattatcagtctacgtgcaaccaccattagaattgacttgtgatcagttcacctttgaatttatgaatcgaaatcctgatggcattccgcgagttatccaatgtaaatttagacttcccctaaagttaatttgcctaccaggtcagccttcaaaaactgcaagccacaaaattactattgataccaacaaatctccagtcagtcttcttagtctcttcccaggttttgccagtcagtcagatgatgatcaggtgaatgtaatgggttttcacttcttaggaggtgctcgaattactgttcttgcttccaaaacttctcaacgatatcgcattcagagtgaacaatttgaagatctttggctcataaccaatgagcttattcttcgccttcaagaatattttgaaaaacagggagtcaaagattttgcatgttctttttcgggatctataccccttcaagaatattttgagttgattgatcatcattttgagctacggataaatggtgaaaaattagaagaactcttatctgagagagctgtacaatttcgggccattcaacgccggctactagcaagattcaaagataaaactcctgcccctcttcaacacctggacaccttgttagatggaacctacaagcaggtaattgctctagcagatgcagtggaggaaaaccaaggcaatctgttccagtcattcaccaggctgaagagtgccacccatttggtgattctgctgatcgcgctgtggcagaagcttagtgctgaccaggttgctattctggaagcggcatttctgccgctacaagaagacactcaagaattgggctgggaagaaacggtggatgccgccatttcccacctgttgaagacttgcctgtcgaagagttctaaggagcaggctttgaacctcaacagccagctgaacatacccaaagacacaagccaactgaagaaacatatcaccttgctctgcgatagattatccaaaggtggccgtctctgcctaagtaccgatgcagcagccccacagaccatggtcatgccaggtggttgtactacaatcccagagtcagacctagaagaaagatcagtagaacaagactctacagaactgtttaccaaccacagacatctcactgcagagacacccaggcctgaagtttcacccctccaaggagtctcggaataattcaagtagagttgtttggttgagaggaacatccccatctcaaggccgaacctgtgtgaacctcatgccaagcacagatatagggctggcgcaggtgcttcctaaagctcaccttcctggagatgacatgcatagaaagaggggttgggactttttacttcactaggagaacttgtaacaccatggggaagtcagctgaaacttgtcttgttttgccaggaaaggaagtagttgcctttggtcatccatctgctaatagtcacagaatacagtgaaatgacatagttttgggttagattttataatgcaaagattcagatccaaaataatttcataccccattttttcacagaattcttatatagtaaatgtatcaagtttaataaagcatctcattgtcaaataatatcttggattttatttataattagagggatttatgagtgattgctctacattatttcttcaaaggaaaggaaaggaattgaagactttgctactctctggtaagacttgaatgtgattattttataaataaaagaaccactatgaaactttcatgtgatttgttctattaagctaaacgtggaagaagggaagttttctagtattgtatgaaaatgtttaaatattttcaaggaagctagtacattaacatccccttttcattaccccattgggtggcaccttttaaaaatccaggttattaaaggattcacactttattacagttaaaatttaaggtttttatgtgtaagaagtgaaagaaactttgctaatttcaagttcgaattacagttgtgagattgatttatttaaataaaaatatgcctttgccagtt

SEQ ID NO: 110733 - DNA, 1982 bp, Homo sapiens
  Payload ID: 1712
  Gene Symbol: BBS9
  Gene Name: Bardet-Biedl syndrome 9
  ENST ID: ENST00000434373
  CDS Start-End: 1-1363
tgaccttgtcccttctgtcacggtgaaggtcacactgcagaacagagtgatattgcaaaaagccaaattatcagtctacgtgcaaccaccattagaattgacttgtgatcagttcacctttgaatttatgacaccagatttgactagaacagtaagcttttctgtttatctgaaaagaagttatacaccatcagaattggaaggaaatgctgttgtttcttattccagaccaacagatcgaaatcctgatggcattccgcgagttatccaatgtaaatttagacttcccctaaagttaatttgcctaccaggtcagccttcaaaaactgcaagccacaaaattactattgataccaacaaatctccagtcagtcttcttagtctcttcccaggttttgccagtcagtcagatgatgatcaggtgaatgtaatgggttttcacttcttaggaggtgctcgaattactgttcttgcttccaaaacttctcaacgatatcgcattcagagtgaacaatttgaagatctttggctcataaccaatgagcttattcttcgccttcaagaatattttgaaaaacagggagtcaaagattttgcatgttctttttcgggatctataccccttcaagaatattttgagttgattgatcatcattttgagctacggataaatggtgaaaaattagaagaactcttatctgagagagctgtacaatttcgggccattcaacgccggctactagcaagattcaaagataaaactcctgcccctcttcaacacctggacaccttgttagatggaacctacaagcaggtaattgctctagcagatgcagtggaggaaaaccaaggcaatctgttccagtcattcaccaggctgaagagtgccacccatttggtgattctgctgatcgcgctgtggcagaagcttagtgctgaccaggttgctattctggaagcggcatttctgccgctacaagaagacactcaagaattgggctgggaagaaacggtggatgccgccatttcccacctgttgaagacttgcctgtcgaagagttctaaggagcaggctttgaacctcaacagccagctgaacatacccaaagacacaagccaactgaagaaacatatcaccttgctctgcgatagattatccaaaggtggccgtctctgcctaagtaccgatgcagcagccccacagaccatggtcatgccaggtggttgtactacaatcccagagtcagacctagaagaaagatcagtagaacaagactctacagaactgtttaccaaccacagacatctcactgcagagacacccaggcctggtaagagactggatggccttcacaagcgttagttaagtcagaagcagtgacaatctggtcagtttttgtcataccagagagcattccgcaaagctgcttgttttccaatttcttcattcttccccttagcactggtgcagctgaatttgatcctttgtgtattcctgtcactattcagatcttttctctctctttctctcttactctctttttttccagaagtttcacccctccaaggagtctcggaataattcaagtagagttgtttggttgagaggaacatccccatctcaaggccgaacctgtgtgaacctcatgccaagcacagatatagggctggcgcaggtgcttcctaaagctcaccttcctggagatgacatgcatagaaagaggggttgggactttttacttcactaggagaacttgtaacaccatggggaagtcagctgaaacttgtcttgttttgccaggaaaggaagtagttgcctttggtcatccatctgctaatagtcacagaatacagtgaaatgacatagttttgggttagattttataatgcaaagattcagatccaaaataatttcataccccattttttcacagaattcttatatagtaaatgtatcaagtttaataaagcatctcattgtc

SEQ ID NO: 110734 - DNA, 596 bp, Homo sapiens
  Payload ID: 1712
  Gene Symbol: BBS9
  Gene Name: Bardet-Biedl syndrome 9
  ENST ID: ENST00000442858
  CDS Start-End: 158-596
attttctaatttaagtgaaaccactagtgtcagcagacaaacgtgtgagctgaacttgacatccttttcttcaactgctcccttctcaaatattttcaaactagaggagcctttctaaggaaccttgggtaatgtggaacatgggaaccaatgtcagatgaaattgatgtatgaacataatcttcagagaacagcctgcaatatgacctatggatcatttggtggtgtaaaaggtcgagatttaatttgcatccagtctatggatgggatgctgatggtatttgagcaggagagctatgcttttggaagatttctccctggctttcttctgcctggtcctcttgcctacagttcccgtacagattccttccttactgtctcttcctgccaacaagtggaaagttataagtaccaggtacttgcttttgcaacagatgcagataaaaggcaggagactgaacagcaaaaacttggttctggaaaaagactagttgtggattggactctaaatattggagagcaagcccttgacatatgtattgtctctttcaatcagtcggcatcctctgtttttgttcttggtgagagaaactttt

SEQ ID NO: 110735 - DNA, 1252 bp, Homo sapiens
  Payload ID: 1712
  Gene Symbol: BBS9
  Gene Name: Bardet-Biedl syndrome 9
  Uniprot ID: Q3SYG4
  ENST ID: ENST00000425508
  CDS Start-End: 60-992
gtctggctaatgttgacaatagtggaaatggacaagataaaataattgtgggtagctttatgggatacctaaggatctttagcccccatcctgcaaaaacaggagatggagctcaagccgaagatttgcttctagaagtggatctacgagatccagtacttcaagtggaagtaggaaagtttgtttcaggtaccgaaatgctacatttggctgtgttacattctagaaaactttgtgtctactctgtctcaggaaccttgggtaatgtggaacatgggaaccaatgtcagatgaaattgatgtatgaacataatcttcagagaacagcctgcaatatgacctatggatcatttggtggtgtaaaaggtcgagatttaatttgcatccagtctatggatgggatgctgatggtatttgagcaggagagctatgcttttggaagatttctccctggctttcttctgcctggtcctcttgcctacagttcccgtacagattccttccttactgtctcttcctgccaacaagtggaaagttataagtaccaggtacttgcttttgcaacagatgcagataaaaggcaggagactgaacagcaaaaacttggttctggaaaaagactagttgtggattggactctaaatattggagagcaagcccttgacatatgtattgtctctttcaatcagtcggcatcctctgtttttgttcttggtgagagaaactttttttgccttaaggataatggacaaattcgattcatgaagaagcttgattggagcccaagttgttttctgccatattgctcagtttctgaaggaacaataaatactttgattggaaatcataataacatgctgcatatttatcaagatgtgacactgaagtgggccacccaacttccccacattcctgtagcagtaagagtgggctgtttgcaattttctttatggaagcatttgttgcctcgatcttccactttagaaaaatgaagtttctccttttctttgggagaggatatatctgaatacttgccttcttggcatttatacattcaaagctcagtgctagattagagctattatttgcatagtcttttggtattgcccacttttggcattaccatattatttgacaattagaaggaatagggaaggaatattacatgactgtaaaagagttggttatattttatgttgacttcaagggttccatttgaactattatgggcaattaaagagttttacatttc

SEQ ID NO: 110736 - DNA, 3705 bp, Homo sapiens
  Payload ID: 1712
  Gene Symbol: BBS9
  Gene Name: Bardet-Biedl syndrome 9
  ENST ID: ENST00000433714
  CDS Start-End: 492-1874
atgacaacagggcgaagatggctcagagttaggctggagaggggaggtgtcccttccgctgcggccgtcgggtttctgctacatcccattcaccgcctcctccatcctttcctcctcggtgtgagcagcaggacttgcatttgttctcgcctgcctagtgtcttccaagggatagatgccgtttcctctgctggtctctgggggtgacggggggcgcaggggagcttcttgggggaatcactccaactctgtggagctggtggtgctgcctggtggggctctctctttgcccgggacgtggaacaactttcagctggaggacgagagggaatagtgaagctaaaggttgcttttctctgcaccgtccgttcttgctccctctgctccatcactgggaccttgtcaggcgttcataaagcaaaatttgccgaacgagggttcgcagaaaggtggggcagagctcatctgacgtggcatcagtgtgaaagaaaatgtctttatttaaagcccgtgattggtggtctactattctgggagataaagaagaatttgatcaaggctgtttgtgtctggctaatgttgacaatagtggaaatggacaagataaaataattgtgggtagctttatgggatacctaaggatctttagcccccatcctgcaaaaacaggagatggagctcaagccgaagatttgcttctagaagtggatctacgagatccagtacttcaagtggaagtaggaaagtttgtttcaggtaccgaaatgctacatttggctgtgttacattctagaaaactttgtgtctactctgtctcaggaaccttgggtaatgtggaacatgggaaccaatgtcagatgaaattgatgtatgaacataatcttcagagaacagcctgcaatatgacctatggatcatttggtggtgtaaaaggtcgagatttaatttgcatccagtctatggatgggatgctgatggtatttgagcaggagagctatgcttttggaagatttctccctggctttcttctgcctggtcctcttgcctacagttcccgtacagattccttccttactgtctcttcctgccaacaagtggaaagttataagtaccaggtacttgcttttgcaacagatgcagataaaaggcaggagactgaacagcaaaaacttggttctggaaaaagactagttgtggattggactctaaatattggagagcaagcccttgacatatgtattgtctctttcaatcagtcggcatcctctgtttttgttcttggtgagagaaactttttttgccttaaggataatggacaaattcgattcatgaagaagcttgattggagcccaagttgttttctgccatattgctcagtttctgaaggaacaataaatactttgattggaaatcataataacatgctgcatatttatcaagatgtgacactgaagtgggccacccaacttccccacattcctgtagcagtaagagtgggctgtttgcatgatttaaagggagtgatagtcactctgagtgatgatggtcacttgcagtgttcatacctggggacagatccttctctgttccaagctccaaacgttcaatctcgagaactaaactatgatgaacttgatgtagaaatgaaagaacttcagaaaatcatcaaagatgttaacaaatcacaaggtgtttggcccatgactgagagagaagatgacttgaacgtttctgtcgtggtttctcctaactttgattcagtttctcaagcgaccgatgttgaggtgggaactgaccttgtcccttctgtcacggtgaagcagccaagatatacaaccatgcaagtttccatcataataaatcctgttaattgagaaaatttttccatccgttccaagtgaatgaagatgtggctaccttgagtatgtgtgcatgatgcgtgaccatctattccaggcaactaggtcacactgcagaacagagtgatattgcaaaaagccaaattatcagtctacgtgcaaccaccattagaattgacttgtgatcagttcacctttgaatttatgacaccagatttgactagaacagtaagcttttctgtttatctgaaaagaagttatacaccatcagaattggaaggaaatgctgttgtttcttattccagaccaacagatcgaaatcctgatggcattccgcgagttatccaatgtaaatttagacttcccctaaagttaatttgcctaccaggtcagccttcaaaaactgcaagccacaaaattactattgataccaacaaatctccagtcagtcttcttagtctcttcccaggttttgccagtcagtcagatgatgatcaggtgaatgtaatgggttttcacttcttaggaggtgctcgaattactgttcttgcttccaaaacttctcaacgatatcgcattcagagtgaacaatttgaagatctttggctcataaccaatgagcttattcttcgccttcaagaatattttgaaaaacagggagtcaaagattttgcatgttctttttcgggatctataccccttcaagaatattttgagttgattgatcatcattttgagctacggataaatggtgaaaaattagaagaactcttatctgagagagctgtacaatttcgggccattcaacgccggctactagcaagattcaaagataaaactcctgcccctcttcaacacctggacaccttgttagatggaacctacaagcaggtaattgctctagcagatgcagtggaggaaaaccaaggcaatctgttccagtcattcaccaggctgaagagtgccacccatttggtgattctgctgatcgcgctgtggcagaagcttagtgctgaccaggttgctattctggaagcggcatttctgccgctacaagaagacactcaagaattgggctgggaagaaacggtggatgccgccatttcccacctgttgaagacttgcctgtcgaagagttctaaggagcaggctttgaacctcaacagccagctgaacatacccaaagacacaagccaactgaagaaacatatcaccttgctctgcgatagattatccaaaggtggccgtctctgcctaagtaccgatgcagcagccccacagaccatggtcatgccaggtggttgtactacaatcccagagtcagacctagaagaaagatcagtagaacaagactctacagaactgtttaccaaccacagacatctcactgcagagacacccaggcctgaagtttcacccctccaaggagtctcggaataattcaagtagagttgtttggttgagaggaacatccccatctcaaggccgaacctgtgtgaacctcatgccaagcacagatatagggctggcgcaggtgcttcctaaagctcaccttcctggagatgacatgcatagaaagaggggttgggactttttacttcactaggagaacttgtaacaccatggggaagtcagctgaaacttgtcttgttttgccaggaaaggaagtagttgcctttggtcatccatctgctaatagtcacagaatacagtgaaatgacatagttttgggttagattttataatgcaaagattcagatccaaaataatttcataccccattttttcacagaattcttatatagtaaatgtatcaagtttaataaagcatctcattgtcaaataa

SEQ ID NO: 110737 - DNA, 613 bp, Homo sapiens
  Payload ID: 1712
  Gene Symbol: BBS9
  Gene Name: Bardet-Biedl syndrome 9
  ENST ID: ENST00000432983
  CDS Start-End: 321-613
cccacccacacgcaccgaggggagagggcggtcacgcggccgggggggcgtggcctgcccccggagcccaggcaggaggagggtcttccttaaggaactgctgccaggacagggcagaggattgcagtaattatcactctctgctaatgaggaccaggccgtggttcactcgagccccgccccagtagcaatctaattccaaccgcggccctctcagaagtcggtccccgcctttgcgcctcagcctctctggactccagcccccagaagtcggcgcggcacggcgtgacctgcgcagtggcgtccgtttgtgaaagaaaatgtctttatttaaagcccgtgattggtggtctactattctgggagataaagaagaatttgatcaaggctgtttgtgtctggctaatgttgacaatagtggaaatggacaagataaaataattgtgggtagctttatgggatacctaaggatctttagcccccatcctgcaaaaacaggagatggagctcaagccgaagatttgcttctagaagtggatctacgagatccagtacttcaagtggaagtaggaaagtttgtttcaggtaccgaaatgctacatttggctgtgtt

SEQ ID NO: 110738 - DNA, 549 bp, Homo sapiens
  Payload ID: 1712
  Gene Symbol: BBS9
  Gene Name: Bardet-Biedl syndrome 9
  ENST ID: ENST00000627264
  CDS Start-End: 1-549
ttattcagaaagaatcaattgggaaagggcaggcacacagggacagaagttcttctgggttctgggtttcatccaggaccagcagtacggtctttcagccctcaggctgttttaagcctgaaggcattccgcgagttatccaatgtaaatttagacttcccctaaagttaatttgcctaccaggtcagccttcaaaaactgcaagccacaaaattactattgataccaacaaatctccagtcagtcttcttagtctcttcccaggttttgccagtcagtcagatgatgatcaggtgaatgtaatgggttttcacttcttaggaggtgctcgaattactgttcttgcttccaaaacttctcaacgatatcgcattcagagtgaacaatttgaagatctttggctcataaccaatgagcttattcttcgccttcaagaatattttgaaaaacagggagtcaaagattttgcatgttctttttcgggatctataccccttcaagaatattttgagttgattgatcatcattttgagctacggataaatggtg

SEQ ID NO: 110739 - DNA, 2341 bp, Homo sapiens
  Payload ID: 1713
  Gene Symbol: BARHL1
  Gene Name: BarH-like homeobox 1
  Uniprot ID: Q9BZE3
  ENST ID: ENST00000263610
  CDS Start-End: 614-1597
acggtgctgacgggcccccggagcggcgagggcgcggagagaggacctccccggccaggtggagagtcatgagccgcgggcagccgccgccgctctccgcggtgctgatgccgccaggtgcgctcctttccgcccgctgctagcgcggcccgggcccgcagctatctgcggtgctgacctggccaccctcagccaccacttgcctggaagaagcgtgcggtttggatttttaaaacgccattctttatttagattccaacatcctcgcgtttcttctgtgccaagggggccctcgggccgtccgtctccccctttgctctccccaacttggcgcgccctccctcccattcctccctgacactcccaccaccccccctcggctcggcggctcggcgcgatgctgcagaagacgcactgagcccttttggatctaatgcgcagaggaggttggcccagagctcccgggctcccccaaggctgaactccgtccaaggtgcccgcaggctccctgcccgccttccccatgccagcccgcagctaggggcaggggcagcggcggctggggttgggggtgggtggggagcttttggggaggacaggtcgcagcttggctatggaaggctccaatggctttgggatcgactccattctctcccaccgcgcgggcagccccgcccttcccaagggggaccccttgctcggggactgccgttcgcccctggagctgagtccacgctcagagagcagcagcgactgctcttcgccagcctctccaggaagggactgtttggagacggggaccccacggcctggcggggcatccggcccaggtttggactcccacctgcagcccgggcagctctcagccccggcccagtcgcgcaccgtcacctcctcctttctgatcagggacatccttgccgactgcaaaccactcgcggcctgtgcaccctactctagcagcgggcagccggcagcccctgagcctgggggccgccttgcggccaaggccgcggaggactttagagacaagctggacaaaagtggcagcaacgcctcatcggactctgagtataaagtgaaggaggagggcgaccgcgagatctccagctccagggacagtcccccggtgcgcctgaaaaagccacgcaaggcgcgcacggccttcaccgaccatcagctggcgcagctggagcgcagcttcgagcggcagaagtacctgagcgtgcaggaccgcatggagctcgccgcctcgctcaacctcaccgacacgcaggtcaagacctggtaccagaaccgcaggactaaatggaagcgacagacggccgtcgggttggagctgctggcggaggcaggcaattactcagcgctccagcggatgttcccgtcgccttatttctacccgcagagtctggtttccaacctggaccccggcgcggcgctctacctgtaccgcggccccagcgcgccgccgcctgctctccagagacctctggtgccccgcatcctcatccacggactccagggcgccagcgagccgcccccgccgctgccccccctggccggcgtcctcccacgcgccgcgcagcctcggtgaggcgcccgtcggctccggggcctcctcccgcgggctcggcgtggccccttccgcccgcctttctgagggcgcaggttcgacgccctttcccgggagggggccctgcccggccctccctggcgccccagcccagtgccccccgaagggccaaatgccaagtccactgaggcccggaccccggactgcgtctccccagcccccctcggcgtcctctctcgcggccgctctgtccgggagccatccccacccgccgggtgtacatacgcgtctctgccactccccacccccagcctctgccggctcccctaggcaacccctttctccccaggagcgggtgcggctgattcccaggcttcgctctctcccacgccccttctacgctccaggtggagaacagcccctctccccgcgcccccgccagggagagaaggggagtgcggagccccgtctccctacccctcgagcacctgggccagcggctgagctgtacataccgtgtgcaaagtgtatatgaagttatttattcgtgacccatgagcccgtgaccgtgtccgtggattagtgagtctgtggcctgtgccctccccactcccaggcggggcaggaaggggccaagggggcttgcccacccaccccgaccccagcccccagcctcagccccggtccgggggcagccaggcctctcgggttctctcttttttaaatgtcgaaataaacttcttacaaatgaccaggcgcctgtcc

SEQ ID NO: 110740 - DNA, 1197 bp, Homo sapiens
  Payload ID: 1713
  Gene Symbol: BARHL1
  Gene Name: BarH-like homeobox 1
  Uniprot ID: Q9BZE3
  ENST ID: ENST00000542090
  CDS Start-End: 53-1036
aggctgaactccgtccaaggagcttttggggaggacaggtcgcagcttggctatggaaggctccaatggctttgggatcgactccattctctcccaccgcgcgggcagccccgcccttcccaagggggaccccttgctcggggactgccgttcgcccctggagctgagtccacgctcagagagcagcagcgactgctcttcgccagcctctccaggaagggactgtttggagacggggaccccacggcctggcggggcatccggcccaggtttggactcccacctgcagcccgggcagctctcagccccggcccagtcgcgcaccgtcacctcctcctttctgatcagggacatccttgccgactgcaaaccactcgcggcctgtgcaccctactctagcagcgggcagccggcagcccctgagcctgggggccgccttgcggccaaggccgcggaggactttagagacaagctggacaaaagtggcagcaacgcctcatcggactctgagtataaagtgaaggaggagggcgaccgcgagatctccagctccagggacagtcccccggtgcgcctgaaaaagccacgcaaggcgcgcacggccttcaccgaccatcagctggcgcagctggagcgcagcttcgagcggcagaagtacctgagcgtgcaggaccgcatggagctcgccgcctcgctcaacctcaccgacacgcaggtcaagacctggtaccagaaccgcaggactaaatggaagcgacagacggccgtcgggttggagctgctggcggaggcaggcaattactcagcgctccagcggatgttcccgtcgccttatttctacccgcagagtctggtttccaacctggaccccggcgcggcgctctacctgtaccgcggccccagcgcgccgccgcctgctctccagagacctctggtgccccgcatcctcatccacggactccagggcgccagcgagccgcccccgccgctgccccccctggccggcgtcctcccacgcgccgcgcagcctcggtgaggcgcccgtcggctccggggcctcctcccgcgggctcggcgtggccccttccgcccgcctttctgagggcgcaggttcgacgccctttcccgggagggggccctgcccggccctccctggcgccccagcccagtgccccccgaagggccaaatgccaagtc

SEQ ID NO: 110741 - DNA, 1979 bp, Homo sapiens
  Payload ID: 1714
  Gene Symbol: BARHL2
  Gene Name: BarH-like homeobox 2
  Uniprot ID: Q9NY43
  ENST ID: ENST00000370445
  CDS Start-End: 43-1206
ggcggctgctgaacggcggagtggcgtggacctcatgtagcaatgacaatggaaggggccagcgggtcgagttttggaatagacacgattttgtccagtgccagttcaggcagcccaggcatgatgaatggagatttccgcccgctcggtgaggccaggaccgcggattttaggagtcaggccaccccatctccctgttcggagattgataccgtagggacggcgccttcttctcctatctcagtcaccatggagcccccggagccgcatctggtagcagacgcgacccagcatcatcaccacctccaccacagccagcagccgccgccgccggccgcggccccgacgcaaagtttgcagcctttgccccaacagcagcagccgctgccgccacagcagccgccgccgccgcccccccagcagctgggctcggccgcctcggcccccaggacttccacgtcttcttttttaattaaggacatcttgggcgacagcaaacctctggcggcatgtgcaccctacagcaccagcgtatcctctccccaccacaccccgaagcaggagagcaacgcagtgcacgagagcttcaggccaaagctcgagcaggaggacagcaagaccaaactcgacaagcgggaggattcccagagcgacatcaaatgccacgggacaaaggaggaaggagaccgggagattacgagtagccgtgagagtccccctgtgagagccaagaagcctcgaaaagcaaggacagctttttccgaccaccagctcaatcaactggagcgtagctttgagcggcagaagtacctgagcgtgcaggatcgcatggacctggctgcagcgctcaacctcactgacacccaagtcaagacctggtaccagaaccgcaggaccaagtggaagcggcagacagcggtgggcctggagttgctggccgaggcagggaactactcggcgctgcagaggatgtttccatcgccttatttctatcacccaagcctgctgggcagcatggacagcactacggcggcggcggctgccgctgccatgtacagcagcatgtaccggactcctccagcaccccatccccagctgcagcggcccctggtgccccgtgtgctcatccacggcctagggcctgggggacagccagcccttaatccattgtccagccccatcccaggcaccccacacccccggtgaaaacattgcagcgaaggcactgcaatcccttccccatatccctgcccaacccggactgctgcccgtcctctccctgctccaggccactaggcctcccttgcagccaactctggaaggcagaggagtaagagaggaagatgcttaccagtgggcaggggacccccaaagaggagccagccctctgctctccatctccccacccctagaaacagggctggaaatctcccccacagcagtgtgactggtgaaaatgctgaccccacacagagtgcaaccagtaagtgaaaacatcaacaaaaacaaaacctcaaattctttttcaaaaatgactttagggacaagcaggagggagggaggggggagggctaaggagggaagaaagaagggcacggagcggaaacagcacaggcagagtgaactatatatggacagcctcaagtgctgaggcaaagggcgttgccgaggacattccgtctgccccagagaaaagaggagggtaactgagaactttgcactgatttctcatgaccttttttcttttggaaaagtggcatgctccataatatgaaaaaaatgtacatttgaaagactgagtgataagtgatatatcatatttattatatgttgtccaaaaagagtcacttatatacgttagtaaaaacatgatttttcttttcatgtcttttcgattcagtaaaataaatgcttagacaaaaatatagatttttttgtgattgaaaattacaaaaataaagtttatctttttttaacaa

SEQ ID NO: 110742 - DNA, 1155 bp, Homo sapiens
  Payload ID: 1715
  Gene Symbol: BANF1
  Gene Name: barrier to autointegration factor 1
  Uniprot ID: O75531
  ENST ID: ENST00000312175
  CDS Start-End: 509-778
ccagtgttcccagttcccaccagtccaactgcgaggagtgcgacgtgagtctgagtctgatccctccgaaaaccgtacttccggcgctgtctcggaggcctcccgtcccctcccttgtccgtcttctaactcttccccacgccaggtccgtcaagcctaagtccttgagttccgggtccgggcagcagagaaaggaagtcctctccctggaggcctatctccctcagaactgcgcgagaagcgagaccttagaaggcagggcttcccgcgaaggaccggaaaggagcgcctactaaggacgccgtcgaggtccggggcgcctcaactctatagctctaactggctagaagtgcccaacgtggaatgtttcttttttaaaggcggctcttgaagcgacccggaagcggaagtggaagaaagttctagtggcttgaggtatccgcaggagcggccgggtggcgggaggaaccgttacgggaactgaagttgcggattaagcctgatcaagatgacaacctcccaaaagcaccgagacttcgtggcagagcccatgggggagaagccagtggggagcctggctgggattggtgaagtcctgggcaagaagctggaggaaaggggttttgacaaggcctatgttgtccttggccagtttctggtgctaaagaaagatgaagacctcttccgggaatggctgaaagacacttgtggcgccaacgccaagcagtcccgggactgcttcggatgccttcgagagtggtgcgacgccttcttgtgatgctctctgggaagctctcaatccccagccctcatccagagtttgcagccgagtagggactcctcccctgtcctctacgaaggaaaagattgctattgtcgtactcacctccgacgtactccggggtcttttgggagttttctcccctaaccatttcaacttttttttggattctcgctcttgcatgcctcccccgtcctttttcccttgccagttccctggtgacagttaccagctttcctgaatggattcccggccccatccctcacccccaccctcactttcaatccgtttgataccatttggctccttttttggcagaacagtcactgtccttgtaaagttttttagatcaataaagtcagtggctttcatga

SEQ ID NO: 110743 - DNA, 946 bp, Homo sapiens
  Payload ID: 1715
  Gene Symbol: BANF1
  Gene Name: barrier to autointegration factor 1
  Uniprot ID: O75531
  ENST ID: ENST00000445560
  CDS Start-End: 303-572
gtcaagcctaagtccttgagttccgggtccgggcagcagagaaaggaagtcctctccctggaggcctatctccctcagaactgcgcgagaagcgagaccttagaaggcagggcttcccgcgaaggaccggaaaggagcgcctactaaggacgccgtcgaggtccggggcgcctcaactctatagctctaactggctagaagtgcccaacgtggaatgtttcttttttaaaggcggctcttgaagcgacccggaagcggaagtggaagaaagttctagtggcttgagattaagcctgatcaagatgacaacctcccaaaagcaccgagacttcgtggcagagcccatgggggagaagccagtggggagcctggctgggattggtgaagtcctgggcaagaagctggaggaaaggggttttgacaaggcctatgttgtccttggccagtttctggtgctaaagaaagatgaagacctcttccgggaatggctgaaagacacttgtggcgccaacgccaagcagtcccgggactgcttcggatgccttcgagagtggtgcgacgccttcttgtgatgctctctgggaagctctcaatccccagccctcatccagagtttgcagccgagtagggactcctcccctgtcctctacgaaggaaaagattgctattgtcgtactcacctccgacgtactccggggtcttttgggagttttctcccctaaccatttcaacttttttttggattctcgctcttgcatgcctcccccgtcctttttcccttgccagttccctggtgacagttaccagctttcctgaatggattcccggccccatccctcacccccaccctcactttcaatccgtttgataccatttggctccttttttggcagaacagtcactgtccttgtaaagttttttagatcaataaagtcagtggctttca

SEQ ID NO: 110744 - DNA, 586 bp, Homo sapiens
  Payload ID: 1715
  Gene Symbol: BANF1
  Gene Name: barrier to autointegration factor 1
  ENST ID: ENST00000530204
  CDS Start-End: 502-586
ccgggcagcagagaaaggaagtcctctccctggaggcctatctccctcagaactgcgcgagaagcgagaccttagaaggcagggcttcccgcgaaggaccggaaaggagcgcctactaaggacgccgtcgaggtccggggcgcctcaactctatagctctaactggctagaagtgcccaacgtggaatgtttcttttttaaaggcggctcttgaagcgacccggaagcggaagtggaagaaagttctagtggcttgagagagaccctttggttagctttccacgccaagtggccgttccaggcaggcagtgtcgtcttggttcagccaaggtcacagagggagtgatagcttccgcgcagccctggctacggactctgggcatctttccactgccccgcttgcgccacctgttaggcaggatcgtttttcctctggggcaagatcaaaatccaggtcctgcaggaagaaactcctcttaaaaataattaagcctgatcaagatgacaacctcccaaaagcaccgagacttcgtggcagagcccatgggggagaagccagtggggagcctggctgggattggtgaag

SEQ ID NO: 110745 - DNA, 670 bp, Homo sapiens
  Payload ID: 1715
  Gene Symbol: BANF1
  Gene Name: barrier to autointegration factor 1
  Uniprot ID: O75531
  ENST ID: ENST00000527348
  CDS Start-End: 275-544
gaaccccgcgggcggggagcgggtgtgcgcagcgctaggtgtgcgcttcgccctgtaggtagagagaccctttggttagctttccacgccaagtggccgttccaggcaggcagtgtcgtcttggttcagccaaggtcacagagggagtgatagcttccgcgcagccctggctacggactctgggcatctttccactgccccgcttgcgccacctgttaggcaggatcgtttttcctctggggcaagatcaaaatccagattaagcctgatcaagatgacaacctcccaaaagcaccgagacttcgtggcagagcccatgggggagaagccagtggggagcctggctgggattggtgaagtcctgggcaagaagctggaggaaaggggttttgacaaggcctatgttgtccttggccagtttctggtgctaaagaaagatgaagacctcttccgggaatggctgaaagacacttgtggcgccaacgccaagcagtcccgggactgcttcggatgccttcgagagtggtgcgacgccttcttgtgatgctctctgggaagctctcaatccccagccctcatccagagtttgcagccgagtagggactcctcccctgtcctctacgaaggaaaagattgctattgtcgtactcacctccgacgtactccgggg

SEQ ID NO: 110746 - DNA, 1135 bp, Homo sapiens
  Payload ID: 1715
  Gene Symbol: BANF1
  Gene Name: barrier to autointegration factor 1
  Uniprot ID: O75531
  ENST ID: ENST00000533166
  CDS Start-End: 507-776
gccgcggagcagggccctgattggaggccagaggggttgcggggagaaggggaggagaggggtcgcaggcgctgtggcgggccctgggggagagcttggccgcgctgcggggagggggcggggtgcagcgcgtgggagccgggccgcgggaaggggcgggccgcagcggcgcgcggtgggggcggagctggggcgcggcgtgaaccccgcgggcggggagcgggtgtgcgcagcgctaggtgtgcgcttcgccctgtaggtagagagaccctttggttagctttccacgccaagtggccgttccaggcaggcagtgtcgtcttggttcagccaaggtcacagagggagtgatagcttccgcgcagccctggctacggactctgggcatctttccactgccccgcttgcgccacctgttaggcaggatcgtttttcctctggggcaagatcaaaatccaggtcctgcaggaagaaactcctcttaaaaataattaagcctgatcaagatgacaacctcccaaaagcaccgagacttcgtggcagagcccatgggggagaagccagtggggagcctggctgggattggtgaagtcctgggcaagaagctggaggaaaggggttttgacaaggcctatgttgtccttggccagtttctggtgctaaagaaagatgaagacctcttccgggaatggctgaaagacacttgtggcgccaacgccaagcagtcccgggactgcttcggatgccttcgagagtggtgcgacgccttcttgtgatgctctctgggaagctctcaatccccagccctcatccagagtttgcagccgagtagggactcctcccctgtcctctacgaaggaaaagattgctattgtcgtactcacctccgacgtactccggggtcttttgggagttttctcccctaaccatttcaacttttttttggattctcgctcttgcatgcctcccccgtcctttttcccttgccagttccctggtgacagttaccagctttcctgaatggattcccggccccatccctcacccccaccctcactttcaatccgtttgataccatttggctccttttttggcagaacagtcactgtccttgtaaagttttttagatcaataa

SEQ ID NO: 110747 - DNA, 595 bp, Homo sapiens
  Payload ID: 1716
  Gene Symbol: BANF2
  Gene Name: barrier to autointegration factor 2
  Uniprot ID: Q9H503
  ENST ID: ENST00000246090
  CDS Start-End: 263-535
gggcctaagacataagctgaacctctggcctgcagttccagatccaaggtgactgagacaaactgccagctgccactggcttatcaggagcacctgaatctgctgacacatcaaggccacttttcttaggagccccctgacttccaaaatcagtgcctttggattcatctcttccgggagagttcagtgtcttctgaaatgttacaaaacgtccttcagagcaagaaggcgtacacgaggagctcgactctgtagaaaggagatggacaacatgtctcccaggctgagagccttcctctccgaacccattggagaaaaggatgtctgctgggtggatggcatcagccatgagctcgcgatcaatttggtcaccaaaggtatcaataaggcctacatcctgctgggacaattccttctgatgcacaagaatgaagccgagtttcagaggtggctcatttgctgttttggtgccactgagtgtgaggcccagcagacttctcactgcctcaaggagtggtgtgcctgcttcctgtagacacaaacctcattgctgccccccaccaccctctggggaaaatgacgccttctccaccta

SEQ ID NO: 110748 - DNA, 444 bp, Homo sapiens
  Payload ID: 1716
  Gene Symbol: BANF2
  Gene Name: barrier to autointegration factor 2
  Uniprot ID: Q9H503
  ENST ID: ENST00000377805
  CDS Start-End: 112-384
gatttgccccatgggcctaagacataagctgaacctctggcctgcagttccagatccaaggtgactgagacaaactgccagctgccactggcttatcaggagcacctggagatggacaacatgtctcccaggctgagagccttcctctccgaacccattggagaaaaggatgtctgctgggtggatggcatcagccatgagctcgcgatcaatttggtcaccaaaggtatcaataaggcctacatcctgctgggacaattccttctgatgcacaagaatgaagccgagtttcagaggtggctcatttgctgttttggtgccactgagtgtgaggcccagcagacttctcactgcctcaaggagtggtgtgcctgcttcctgtagacacaaacctcattgctgccccccaccaccctctggggaaaatgacgccttctccaccta

SEQ ID NO: 110749 - DNA, 623 bp, Homo sapiens
  Payload ID: 1716
  Gene Symbol: BANF2
  Gene Name: barrier to autointegration factor 2
  ENST ID: ENST00000427254
  CDS Start-End: 498-623
gagactgatttgccccatgggcctaagacataagctgaacctctggcctgcagttccagatccaaggtgactgagacaaactgccagctgccactggcttatcaggagcacctgggctatcttagtttccactgctgcagcctgtggcctggacatttgcccatggttgtgaggtccccatgcatgggacttcttcctcctgactccaggcttcagttcacccatcaggccttaaagcatcttcggccctatcttgccctgaactttttgctgcaaaaaccaagggcactgcctcaagcttatcttcccagccactgtttactgctgctacattgttgcccaagacacttcagaagtgactgttgttgtcatctcctgccaagtcctggaaggcaagccaccaagtcccatgcaccattcccacagcccgacaaccttcctgactctacccactggaatctaaagagtctgcccacttctggatgtttgttcaggagatggacaacatgtctcccaggctgagagccttcctctccgaacccattggagaaaaggatgtctgctgggtggatggcatcagccatgagctcgcgatcaatttggtcaccaaaggtatcaataag

SEQ ID NO: 110750 - DNA, 360 bp, Homo sapiens
  Payload ID: 1716
  Gene Symbol: BANF2
  Gene Name: barrier to autointegration factor 2
  Uniprot ID: Q9H503
  ENST ID: ENST00000545418
  CDS Start-End: 18-311
aagcaaccctgcgctgaatgctgcgaggaacaaaggagatggacaacatgtctcccaggctgagagccttcctctccgaacccattggagaaaaggatgtctgctgggtggatggcatcagccatgagctcgcgatcaatttggtcaccaaaggtatcaataaggcctacatcctgctgggacaattccttctgatgcacaagaatgaagccgagtttcagaggtggctcatttgctgttttggtgccactgagtgtgaggcccagcagacttctcactgcctcaaggagtggtgtgcctgcttcctgtagacacaaacctcattgctgccccccaccaccctctggggaaaatgacgcc

SEQ ID NO: 110751 - DNA, 3472 bp, Homo sapiens
  Payload ID: 1717
  Gene Symbol: BSND
  Gene Name: barttin CLCNK-type chloride channel accessory beta subunit
  Uniprot ID: Q8WZ55
  ENST ID: ENST00000371265
  CDS Start-End: 255-1217
agagggaaggtgagagggcaaggagtaaaggtggctgggtgtgggtccgttgaagcgagccgcctccagccctgttgaactggtgggcccagggactggagcgggattgaaagggatcttgctctcccttgaagccttgagttgcagcgatttcagtgtcttctctccctgtgtaagcctgtctcggtgtttaggctgaactacagccaccccctctcccgggggtgtgcaggccagggactggccaggcagccatggctgacgagaagaccttccggatcggcttcattgtgctggggcttttcctgctggccctcggtacgttcctcatgagccatgatcggccccaggtctacggcaccttctatgccatgggcagcgtcatggtgatcgggggcatcatctggagcatgtgccagtgctaccccaagatcaccttcgtccctgctgactctgactttcaaggcatcctctccccaaaggccatgggcctgctggagaatgggcttgctgccgagatgaagagccccagtccccagccgccctatgtaaggctgtgggaggaagccgcctatgaccagagcctgcctgacttcagccacatccagatgaaagtcatgagctacagtgaggaccaccgctccttgctggcccctgagatggggcagccgaagctgggaaccagtgatggaggagaaggtggccctggcgacgttcaggcctggatggaggctgccgtggtcatccacaagggctcagacgagagtgaaggggaaagacgcctaactcagagctggcccggccccctggcctgtccccagggccctgcccccttggcttccttccaagatgacctggacatggactccagtgaaggcagcagccccaatgcatctccacatgacagggaggaagcttgttccccacaacaggaacctcagggctgcaggtgcccgctggaccgcttccaagactttgccctgattgatgccccaacgttggaggatgagccccaagaggggcagcagtgggaaatagccctgcccaacaactggcagcggtacccaaggacaaaggtggaggagaaggaggcttcggacacaggtggggaggaacctgagaaggaagaggaagacctgtactatgggctgccagatggagccggggacctcctcccggacaaggagctgggttttgagcctgacacccaaggctgagatgtttgtgctccgtagcttctagtctggaactgctgctgacccctgtgtgacatcacagggcctcagtttccctatctgcaaaatgggatgatatggaggttcaatgagatggtggcattttgagaatggtaaagaaatacacagggaggggatgatgactattagtggactcttgtttttccaatagttagtggtctttggccaacctttgaaggcaaaatatgatttgttgaggtttgcagcagctgaagccctcaaaagcattttccaccttcccccaaagctgacctctgagaggaaccttccttggtgctccctctgggcccctgatcctttgtgaaggccagtcaggtttcccattcctattgtgtcttatagtccacttggtagatggcgtgatccgtctttacacagagggagcctcatctcctcctgggccacattcctcctgcagctcccatcgctccttggccaggacccaaaaccttctgtgactgacccctgctgacctcattctctctgctcctccagttccaagcctagcccccctgcccatcttgcggctcacactcttgcccaagctgttctcctccaccaggatgcccttggctcccttttcagcttggcaaattcgtgctcacccttcaaacccctacacagatgacctcccttggaaaggttttcctgatgtcgctgcctcctggaaccaggtggtcttgcctctctgcgctgcctttgggacctgtatatttgtcagtgtggcatggctgcctgcctcccgttgaagggcagcatcttgactttactcaccttgagatcgcctgtgcccagatgggcctttggcctggcccagaatcggtggtcatcaagggtgtacagaactcaccaggacccaggaacctgttgcagataaaatcactctcccccacgttcccaacttttagactcacagccctcttacttcccagcattcaaacttctaaatggcctgtatgtattcacaaagcaggcaaaaagcccccagaggaacaccaccccccacccctgcctctggaatacatttgctttgacttggaattgtaggtgaaattcatcttcctggcctacttcagtttgaatcagttggctagccaggtgcggtggctcatgcctgtaatctgagcattttgggaggctaaagtgggtggatcacttgaggccaggagttggagagcagcctgggcaacatagcgaaaccctatctctactaaaactacaaaaattagctgggcgtggtggtgcacacctgtagtctcagctacttgggaggctgagctggaggatagcttaagcacaggagatggaagttgcagtgagccgagatcgcaccactgcactccggcctgggtgacagagtgagaccctgcctcaaaacaaaacaattggaattggatggcatttagtgagcatctactatatgccagatattgagctgtgatctctaggggtaaagagacatgaactactgacaccgtgcttgccttcagagggctcacaatctagtgagcttgatttctgtgagtgcagagcagaagctgaggtgggaacagagaagtaaaaaatggacacaccagaggcagaagagtgacagcctcccagctgtttggggcagttgagtatggtggggaaatagctcaagctgtctttgcagcccctgaagacatcactgtaccctattgaaccatctcagggtgatgctattgttacgctgatccctgcaacgcttgcctgtgccccagcccaggatcctggcagctgcagagaaaatggcagtaacactacctcaaaccaggaccacgccctcagagcctgcaccctgggccacctgggagtcagagaccttcacctgggctatggggttctgggttgaggctggggttcccggcctagggaagggcttccgggttgaggccgggggtcctggcctagggaaggagatgcccctgtgtgctgggttacaaggtcatggccctgggaacacacttccttttctttctgggtcatttctgcctctgcagtgaaggatgccacagggtacaccctctctgctgtcatgactcaggacaggagttcctggtcacagctgagtcttcggatgaggtgaggggtagcatgctcctgtgctctgttgcctaaggcagggcagcctacaacccacgttagaaacagcgtcagcactaagggctaaaataaaactactttcaacatttaaa

SEQ ID NO: 110752 - DNA, 1533 bp, Homo sapiens
  Payload ID: 1718
  Gene Symbol: BARX1
  Gene Name: BARX homeobox 1
  Uniprot ID: Q9HBU1
  ENST ID: ENST00000253968
  CDS Start-End: 227-991
cggcgtggggagggggcgcagtcccgggttcgaccggccgagccccgcgcgccccgcccgcgccctgcgcctccgcccggccggccggcgggggagggggcatgagccggcgcccgcgcgccgccccgagctgcgggccggcctagagccccgcgcgggccccgcgccggagccaagccgtcgccgccgccgccgccaaaccgcgggcgcagcagtgggcgccgcgatgcagcggccgggggagccgggcgccgcgcgcttcggcccgcccgagggctgcgcggaccaccggccgcaccgctatcgcagcttcatgattgaggagatcctcacggagccacccgggcccaagggcgccgcgcccgcagccgccgctgccgcggcgggcgagctgctgaagttcggcgtgcaggcgctgctggcggcgcggcccttccacagccacctggccgtgctgaaggccgagcaggcggcggtgttcaagttcccactggcgccgctgggctgttcagggctgagctctgcgttgctggcggcagggcccgggctgcccggcgccgcgggtgcgccacacctgccgctcgagttgcagctccgcgggaagctggaggcggcaggccctggggagccaggcaccaaagccaagaaggggcgtcggagccgcactgtgttcaccgagctgcagctgatgggcctggagaaacgcttcgagaagcagaagtacctttccacgccggacagaatagatcttgctgagtccctgggcctgagccagttgcaggtgaagacgtggtaccagaatcggaggatgaagtggaagaaaatagtgctgcagggcggcggcctggagtctcccaccaagcccaaggggcggcccaagaagaactcaattccaacgagcgagcagcttactgagcaggagcgcgccaaggatgcagagaaaccggcggaggtgccgggcgagcccagcgacaggagccgcgaggactgagggcggtatacggtgcggggcctgggatgcccgcgccacccgcagccccctcactcggcggaaacccgcgagccggcccttccgcgtccaagaagtttacttcctaagcctttttattatgatcttgaatgcggacaattggggccaaacgaggaaggacacagacccaaaagccagacccaggtcccagcgcgcttctgggctctaacctgggagactcgcatccagcccggcggaagctacagtctctaccctgagctccgtggcgcagagcgctccacgcgtattcacgccccgctcctcgcctgcacccccaccccgtctggggcctgccctcccggccggggagcctccaggcacacacccgcttctggacgtcggggacccagcggttgggctcaggccacaacggcctgagattgccccggggcaacccgtcggctcggcctggaggccgggtccccgatgtcgctggggcccctaccccctcttgcgaagacggtgactttttttccaataaaatattttatgacacaatcggg

SEQ ID NO: 110753 - DNA, 1323 bp, Homo sapiens
  Payload ID: 1718
  Gene Symbol: BARX1
  Gene Name: BARX homeobox 1
  Uniprot ID: Q9HBU1
  ENST ID: ENST00000401724
  CDS Start-End: 484-786
gcctggggaactccaggacagaacacggacagggtcgaggagatactccctcccaaatctggggaacggcaacgttgaggagggtctccatctgcgccaccggcgccgaccggcagggcgtggaggttttgcgctgggaggcactggccaagcgcgagcacccccgcggcacgtggtgcggcagtccctggggcagaggagcgcggccgtagctcacccgggtcctcattctctttcttcgcagccgtgctgaaggccgagcaggcggcggtgttcaagttcccactggcgccgctgggctgttcagggctgagctctgcgttgctggcggcagggcccgggctgcccggcgccgcgggtgcgccacacctgccgctcgagttgcagctccgcgggaagctggaggcggcaggccctggggagccaggcaccaaagccaagaaggggcgtcggagccgcactgtgttcaccgagctgcagctgatgggcctggagaaacgcttcgagaagcagaagtacctttccacgccggacagaatagatcttgctgagtccctgggcctgagccagttgcaggtgaagacgtggtaccagaatcggaggatgaagtggaagaaaatagtgctgcagggcggcggcctggagtctcccaccaagcccaaggggcggcccaagaagaactcaattccaacgagcgagcagcttactgagcaggagcgcgccaaggatgcagagaaaccggcggaggtgccgggcgagcccagcgacaggagccgcgaggactgagggcggtatacggtgcggggcctgggatgcccgcgccacccgcagccccctcactcggcggaaacccgcgagccggcccttccgcgtccaagaagtttacttcctaagcctttttattatgatcttgaatgcggacaattggggccaaacgaggaaggacacagacccaaaagccagacccaggtcccagcgcgcttctgggctctaacctgggagactcgcatccagcccggcggaagctacagtctctaccctgagctccgtggcgcagagcgctccacgcgtattcacgccccgctcctcgcctgcacccccaccccgtctggggcctgccctcccggccggggagcctccaggcacacacccgcttctggacgtcggggacccagcggttgggctcaggccacaacggcctgagattgccccggggcaacccgtcggctcggcctggaggccgggtccccgatgtcgctggggcccctaccccctcttgcgaagacggtgactttttttccaataaaatattttatgacacaa

SEQ ID NO: 110754 - DNA, 1813 bp, Homo sapiens
  Payload ID: 1719
  Gene Symbol: BARX2
  Gene Name: BARX homeobox 2
  Uniprot ID: Q9UMQ3
  ENST ID: ENST00000281437
  CDS Start-End: 97-936
ggggcccaggccccgccgtcgcgccagccccgcggccccagcgggccgggcactcgcagccgcgctcgggccggcggacgctcgcgccggctcaccatgcactgccacgccgagctgaggctgagctcgcccggccagctcaaagcagccaggcggcgctacaagactttcatgatcgacgagatcctctccaaggagacctgcgattactttgagaaactttccctctactccgtgtgcccgtcgctggtcgtgcgacccaagcccctgcattcctgtacgggctccccttccctgcgggcatatccgctcctctcggtgatcacccgccagcccactgtcatctcccacctggtccctgccaccccgggaatcgcccaggcactgtcctgccaccaggtcaccgaggcggtctctgctgaggccccagggggcgaggccctagccagcagcgagtcagagacggaacagcccacgccccgacagaagaagccccgccggagtcgcaccatcttcaccgagctgcagctcatgggcctggagaagaaattccagaagcagaagtatttgtcaaccccagacaggttggacttggctcagtctctgggactcactcagctgcaggtgaagacctggtatcagaatcgcaggatgaaatggaagaaaatggttcttaaaggtggacaggaagcacccacaaaacccaaaggtcgccccaagaagaactccatccccacatcagaagagattgaagctgaagagaagatgaacagccaggcccagggtcaggagcagctggagccctctcaggggcaggaggagctctgtgaagcacaggaaccgaaagcacgtgatgtccccttagagatggcagagccaccagacccgccccaggagttgccaataccctcttcggaacccccaccattaagctaaagtaaaacccttttgagggaagagggagactggggagaagggaaaagagagaaggcagggagagtagggagagaaaaccttccagcagcccagtaaactgcgggcgaagagatctacccgtctccctccctcccacagttaccattggccttgtcatcgcaagcatttgacaaagacttgcttgtcttgggcctgtcacctcctgaaaggctgctttagctgtggatgcccttgattaagggagagagcgcctaggagctgcctgccccagctggggtgacggctgtagggctgggtctatgttgcaagccctatatcctagcatgcagtggaaagtgcttagctctctccctcctgacctctgggcagccagtcatcaaagcagagagacgtggcggcatgtgggcagcatgcccaggttccttgctgactcagcacttatttctgtagttttaaaaaagaatttaatgtttttggttgtatttttttgggggggtgagggtgggcaaaaacatgggggtagttctgagttgttagaaatgtttctgaatcaagtttgtttgaagacacgtgtgcctttgtacccattataagatggtcataagacccaagaactgataagctttggttttttttttgttttgttttgttttttgcttcatttacccattcatgcctagggttccattattggaaccctaagcttgtgggagttatttctatcctactgctcaaggtcatcaccaagatctgatttttcataaaaaacatttgtgaccttcggcataaatgggttaaggtgccatccctgaaactgcaatgcagatatgttcagataacttttattttttaattaaaaataaatctttcaaaagga

SEQ ID NO: 110755 - DNA, 3106 bp, Homo sapiens
  Payload ID: 1720
  Gene Symbol: BBOF1
  Gene Name: basal body orientation factor 1
  Uniprot ID: Q8ND07
  ENST ID: ENST00000394009
  CDS Start-End: 124-1713
gcgcgccgtcagcggcgcgggtggggcattgccagctcggcgtcccggttcccttggagacagagctggccagggcggccgcggctgggcaactacgacagcggagcccctggggaagccaagatgccgtcgaagggaaaggacaaaaagaaaggcaagagcaaaggcaaagacacgaagaagttaataaaaacagatgaatctgtggtggacagagccaaggccaatgcctccctttgggaggccaggttggaagtcacagaactctctaggattaagtatcgtgatacttcacggatactggcaaaaagtaatgaggacttaaagaaaaagcaatgtaaaatggagaaagacataatgtcagtattaagttacctgaagaagcaggatcaggagaaagataatatgattgaaaaactgaaacagcaattaaatgaaacaaaggaaaaagcccaagaggagaaggataaattggaacaaaagtataccaggcaaattaatgaactagagggacagttccatcaaaaagccaaagaaattggcatgattcacacagagctgaaagcagtaagacaattccagaagagaaaaatccaagtggagagagagttagatgatctgaaagagaatttaagaaacacagagcggatacatcaggagactcttagaagactggaaagcagattttttgaagaaaagcaccgactagaacaagaggctgaaaagaagataataatgctagcagagagagcccaccatgaggctattgtgcaattgaacgatgctggaagaaatgtttttaaagagaatgattatcttcagaaagctctggcatatcacctgaaggaaactgacgctctacaaaaaaactcccagaagttgcaagagagtcatactttacttttacatcaaaaggagatcaatgatctgttggttaaggaaaagattatgcaacttgtccagcagagatcacaaatccaaacccttcagaagaaggtagtaaacttggagactgctctgagttacatgaccaaagagtttgagagtgaagttttaaaactgcagcaacacgcaatgatagagaaccaagcaggtcaggtagaaattgacaagctgcagcaccttcttcagatgaaggacagggaaatgaatcgtgtgaagaagctggccaagaacatactggatgagagaacagaagtggaaagattctttttagatgctctgcaccaagtgaagcaacagatcctaattagcaggaagcattataagcagatagcacaagctgctttcaatttaaaaatgagagcagcatgtacaggaagaacagaatatcccaaaatcagaacatttgatggcagagagcacagcaccaatagtgtgaatcaggatcttctggaggccgaaaaatggacacatattgaaggaaatgtggatattggagatttgacctgggagcagaaggaaaaagtattgcgattgctctttgcaaaaatgaatggctgtccttctaggaaatacaaccagagttctaggcctccagttccagactatgttgtttctgacagtggggaaacaaaggaatttggggatgaaagtaagcttcaagataaaatcttcatcacccagcaaattgcaatatcagactcttctggtgaagtggtgctacccactattccaaaagaacctcaggagtctgacacaggaaccttctgagaagcactgattatgacctcacagatgctgctggcagtcccttccttgcagaatccttgctcctgaatatctttaagaaaatttcttaaaggaaaagacaaaaaatttaactcaaaagttacctgtttgccatagaaattggtgtctcccctgaaggaggatcgagagccggtgaatgagaacattggcaaaggcactggaatggggacattcactcccacctaaaacagaacaaatccgtgtcatatcctaaggacaaaggaactctccatttagaaacacaaaggcatcagagaccagttttaaatacccaccttctaccctatcctctaccccatgaactttcattcctgaggaagaaatggggcaatgtgggaggtcatgggggcaatcttaaaccaatgactcaccattatttactgtttcctcttaggaaatagtaaatggatataagaatctcttaaaaattctgttcacgaacctgtccaacatccaccaagtgggcatatttccgagcagtggctccattggtggtgaagatggcagttccatttccatatgggttgttatttacaatctggatggcttcatccaatgtttctgtctccagaaccacaagaactggaccaaaaatctcctctttgtaacaggtcatatttggctgccaggagtgatgcatccagaaaagaagtcagctttttggattctgagtattttatgcttatttggtactttcacttactacacatcatttacgtggacaactttcatattactaatctcttttcatttcaaatcacctatttaaaaaaaaagtcctctctcaagtgtattccgtcttccaagttaccaatcatataaacaacttggaattcctatcaacaataaccacacttcctttaagggactgtatctttagttcatgacccatcatcagctgcctttttaatacctgaacgactagtttcatccaattgttatcaaaaagttacatgaaaatttattttttataaatccaatctatagtaaatataccaggataatttttctctttacagaaaccccatgctgttttctgtaacataaataatccattcttattcactcctttgcctcccaaatatgtctgtatgtttatattttgatatcaggtcgcagacactcaaaacatccttcaccatgcaattaatgtttgttgctgataaacggatttttctgtatggttctgtggcaagagatttcataatttctactgcacttacattcaacacttgatgattcactattatagtaaggatatatgaatttcaaaaaatgcctcataacctcaatttttaagtcatgttagctgagagactttcaaagttttgataaataaaaattgacaagtcaa

SEQ ID NO: 110756 - DNA, 689 bp, Homo sapiens
  Payload ID: 1720
  Gene Symbol: BBOF1
  Gene Name: basal body orientation factor 1
  ENST ID: ENST00000464394
  CDS Start-End: 318-689
tccgcgcgccgtcagcggcgcgggtggggcattgccagctcggcgtcccggttcccttggagacagagctggccagggcggccgcggctgggcaactacgacagcggagcccctggggaagccaagatgccgtcgaagggaaaggacaaaaagaaaggcaagagcaaaggcaaagacacgaaattgaaaaactgaaacagcaattaaatgaaacaaaggaaaaagcccaagaggagaaggataaattggaacaaaagtataccaggcaaattaatgaactagagggacagttccatcaaaaagccaaagaaattggcatgattcacacagagctgaaagcagtaagacaattccagaagagaaaaatccaagtggagagagagttagatgatctgaaagagaatttaagaaacacagagcggatacatcaggagactcttagaagactggaaagcagattttttgaagaaaagcaccgactagaacaagaggctgaaaagaagataataatgctagcagagagagcccaccatgaggctattgtgcaattgaacgatgctggaagaaatgtttttaaagagaatgattatcttcagaaagctctggcatatcacctgaaggaaactgacgctctacaaaaaaactcccagaagttgcaagagagtcatactttacttttacatcaaaag

SEQ ID NO: 110757 - DNA, 550 bp, Homo sapiens
  Payload ID: 1720
  Gene Symbol: BBOF1
  Gene Name: basal body orientation factor 1
  ENST ID: ENST00000463558
  CDS Start-End: 223-420
ctacgacagcggagcccctggggaagccaagatgccgtcgaagggaaaggacaaaaagaaaggcaagagcaaaggcaaagacacgaaattgaaaaactgaaacagcaattaaatgaaacaaaggaaaaagcccaagaggagaaggataaattggaacaaaagtataccaggcaaattaatgaactagagggacagttccatcaaaaagccaaagaaattggcatgattcacacagagctgaaagcagtaagacaattccagaagagaaaaatccaagtggagagagagttagatgatctgaaagagaatttaagaaacacagagcggatacatcaggagactcttagaagactggaaagcagattttttgaagaaaaggtacagattattagggttaatttaaaatgttttgtttactagaacataagtgtatttatatgcattctgaaacatcagccttccatttggtatcttaatagaagattagaagattgttaccaaattatagcacaatacaatgagggaaaataaaaccttctagaaatctcaa

SEQ ID NO: 110758 - DNA, 2402 bp, Homo sapiens
  Payload ID: 1721
  Gene Symbol: BCAM
  Gene Name: basal cell adhesion molecule (Lutheran blood group)
  Uniprot ID: P50895
  ENST ID: ENST00000270233
  CDS Start-End: 23-1909
agtctccgccgccgccgtgaacatggagcccccggacgcaccggcccaggcgcgcggggccccgcggctgctgttgctcgcagtcctgctggcggcgcacccagatgcccaggcggaggtgcgcttgtctgtacccccgctggtggaggtgatgcgaggaaagtctgtcattctggactgcacccctacgggaacccacgaccattatatgctggaatggttccttaccgaccgctcgggagctcgcccccgcctagcctcggctgagatgcagggctctgagctccaggtcacaatgcacgacacccggggccgcagtcccccataccagctggactcccaggggcgcctggtgctggctgaggcccaggtgggcgacgagcgagactacgtgtgcgtggtgagggcaggggcggcaggcactgctgaggccactgcgcggctcaacgtgtttgcaaagccagaggccactgaggtctcccccaacaaagggacactgtctgtgatggaggactctgcccaggagatcgccacctgcaacagccggaacgggaacccggcccccaagatcacgtggtatcgcaacgggcagcgcctggaggtgcccgtagagatgaacccagagggctacatgaccagccgcacggtccgggaggcctcgggcctgctctccctcaccagcaccctctacctgcggctccgcaaggatgaccgagacgccagcttccactgcgccgcccactacagcctgcccgagggccgccacggccgcctggacagccccaccttccacctcaccctgcactatcccacggagcacgtgcagttctgggtgggcagcccgtccaccccagcaggctgggtacgcgagggtgacactgtccagctgctctgccggggggacggcagccccagcccggagtatacgcttttccgccttcaggatgagcaggaggaagtgctgaatgtgaatctcgaggggaacttgaccctggagggagtgacccggggccagagcgggacctatggctgcagagtggaggattacgacgcggcagatgacgtgcagctctccaagacgctggagctgcgcgtggcctatctggaccccctggagctcagcgaggggaaggtgctttccttacctctaaacagcagtgcagtcgtgaactgctccgtgcacggcctgcccacccctgccctacgctggaccaaggactccactcccctgggcgatggccccatgctgtcgctcagttctatcaccttcgattccaatggcacctacgtatgtgaggcctccctgcccacagtcccggtcctcagccgcacccagaacttcacgctgctggtccaaggctcgccagagctaaagacagcggaaatagagcccaaggcagatggcagctggagggaaggagacgaagtcacactcatctgctctgcccgcggccatccagaccccaaactcagctggagccaattggggggcagccccgcagagccaatccccggacggcagggttgggtgagcagctctctgaccctgaaagtgaccagcgccctgagccgcgatggcatctcctgtgaagcctccaacccccacgggaacaagcgccatgtcttccacttcggcaccgtgagcccccagacctcccaggctggagtggccgtcatggccgtggccgtcagcgtgggcctcctgctcctcgtcgttgctgtcttctactgcgtgagacgcaaagggggcccctgctgccgccagcggcgggagaagggggctccgccgccaggggagccagggctgagccactcggggtcggagcaaccagagcagaccggccttctcatgggaggtgcctccggaggagccaggggtggcagcgggggcttcggagacgagtgctgagccaagaacctcctagaggctgtccctggacctggagctgcaggcatcagagaaccagccctgctcacgccatgcccgcccccgccttccctcttccctcttccctctccctgcccagccctcccttccttcctctgccggcaaggcagggacccacagtggctgcctgcctccgggagggaaggagagggagggtgggtgggtgggagggggccttcctccagggaatgtgactctcccaggccccagaatagctcctggacccaagcccaaggcccagcctgggacaaggctccgagggtcggctggccggagctatttttacctcccgcctcccctgctggtccccccacctgacgtcttgctgcagagtctgacactggattcccccccctcaccccgcccctggtcccactcctgcccccgccctacctccgccccaccccatcatctgtggacactggagtctggaataaatgctgtttgtcacatc

SEQ ID NO: 110759 - DNA, 878 bp, Homo sapiens
  Payload ID: 1721
  Gene Symbol: BCAM
  Gene Name: basal cell adhesion molecule (Lutheran blood group)
  ENST ID: ENST00000591520
  CDS Start-End: 5-878
gaacatggagcccccggacgcaccggcccaggcgcgcggggccccgcggctgctgttgctcgcagtcctgctggcggcgcacccagatgcccaggcggaggtgcgcttgtctgtacccccgctggtggaggtgatgcgaggaaagtctgtcattctggactgcacccctacgggaacccacgaccattatatgctggaatggttccttgtcacaatgcacgacacccggggccgcagtcccccataccagctggactcccaggggcgcctggtgctggctgaggcccaggtgggcgacgagcgagactacgtgtgcgtggtgagggcaggggcggcaggcactgctgaggccactgcgcggctcaacgtgtttgcaaagccagaggccactgaggtctcccccaacaaagggacactgtctgtgatggaggactctgcccaggagatcgccacctgcaacagccggaacgggaacccggcccccaagatcacgtggtatcgcaacgggcagcgcctggaggtgcccgtagagatgaacccagagggctacatgaccagccgcacggtccgggaggcctcgggcctgctctccctcaccagcaccctctacctgcggctccgcaaggatgaccgagacgccagcttccactgcgccgcccactacagcctgcccgagggccgccacggccgcctggacagccccaccttccacctcaccctgcactatcccacggagcacgtgcagttctgggtgggcagcccgtccaccccagcaggctgggtacgcgagggtgacactgtccagctgctctgccggggggacggcagccccagcccggagtatacgcttttccgccttcaggtgacccacccaaggg

SEQ ID NO: 110760 - DNA, 518 bp, Homo sapiens
  Payload ID: 1721
  Gene Symbol: BCAM
  Gene Name: basal cell adhesion molecule (Lutheran blood group)
  ENST ID: ENST00000590196
  CDS Start-End: 1-185
agggctacatgaccagccgcacggtccgggaggcctcgggcctgctctccctcaccagcaccctctacctgcggctccgcaaggatgaccgagacgccagcttccactgcgccgcccactacagcctgcccgagggccgccacggccgcctggacagccccaccttccacctcaccctgcactgatgagcaggaggaagtgctgaatgtgaatctcgaggggaacttgaccctggagggagtgacccggggccagagcgggacctatggctgcagagtggaggattacgacgcggcagatgacgtgcagctctccaagacgctggagctgcgcgtggcctatctggaccccctggagctcagcgaggggaaggtgctttccttacctctaaacagcagtgcagtcgtgaactgctccgtgcacggcctgcccacccctgccctacgctggaccaaggactccactcccctgggcgatggccccatgctgtcgctcagttctatcaccttcgattccaa

SEQ ID NO: 110761 - DNA, 2686 bp, Homo sapiens
  Payload ID: 1721
  Gene Symbol: BCAM
  Gene Name: basal cell adhesion molecule (Lutheran blood group)
  ENST ID: ENST00000589651
  CDS Start-End: 55-1821
gccccgcagcggccgagctgcagcccgggctcagtctccgccgccgccgtgaacatggagcccccggacgcaccggcccaggcgcgcggggccccgcggctgctgttgctcgcagtcctgctggcggcgcacccagatgcccaggcggaggtgcgcttgtctgtacccccgctggtggaggtgatgcgaggaaagtctgtcattctggactgcacccctacgggaacccacgaccattatatgctggaatggttccttaccgaccgctcgggagctcgcccccgcctagcctcggctgagatgcagggctctgagctccaggtcacaatgcacgacacccggggccgcagtcccccataccagctggactcccaggggcgcctggtgctggctgaggcccaggtgggcgacgagcgagactacgtgtgcgtggtgagggcaggggcggcaggcactgctgaggccactgcgcggctcaacgtgtttgcaaagccagaggccactgaggtctcccccaacaaagggacactgtctgtgatggaggactctgcccaggagatcgccacctgcaacagccggaacgggaacccggcccccaagatcacgtggtatcgcaacgggcagcgcctggaggtgcccgtagagatgaacccagagggctacatgaccagccgcacggtccgggaggcctcgggcctgctctccctcaccagcaccctctacctgcggctccgcaaggatgaccgagacgccagcttccactgcgccgcccactacagcctgcccgagggccgccacggccgcctggacagccccaccttccacctcaccctgcactatcccacggagcacgtgcagttctgggtgggcagcccgtccaccccagcaggctgggtacgcgagggtgacactgtccagctgctctgccggggggacggcagccccagcccggagtatacgcttttccgccttcaggatgagcaggaggaagtgctgaatgtgaatctcgaggggaacttgaccctggagggagtgacccggggccagagcgggacctatggctgcagagtggaggattacgacgcggcagatgacgtgcagctctccaagacgctggagctgcgcgtggcctatctggaccccctggagctcagcgaggggaaggtgctttccttacctctaaacagcagtgcagtcgtgaactgctccgtgcacggcctgcccacccctgccctacgctggaccaaggactccactcccctgggcgatggccccatgctgtcgctcagttctatcaccttcgattccaatggcacctacgtatgtgaggcctccctgcccacagtcccggtcctcagccgcacccagaacttcacgctgctggtccaaggctcgccagagctaaagacagcggaaatagagcccaaggcagatggcagctggagggaaggagacgaagtcacactcatctgctctgcccgcggccatccagaccccaaactcagctggagccaattggggggcagccccgcagagccaatccccggacggcagggttgggtgagcagctctctgaccctgaaagtgaccagcgccctgagccgcgatggcatctcctgtgaagcctccaacccccacgggaacaagcgccatgtcttccacttcggcaccgtgagcccccagacctcccaggctggagtggccgtcatggccgtggccgtcagcgtgggcctcctgctcctcgtcgttgctgtcttctactgcgtgagacgcaaagggggcccctgctgccgccagcggcgggagaagggggctccgtgagtggcctgctatctgcaatgaccaccatagcttaaccccatccccaccctcaaccccaagctcaacccataacctcaaccacatcttatcctccaccccacatcccaccacatccacctccatccccaacccatcctcatccccaactacagccccaaacccagccccagactaatccacagccatccccaactcatcctcatccccaactgcagccccaaacccaacccagggccatccccaaacccatccccaagccaaactcaacaccatccccttccctaatcacctctcctgcccctagctcagcctcatccccaactccatgcctgtctccaatcccaaccctgcccccaatctcccctcaactccaatccataacccccttcaaaccatcctcaactaagctcctctccagccctggccacatccccatcctcccccaacctccagccccaacacccatcatccccctgagctcacccttaactccaatttatcctccaagcctatctctcaccatccagccctcacctagccatttcccaaccctagtcctccaccgtcccgaagccaacttcacccatgtccccatccccaatcttgtccccattcctgactccaaatccaacccctaagcctccccaagctcctcctcatctaaccttgtctccagccccaaccacatggccgtcctcacctccaatccgtaaccatcccagaccgatcccaaagccaactccagctacattcccacctccaaccccaatagcatctgcatccccatgcccaaccctaaccccagtgccattaccagcccctaccccatccctatgccatccccacccagcacacccccatcctc

SEQ ID NO: 110762 - DNA, 3430 bp, Homo sapiens
  Payload ID: 1721
  Gene Symbol: BCAM
  Gene Name: basal cell adhesion molecule (Lutheran blood group)
  ENST ID: ENST00000611077
  CDS Start-End: 67-1833
ctctggctcccagccccgcagcggccgagctgcagcccgggctcagtctccgccgccgccgtgaacatggagcccccggacgcaccggcccaggcgcgcggggccccgcggctgctgttgctcgcagtcctgctggcggcgcacccagatgcccaggcggaggtgcgcttgtctgtacccccgctggtggaggtgatgcgaggaaagtctgtcattctggactgcacccctacgggaacccacgaccattatatgctggaatggttccttaccgaccgctcgggagctcgcccccgcctagcctcggctgagatgcagggctctgagctccaggtcacaatgcacgacacccggggccgcagtcccccataccagctggactcccaggggcgcctggtgctggctgaggcccaggtgggcgacgagcgagactacgtgtgcgtggtgagggcaggggcggcaggcactgctgaggccactgcgcggctcaacgtgtttgcaaagccagaggccactgaggtctcccccaacaaagggacactgtctgtgatggaggactctgcccaggagatcgccacctgcaacagccggaacgggaacccggcccccaagatcacgtggtatcgcaacgggcagcgcctggaggtgcccgtagagatgaacccagagggctacatgaccagccgcacggtccgggaggcctcgggcctgctctccctcaccagcaccctctacctgcggctccgcaaggatgaccgagacgccagcttccactgcgccgcccactacagcctgcccgagggccgccacggccgcctggacagccccaccttccacctcaccctgcactatcccacggagcacgtgcagttctgggtgggcagcccgtccaccccagcaggctgggtacgcgagggtgacactgtccagctgctctgccggggggacggcagccccagcccggagtatacgcttttccgccttcaggatgagcaggaggaagtgctgaatgtgaatctcgaggggaacttgaccctggagggagtgacccggggccagagcgggacctatggctgcagagtggaggattacgacgcggcagatgacgtgcagctctccaagacgctggagctgcgcgtggcctatctggaccccctggagctcagcgaggggaaggtgctttccttacctctaaacagcagtgcagtcgtgaactgctccgtgcacggcctgcccacccctgccctacgctggaccaaggactccactcccctgggcgatggccccatgctgtcgctcagttctatcaccttcgattccaatggcacctacgtatgtgaggcctccctgcccacagtcccggtcctcagccgcacccagaacttcacgctgctggtccaaggctcgccagagctaaagacagcggaaatagagcccaaggcagatggcagctggagggaaggagacgaagtcacactcatctgctctgcccgcggccatccagaccccaaactcagctggagccaattggggggcagccccgcagagccaatccccggacggcagggttgggtgagcagctctctgaccctgaaagtgaccagcgccctgagccgcgatggcatctcctgtgaagcctccaacccccacgggaacaagcgccatgtcttccacttcggcaccgtgagcccccagacctcccaggctggagtggccgtcatggccgtggccgtcagcgtgggcctcctgctcctcgtcgttgctgtcttctactgcgtgagacgcaaagggggcccctgctgccgccagcggcgggagaagggggctccgtgagtggcctgctatctgcaatgaccaccatagcttaaccccatccccaccctcaaccccaagctcaacccataacctcaaccacatcttatcctccaccccacatcccaccacatccacctccatccccaacccatcctcatccccaactacagccccaaacccagccccagactaatccacagccatccccaactcatcctcatccccaactgcagccccaaacccaacccagggccatccccaaacccatccccaagccaaactcaacaccatccccttccctaatcacctctcctgcccctagctcagcctcatccccaactccatgcctgtctccaatcccaaccctgcccccaatctcccctcaactccaatccataacccccttcaaaccatcctcaactaagctcctctccagccctggccacatccccatcctcccccaacctccagccccaacacccatcatccccctgagctcacccttaactccaatttatcctccaagcctatctctcaccatccagccctcacctagccatttcccaaccctagtcctccaccgtcccgaagccaacttcacccatgtccccatccccaatcttgtccccattcctgactccaaatccaacccctaagcctccccaagctcctcctcatctaaccttgtctccagccccaaccacatggccgtcctcacctccaatccgtaaccatcccagaccgatcccaaagccaactccagctacattcccacctccaaccccaatagcatctgcatccccatgcccaaccctaaccccagtgccattaccagcccctaccccatccctatgccatccccacccagcacacccccatcctcacctccatccccagccgcatcctagtcccacccacccccatcctcagttcctccccctgccgtgtgcacctccaacacgacgcctccgcccgctgcctcctccccccaggccgccaggggagccagggctgagccactcggggtcggagcaaccagagcagaccggccttctcatgggaggtgcctccggaggagccaggggtggcagcgggggcttcggagacgagtgctgagccaagaacctcctagaggctgtccctggacctggagctgcaggcatcagagaaccagccctgctcacgccatgcccgcccccgccttccctcttccctcttccctctccctgcccagccctcccttccttcctctgccggcaaggcagggacccacagtggctgcctgcctccgggagggaaggagagggagggtgggtgggtgggagggggccttcctccagggaatgtgactctcccaggccccagaatagctcctggacccaagcccaaggcccagcctgggacaaggctccgagggtcggctggccggagctatttttacctcccgcctcccctgctggtccccccacctgacgtcttgctgcagagtctgacactggattcccccccctcaccccgcccctggtcccactcctgcccccgccctacctccgccccaccccatcatctgtggacactggagtctggaataaatgctgtttgtcacatcaacacc

SEQ ID NO: 110763 - DNA, 1206 bp, Homo sapiens
  Payload ID: 1722
  Gene Symbol: BPY2
  Gene Name: basic charge, Y-linked, 2
  Uniprot ID: O14599
  ENST ID: ENST00000331070
  CDS Start-End: 333-653
aatatctcaggacccaggaccatgtgatatgggcccaacacctggatgatgttactcttctgcctaggtcatgcgtaaagagggaattagggcatattgcttggcccagtcccgtaatgatatgactctcctgcttgtgccagagccacagaagtgtgcttggtgacataatctttgaggctgtcacatcaccaagattatattgtatcactggaccagcataaagctgacacttctgactatgcccagccttcaaataatactacactgtataattggctcaacacccaggtgatattgttccatttacctgagaccagataaaaagcctaatgatgacgcttgtccccagagccaggacacgtgcaggacaggatcattactctcatccctgccccagattttcacaggtgctgcttacagagggcatcatgacatattgcttgacaaagaacctaagtgatgttaatattctgcataggttgctaaaaaatgggaatgtgagaaataccttgcttcagtccaaagtgggcttgctgacatattatgtgaaactgtacccgggtgaagtgactcttctgactaggcccagcatacaaatgagattatgctgtatcactggctcagtgtcgaggcccagatcacagaagtaattgtgccatatgtggaacaagcagctaagcaatagataacatccatcgtggctctgccttcaaagggaaattttacatatgtcactgggaccatcacccagatgatgtcctgcccactaaaagaattgtgacataacgctgactgcaaaaactgggtaatgcaactctcctctttattctggagtctgccaaaacaagggattatcacatattgcggagtccagcacccaggtaaaattttgtcatatacccagcttcagataccatgcaataatacaactatcatacctggacccaaagaggagagatattttgattctcattgccattcttatggccacaagcaaagtaatggttctcatagtggtataaagttcacacagtattatgacactcccagcgtatcatagaaaatgtgagtagtacaatgagtgttataacagggaacagcaaaccaatgctattgtgattattggattcacacccagctgacgcgactatcattctctcacaagaacagaacctgcaaataaagtactaaatctcaccaaaa

SEQ ID NO: 110764 - DNA, 321 bp, Homo sapiens
  Payload ID: 1722
  Gene Symbol: BPY2
  Gene Name: basic charge, Y-linked, 2
  Uniprot ID: O14599
  ENST ID: ENST00000382585
  CDS Start-End: 1-321
atgatgacgcttgtccccagagccaggacacgtgcaggacaggatcattactctcatccctgccccagattttcacaggtgctgcttacagagggcatcatgacatattgcttgacaaagaacctaagtgatgttaatattctgcataggttgctaaaaaatgggaatgtgagaaataccttgcttcagtccaaagtgggcttgctgacatattatgtgaaactgtacccgggtgaagtgactcttctgactaggcccagcatacaaatgagattatgctgtatcactggctcagtgtcgaggcccagatcacagaagtaa

SEQ ID NO: 110765 - DNA, 559 bp, Homo sapiens
  Payload ID: 1722
  Gene Symbol: BPY2
  Gene Name: basic charge, Y-linked, 2
  ENST ID: ENST00000602732
  CDS Start-End: 527-559
atggaacattgtgacatatatgtgggacctgcacccaggtgatgtaactctcttgactgggaccttttctaaggagggcttgcaaatgtctcaggacccaggaccgtgtgatgtggcacttcagcctggattctgcccacctattaaattgtctaggtgatgtgacttcctgcttgaccctgcccacatggagcattgtgacatatgtgtggaacctgcacttagggcccaacacctggatgatgttactcttctgcctaggtcatgcgtaaagagggaattagggcatattgcttggcccagtcccgtaatgatatgactctcctgcttgtgccagagccacagaagtgtgcttggtgacataatctttgaggctgtcacatcaccaagattatattgtatcactggaccagcataaagctgacacttctgactatgcccagccttcaaataatactacactgtataattggctcaacacccaggtgatattgttccatttacctgagaccagataaaaagcctaatgatgacgcttgtccccagagccaggacacgt

SEQ ID NO: 110766 - DNA, 1206 bp, Homo sapiens; identical to SEQ ID NO: 110763
  Payload ID: 1723
  Gene Symbol: BPY2B
  Gene Name: basic charge, Y-linked, 2B
  Uniprot ID: O14599
  ENST ID: ENST00000382392
  CDS Start-End: 333-653

SEQ ID NO: 110767 - DNA, 559 bp, Homo sapiens; identical to SEQ ID NO: 110765
  Payload ID: 1723
  Gene Symbol: BPY2B
  Gene Name: basic charge, Y-linked, 2B
  ENST ID: ENST00000602770
  CDS Start-End: 527-559

SEQ ID NO: 110768 - DNA, 321 bp, Homo sapiens; identical to SEQ ID NO: 110764
  Payload ID: 1723
  Gene Symbol: BPY2B
  Gene Name: basic charge, Y-linked, 2B
  Uniprot ID: O14599
  ENST ID: ENST00000615850
  CDS Start-End: 1-321

SEQ ID NO: 110769 - DNA, 1206 bp, Homo sapiens; identical to SEQ ID NO: 110763
  Payload ID: 1724
  Gene Symbol: BPY2C
  Gene Name: basic charge, Y-linked, 2C
  Uniprot ID: O14599
  ENST ID: ENST00000382287
  CDS Start-End: 333-653

SEQ ID NO: 110770 - DNA, 559 bp, Homo sapiens; identical to SEQ ID NO: 110765
  Payload ID: 1724
  Gene Symbol: BPY2C
  Gene Name: basic charge, Y-linked, 2C
  ENST ID: ENST00000602680
  CDS Start-End: 527-559

SEQ ID NO: 110771 - DNA, 321 bp, Homo sapiens; identical to SEQ ID NO: 110764
  Payload ID: 1724
  Gene Symbol: BPY2C
  Gene Name: basic charge, Y-linked, 2C
  Uniprot ID: O14599
  ENST ID: ENST00000618574
  CDS Start-End: 1-321

SEQ ID NO: 110772 - DNA, 2749 bp, Homo sapiens
  Payload ID: 1725
  Gene Symbol: BHMG1
  Gene Name: basic helix-loop-helix and HMG box domain containing 1
  Uniprot ID: C9JSJ3
  ENST ID: ENST00000457052
  CDS Start-End: 417-2333
agcggctcacgccgaccaaggccttgtcagaaggctcgaggccgagctcacgctgtgcaagacgacagggcccttcccgaggcgcgcgtgcgcacggccacttgcaccctgccctttcaaccccgtcgtctcgtgcccagcacatcttggctggaactggtaggggcgtggcctggcctcaggaacgcactcttgctctgctcctcacgcctcgcgcaggatcctcgcgccgggaggattcgcacccaaccccaagcccggttgggaacgtggtgtccgagaccgtctgggatccccgcgcgcacggccggcttcccgggacccgcgcgagacgctgtctgatcgggctccctagagtggggcccggagaaaccagaacggcgggggcagcctcacgccattttgcacgccctgagatgtttggttccagcagatacttgggttcctctgaacagcccagagctaattcactgggtcccagtgacaggaccttggttttgtgctccctagtggaaggggaagataaggtcaacccctccgaaccacatggactgagaatggaggagaaatggttgctcaaaggaaaactgaggaatcagaggaaccaaaacaagctcctgtccccaaacaagaagcagaggaaaaaccacactagcaagctgcaagagttggcactgctgctgcccatagccctgaagacggggaccaagaagctcacaaagaaggagattctggtgcatgtcctgcagtacattcagtacctccagagaaacatcgatgccgccaaggccttgttcaaatgccacatcaccactggggaaggtggacttgcggggctgggtcagaaaccagcctggggcccagccaggcggaggagacactctaccccctccagctccccaagctctcagaagtcctgtctccagggggcgtgccagaagcctcggaagaagaagctgacccaggcatcagaaagccagactcggaccccgaagcctcgccgctctctggccctgaacaagcctgagaagctggtggccccatccccagaccagaaaggaagtggcacaggggggaccactacccctccaaggtgccctgactcctgcggtcacccgaggcctgcatcatcctcacctccaggtgacagaaaaggaggacagtcccagctgacgctgttggatctggccgaggacaccatccactgtgacatctcaagctgctggtgccagggcagtgtccaggatgacgcacctttccctgcgctcctggctcaggaagatgtggcgaggatccattttctcaacaagacccagccccatcccaggcagaagctggtgttctatgattccagcgaggatgtggacaaagggtccctagacgctgacccttggctccctgcctggaccccagagaacagcccccaagggagcccactgttcctggggcctccccagattgatgtctggagtggaacaggccacccaagtgagatcctcgggctcagccctagccttttcagctccccagggaaactgctgccagacgagatcttggaggatgacatggagtacctgacccaagcggctttctttgaagaagtgtgcttagatctggagtcttcaccttcagcctacacgcaggaggctccacaggaaaaggacacagcctccaaggcccccaaagaccctcctgagtcccacagcctgcaccggtcctcagtctcgctggaccactgctacctctcgctgagcgggaacagcaaggcgccatccagctccagctccagctccagctccagctccagctcggaggacagcgactcggagcccctgtggaagcagcgagaggatatgcaggccaaccctgtgggcacgccgggctccagcgaagaggacgaagacaccacatggacccccacccggctggcctcacccctgctggcagctgagaaaaaggccacgaagggccaagtagccagggcccctgtgaagcccaaggagaagaagaaaggcccctgcccaccccagatgaagaagaagtgtgtcaacggcttcatcatgttctgcaggatgaaccggaagcagtacatccgatcctgccctggaaccgcttccacagctgccaccaaggagctggcccagctgtggcgggtgatgacccagcaggagcggaggccatactgcaccaaggctcgcaggttcagccgccagcacaaccgcatcgtgaagcaggacggctccagcagcgaggctgaggactgggagacgccaaagcccttctaccagctgctggccgagaaggccttgccgctgcccccgcacctccagtgagagggcggcccctcgcctcgctcccctcacccctcatggcaaccgcggctcttgctggaagccaggacccatcgatgaacttgtccctcctgggcctccagcccctgagaatgcaggtcccatgggactggggaggggggcactgattagccccaaccgctgggcacatttgcctggagcaccagagtcacccacagctgccttgattctcccccaggcttaggaaggaaacccaaaatgaaatgcggggtgtcggaaggtgaagtttacccacccctctccccttcccttccccaccccagagccactcggttgcaaccctgttcatgctcacctcaccctactcctccctctcctgttctatttttagactatttattgttttaaataaaataaagcaagtggaacctttgtta

SEQ ID NO: 110773 - DNA, 3974 bp, Homo sapiens
  Payload ID: 1726
  Gene Symbol: BHLHB9
  Gene Name: basic helix-loop-helix domain containing, class B, 9
  Uniprot ID: Q6PI77
  ENST ID: ENST00000361229
  CDS Start-End: 529-2172
gagaggagtgttttcttgcatccagaaaagacctgagaggcggacgacacctgtgctccgcagagcagaacgtgggaggaacggcgggatgttaaggagctcaagaagcagagagtctacctgcccgacgcgttcgtggagaggagcagcggttgctgttggaggaggtgggtgcaaggacggcagatggcatccctgagaggtggtgactgagactagatgcgggtgcaggtccatctccactggtggctgtggtggctttggattgttggaagaccatcaccttcagcaggtctgcacttgggaacaatcattctcccccagcccgagcgtgcctctgccctctgtatcattgacagaggctgtatgtttggaaagagaactttgtgactgcagaactgacagttgactctaattcttgctaccaagtttttccccgacccagtgaaagagtgttaagacttcgacctaggacacattgagaaccaaggccaagactggacagggccatataactgggcttcaaccatggctgggactaagaataagacaagagcccaggccaaaactgaaaaaaaggctgctatacaagctaaagctggagcagagagggaggctactggtgttgttaggcctgtagccaagaccagggccaaagcaaaagccaagacagggtctaagacagatgcagtagcagagatgaaggcagtgtctaagaacaaggttgttgctgagacgaaggaaggagctctgtcagagcctaagactctgggcaaagccatgggagatttcactcccaaggctgggaatgagtccaccagctccacatgtaaaaatgaggctggtactgatgcctggttctgggctggggaagaggccactatcaattcctggttctggaatggagaagaggctggtaatagtttcagcactaagaatgataaacctgaaattggtgcccaggtctgtgctgaggagttggaacctgcggctggggccgattgcaaacctaggtcaggggctgaggaggaggaggaagagaatgttattgggaactggttttgggaaggagatgatactagttttgaccctaatcctaaacctgtgagcaggatagttaagcctcagcctgtgtatgaaattaatgaaaaaaataggcccaaggactggtctgaggtaactatctggcccaatgcccctgctgtaactccagctgtgttaggatttagatcccaggcaccatctgaggcaagccctccttcatatattgttctggcctccgctgaagaaaatgcctgttctttgcctgtggcaacagcttgccgcccttctaggaacactcgctcatgctcacagcctatccctgagtgtcgttttgattctgacccctgcatccagaccatagatgagattagacgtcaaatcaggatcagggaggtaaatgggattaagccatttgcttgtccttgcaaaatggaatgctatatggattctgaggaatttgaaaaacttgttagcttacttaagtcaactactgatcctcttattcataaaatagcacggattgcaatgggtgtccataatgttcacccatttgcccaagagtttattaacgaagtaggtgtagtgacacttattgaaagcttgctcagttttccttcccctgaaatgagaaaaaagactgtaattactctgaatcctccttctggggatgaaagacaacgcaaaattgaattacatgttaagcatatgtgtaaagaaaccatgtcatttcctttgaactcaccgggacagcaatctggattaaagatactaggacaactgactactgattttgtccatcactacattgttgccaattacttttcagagcttttccatttgctgtcctcaggaaattgcaaaaccagaaatcttgttttgaaactacttttaaatatgtctgaaaatccaactgcagccagagacatgatcaatatgaaggcattggcagcattaaaactcatctttaaccagaaagaggcaaaagccaatcttgttagtggtgtggccatatttattaacataaaggagcatatcagaaaaggctcaattgtagttgttgatcacttgagttataatacactcatggccattttcagggaagttaaagagattattgaaacaatgtaaaatgagccagagatagaacattttaagccatcttcaaactctagcaggctgtacattacagtgtacacattatacactgcatctttaacacagagtcacctgtgacaggctctaggtttgagctagactattttgggggtatcaaatgaatattataccttgggctgaaaatgtttgatttttatcttgtctagattggcatatttttaacattttacttaagatagcaaaccagttcgttttaagtaagctaacttgttcattagtatctgtggcttaaaatggcaaaaaagaaaatatccttgagtttgtaatctagttacagaagtaaggcatacacacacacaaagataacagtacctagagagagagtgtgtgtgagtgtgcgtgtctctgtgtgtgcacgtgcacgctcatggccaaatgtgcgcactctacataaaggaggcaggagttcctataggctatttaatgtaagagaaactatttttctcctgttccagctgtatcagatactcgttccgcaacacagaaatgactcagaatctcagacaaaatgtattatttgttcaattttaattttgctactacattcataactcttaaattgttaggctgtttcatttacatcaaagttatctcacaaaagagaaggcaggaaacgttttgtgagtgcctattctatgtcaaacactgtgttggcaccatattttacaagtttttttcctcttctcacagtgatcttgtgagttagttacttatatttttattagaactcattattctgggtaccctccaatgagaattagagaggttaaataccttttcctagattcccacagcaggaaggtggcatagctgttttgtctgacaccagaacccatctcaccacactgctttacagtcttcctgaaggacattttgaggtgggggggccttcaaagctcagagactggtttgaatggtttaattttgcaatggatcatgtccatgccaggtgttacaattcttaacttcctccaaattcgtgtgtccattagacatttggctacatctggctggaggtcaggagaaaattctgaggtaaatagatggattttatctggcagtgtcgaaaatagtaggagcctaaaactttgttcaatgagtaagatgtagatttggagtcatcagcaggggaaacttgttagatgtcctttgtatctttttctatccatttgtattttttctttcccaaagagctgaaatcattttataccctgaatttaaaaggtaattgcttttttcctccttgcgaaatcataccttaattttttttttttttttttttaccatttatgatttattctcctatgtgtcatatgaaaggccaaggggctttatcttttactagtaggcaagcctgggcatttctgcatttgtgccagctaacactacaaaatagacttaattagagaaatttagacccagaattgcagcttcaacaacacaaaacaggaaagctagaagaggttgctgtgtcaacctacaagatagtgattcttggaagttggtatggaccagaaagcattcccaggacatttaggctatggctgagttctctaagactcagggtgggaattataatccctggtctaagctgatatgaaagtttctatgtgtgaaaatatggagttatatgctttgagattttctgccagttaaactaaaacaagatcatactgtaaatgtttgtaacttgcttccccccactgtatactgtaaacatctttgcatgtcaataaatatgcctctacaacata

SEQ ID NO: 110774 - DNA, 5130 bp, Homo sapiens
  Payload ID: 1726
  Gene Symbol: BHLHB9
  Gene Name: basic helix-loop-helix domain containing, class B, 9
  Uniprot ID: Q6PI77
  ENST ID: ENST00000372735
  CDS Start-End: 586-2229
gagaatcgaagtgaggagccgccagaggagagctgaggagaggagggggaggtcgacgacctgggccctgggcctctgaaggaaaggagctgtaacttctattgggaaaatgactgacttcaaagttggcaggaggtgtaatcaggctgcaggtcttggggtgattagggaatcattgaggaagagcagacaggtctgtttctttctaggttcctgtagagatctgtatgtagctgttcacttggaagttaattaagaaagaacaaaaactattcatttggattcaaggtccatctccactggtggctgtggtggctttggattgttggaagaccatcaccttcagcaggtctgcacttgggaacaatcattctcccccagcccgagcgtgcctctgccctctgtatcattgacagaggctgtatgtttggaaagagaactttgtgactgcagaactgacagttgactctaattcttgctaccaagtttttccccgacccagtgaaagagtgttaagacttcgacctaggacacattgagaaccaaggccaagactggacagggccatataactgggcttcaaccatggctgggactaagaataagacaagagcccaggccaaaactgaaaaaaaggctgctatacaagctaaagctggagcagagagggaggctactggtgttgttaggcctgtagccaagaccagggccaaagcaaaagccaagacagggtctaagacagatgcagtagcagagatgaaggcagtgtctaagaacaaggttgttgctgagacgaaggaaggagctctgtcagagcctaagactctgggcaaagccatgggagatttcactcccaaggctgggaatgagtccaccagctccacatgtaaaaatgaggctggtactgatgcctggttctgggctggggaagaggccactatcaattcctggttctggaatggagaagaggctggtaatagtttcagcactaagaatgataaacctgaaattggtgcccaggtctgtgctgaggagttggaacctgcggctggggccgattgcaaacctaggtcaggggctgaggaggaggaggaagagaatgttattgggaactggttttgggaaggagatgatactagttttgaccctaatcctaaacctgtgagcaggatagttaagcctcagcctgtgtatgaaattaatgaaaaaaataggcccaaggactggtctgaggtaactatctggcccaatgcccctgctgtaactccagctgtgttaggatttagatcccaggcaccatctgaggcaagccctccttcatatattgttctggcctccgctgaagaaaatgcctgttctttgcctgtggcaacagcttgccgcccttctaggaacactcgctcatgctcacagcctatccctgagtgtcgttttgattctgacccctgcatccagaccatagatgagattagacgtcaaatcaggatcagggaggtaaatgggattaagccatttgcttgtccttgcaaaatggaatgctatatggattctgaggaatttgaaaaacttgttagcttacttaagtcaactactgatcctcttattcataaaatagcacggattgcaatgggtgtccataatgttcacccatttgcccaagagtttattaacgaagtaggtgtagtgacacttattgaaagcttgctcagttttccttcccctgaaatgagaaaaaagactgtaattactctgaatcctccttctggggatgaaagacaacgcaaaattgaattacatgttaagcatatgtgtaaagaaaccatgtcatttcctttgaactcaccgggacagcaatctggattaaagatactaggacaactgactactgattttgtccatcactacattgttgccaattacttttcagagcttttccatttgctgtcctcaggaaattgcaaaaccagaaatcttgttttgaaactacttttaaatatgtctgaaaatccaactgcagccagagacatgatcaatatgaaggcattggcagcattaaaactcatctttaaccagaaagaggcaaaagccaatcttgttagtggtgtggccatatttattaacataaaggagcatatcagaaaaggctcaattgtagttgttgatcacttgagttataatacactcatggccattttcagggaagttaaagagattattgaaacaatgtaaaatgagccagagatagaacattttaagccatcttcaaactctagcaggctgtacattacagtgtacacattatacactgcatctttaacacagagtcacctgtgacaggctctaggtttgagctagactattttgggggtatcaaatgaatattataccttgggctgaaaatgtttgatttttatcttgtctagattggcatatttttaacattttacttaagatagcaaaccagttcgttttaagtaagctaacttgttcattagtatctgtggcttaaaatggcaaaaaagaaaatatccttgagtttgtaatctagttacagaagtaaggcatacacacacacaaagataacagtacctagagagagagtgtgtgtgagtgtgcgtgtctctgtgtgtgcacgtgcacgctcatggccaaatgtgcgcactctacataaaggaggcaggagttcctataggctatttaatgtaagagaaactatttttctcctgttccagctgtatcagatactcgttccgcaacacagaaatgactcagaatctcagacaaaatgtattatttgttcaattttaattttgctactacattcataactcttaaattgttaggctgtttcatttacatcaaagttatctcacaaaagagaaggcaggaaacgttttgtgagtgcctattctatgtcaaacactgtgttggcaccatattttacaagtttttttcctcttctcacagtgatcttgtgagttagttacttatatttttattagaactcattattctgggtaccctccaatgagaattagagaggttaaataccttttcctagattcccacagcaggaaggtggcatagctgttttgtctgacaccagaacccatctcaccacactgctttacagtcttcctgaaggacattttgaggtgggggggccttcaaagctcagagactggtttgaatggtttaattttgcaatggatcatgtccatgccaggtgttacaattcttaacttcctccaaattcgtgtgtccattagacatttggctacatctggctggaggtcaggagaaaattctgaggtaaatagatggattttatctggcagtgtcgaaaatagtaggagcctaaaactttgttcaatgagtaagatgtagatttggagtcatcagcaggggaaacttgttagatgtcctttgtatctttttctatccatttgtattttttctttcccaaagagctgaaatcattttataccctgaatttaaaaggtaattgcttttttcctccttgcgaaatcataccttaattttttttttttttttttttaccatttatgatttattctcctatgtgtcatatgaaaggccaaggggctttatcttttactagtaggcaagcctgggcatttctgcatttgtgccagctaacactacaaaatagacttaattagagaaatttagacccagaattgcagcttcaacaacacaaaacaggaaagctagaagaggttgctgtgtcaacctacaagatagtgattcttggaagttggtatggaccagaaagcattcccaggacatttaggctatggctgagttctctaagactcagggtgggaattataatccctggtctaagctgatatgaaagtttctatgtgtgaaaatatggagttatatgctttgagattttctgccagttaaactaaaacaagatcatactgtaaatgtttgtaacttgcttccccccactgtatactgtaaacatctttgcatgtcaataaatatgcctctacaacatatttttgaatcacttaatatttttcccatgttaacagttggtatatagtgttgtaaacctttattgcatattctcataacatacaatatacacattcttttgcaaaaatgggaacacagtattgagacttgccttttcctcttaacacttatcttttcaatttagtattatatagatctgtcacatgctttttatctaataactttatagaaatataattgccatacattaagctgcatgttgaaagtatacagtgtgatcagttttggaatgtatatacacacaaaaccataaccacaatcaaaattgtaaatacattcatcacccaccaaagctactttttttttgagacagagtcttgctctgtcacccaggctggagtacagtggcgcaatctcggcccactgcaacctctgcttcccaggttcaagtgattctcgtgccttagcctcctgagcagctgggactacaggtgcatgccaccacatccgactaatttttttttttattttttgtatttttagtagagacagggtttcaccatgttggccaggctggtcttgaactcctggtctcaagtgatctacccatcttggtctccctgagtgccaggattacaggcgtgagccaccatgcccagcctcccccaaagcttcttaatgcccttttgtaatccctccctcccctctctccctgtgcccctaacccaggcaaccatgggacattttctgacaaaatagaattgttttcatttcctgtaattgtgtataaatggactcatatagcatgtactctttggtcgggaggggatctggcttatttcacttagtgtaattatttgagattcatccatatcatgtgtctcactatttcattgctttttattgccaagtagtattccaccatatggctttaccacagtttatttatccattcacttattgatggacatttgggctgttcagagtttggccattataagtaaagcagctatgagcatttgtgtacaagtgtttttatggacataggctttcatatctttggaatgacatctaacaatattgaatcttcgacccatgaataaaatctctctccactta

SEQ ID NO: 110775 - DNA, 3936 bp, Homo sapiens
  Payload ID: 1726
  Gene Symbol: BHLHB9
  Gene Name: basic helix-loop-helix domain containing, class B, 9
  Uniprot ID: Q6PI77
  ENST ID: ENST00000448867
  CDS Start-End: 494-2137
acaccctcgcggagagagcggttcttgcagcatcctgcgcagcccctgcccagtttggtgcagaggcgtggggggcgggacgcgtctttgccattctgatagcggggaaagcggtgagaatcgaagtgaggagccgccagaggagagctgaggagaggagggggaggtcgacgacctgggccctgggcctctgaaggtccatctccactggtggctgtggtggctttggattgttggaagaccatcaccttcagcaggtctgcacttgggaacaatcattctcccccagcccgagcgtgcctctgccctctgtatcattgacagaggctgtatgtttggaaagagaactttgtgactgcagaactgacagttgactctaattcttgctaccaagtttttccccgacccagtgaaagagtgttaagacttcgacctaggacacattgagaaccaaggccaagactggacagggccatataactgggcttcaaccatggctgggactaagaataagacaagagcccaggccaaaactgaaaaaaaggctgctatacaagctaaagctggagcagagagggaggctactggtgttgttaggcctgtagccaagaccagggccaaagcaaaagccaagacagggtctaagacagatgcagtagcagagatgaaggcagtgtctaagaacaaggttgttgctgagacgaaggaaggagctctgtcagagcctaagactctgggcaaagccatgggagatttcactcccaaggctgggaatgagtccaccagctccacatgtaaaaatgaggctggtactgatgcctggttctgggctggggaagaggccactatcaattcctggttctggaatggagaagaggctggtaatagtttcagcactaagaatgataaacctgaaattggtgcccaggtctgtgctgaggagttggaacctgcggctggggccgattgcaaacctaggtcaggggctgaggaggaggaggaagagaatgttattgggaactggttttgggaaggagatgatactagttttgaccctaatcctaaacctgtgagcaggatagttaagcctcagcctgtgtatgaaattaatgaaaaaaataggcccaaggactggtctgaggtaactatctggcccaatgcccctgctgtaactccagctgtgttaggatttagatcccaggcaccatctgaggcaagccctccttcatatattgttctggcctccgctgaagaaaatgcctgttctttgcctgtggcaacagcttgccgcccttctaggaacactcgctcatgctcacagcctatccctgagtgtcgttttgattctgacccctgcatccagaccatagatgagattagacgtcaaatcaggatcagggaggtaaatgggattaagccatttgcttgtccttgcaaaatggaatgctatatggattctgaggaatttgaaaaacttgttagcttacttaagtcaactactgatcctcttattcataaaatagcacggattgcaatgggtgtccataatgttcacccatttgcccaagagtttattaacgaagtaggtgtagtgacacttattgaaagcttgctcagttttccttcccctgaaatgagaaaaaagactgtaattactctgaatcctccttctggggatgaaagacaacgcaaaattgaattacatgttaagcatatgtgtaaagaaaccatgtcatttcctttgaactcaccgggacagcaatctggattaaagatactaggacaactgactactgattttgtccatcactacattgttgccaattacttttcagagcttttccatttgctgtcctcaggaaattgcaaaaccagaaatcttgttttgaaactacttttaaatatgtctgaaaatccaactgcagccagagacatgatcaatatgaaggcattggcagcattaaaactcatctttaaccagaaagaggcaaaagccaatcttgttagtggtgtggccatatttattaacataaaggagcatatcagaaaaggctcaattgtagttgttgatcacttgagttataatacactcatggccattttcagggaagttaaagagattattgaaacaatgtaaaatgagccagagatagaacattttaagccatcttcaaactctagcaggctgtacattacagtgtacacattatacactgcatctttaacacagagtcacctgtgacaggctctaggtttgagctagactattttgggggtatcaaatgaatattataccttgggctgaaaatgtttgatttttatcttgtctagattggcatatttttaacattttacttaagatagcaaaccagttcgttttaagtaagctaacttgttcattagtatctgtggcttaaaatggcaaaaaagaaaatatccttgagtttgtaatctagttacagaagtaaggcatacacacacacaaagataacagtacctagagagagagtgtgtgtgagtgtgcgtgtctctgtgtgtgcacgtgcacgctcatggccaaatgtgcgcactctacataaaggaggcaggagttcctataggctatttaatgtaagagaaactatttttctcctgttccagctgtatcagatactcgttccgcaacacagaaatgactcagaatctcagacaaaatgtattatttgttcaattttaattttgctactacattcataactcttaaattgttaggctgtttcatttacatcaaagttatctcacaaaagagaaggcaggaaacgttttgtgagtgcctattctatgtcaaacactgtgttggcaccatattttacaagtttttttcctcttctcacagtgatcttgtgagttagttacttatatttttattagaactcattattctgggtaccctccaatgagaattagagaggttaaataccttttcctagattcccacagcaggaaggtggcatagctgttttgtctgacaccagaacccatctcaccacactgctttacagtcttcctgaaggacattttgaggtgggggggccttcaaagctcagagactggtttgaatggtttaattttgcaatggatcatgtccatgccaggtgttacaattcttaacttcctccaaattcgtgtgtccattagacatttggctacatctggctggaggtcaggagaaaattctgaggtaaatagatggattttatctggcagtgtcgaaaatagtaggagcctaaaactttgttcaatgagtaagatgtagatttggagtcatcagcaggggaaacttgttagatgtcctttgtatctttttctatccatttgtattttttctttcccaaagagctgaaatcattttataccctgaatttaaaaggtaattgcttttttcctccttgcgaaatcataccttaattttttttttttttttttttaccatttatgatttattctcctatgtgtcatatgaaaggccaaggggctttatcttttactagtaggcaagcctgggcatttctgcatttgtgccagctaacactacaaaatagacttaattagagaaatttagacccagaattgcagcttcaacaacacaaaacaggaaagctagaagaggttgctgtgtcaacctacaagatagtgattcttggaagttggtatggaccagaaagcattcccaggacatttaggctatggctgagttctctaagactcagggtgggaattataatccctggtctaagctgatatgaaagtttctatgtgtgaaaatatggagttatatgctttgagattttctgccagttaaactaaaacaagatcatactgtaaatgtttgtaacttgcttccccccactgtatactgtaaacatctttgcatgtcaataaatatgcctctacaac

SEQ ID NO: 110776 - DNA, 4082 bp, Homo sapiens
  Payload ID: 1726
  Gene Symbol: BHLHB9
  Gene Name: basic helix-loop-helix domain containing, class B, 9
  Uniprot ID: Q6PI77
  ENST ID: ENST00000457056
  CDS Start-End: 640-2283
attaggcctgccgagaggagtgttttcttgcatccagaaaagacctgagaggcggacgacacctgtgctccgcagagcagaacgtgggaggaacggcgggatgttaaggtaggagctcaagaagcagagagtctacctgcccgacgcgttcgtggagaggagcagcggttgctgttggaggaggtgggtgcaaggacggcagatggcatccctgagaggtggtgactgagactagatgcgggtgcaggtctgtttctttctaggttcctgtagagatctgtatgtagctgttcacttggaagttaattaagaaagaacaaaaactattcatttggattcaaggtccatctccactggtggctgtggtggctttggattgttggaagaccatcaccttcagcaggtctgcacttgggaacaatcattctcccccagcccgagcgtgcctctgccctctgtatcattgacagaggctgtatgtttggaaagagaactttgtgactgcagaactgacagttgactctaattcttgctaccaagtttttccccgacccagtgaaagagtgttaagacttcgacctaggacacattgagaaccaaggccaagactggacagggccatataactgggcttcaaccatggctgggactaagaataagacaagagcccaggccaaaactgaaaaaaaggctgctatacaagctaaagctggagcagagagggaggctactggtgttgttaggcctgtagccaagaccagggccaaagcaaaagccaagacagggtctaagacagatgcagtagcagagatgaaggcagtgtctaagaacaaggttgttgctgagacgaaggaaggagctctgtcagagcctaagactctgggcaaagccatgggagatttcactcccaaggctgggaatgagtccaccagctccacatgtaaaaatgaggctggtactgatgcctggttctgggctggggaagaggccactatcaattcctggttctggaatggagaagaggctggtaatagtttcagcactaagaatgataaacctgaaattggtgcccaggtctgtgctgaggagttggaacctgcggctggggccgattgcaaacctaggtcaggggctgaggaggaggaggaagagaatgttattgggaactggttttgggaaggagatgatactagttttgaccctaatcctaaacctgtgagcaggatagttaagcctcagcctgtgtatgaaattaatgaaaaaaataggcccaaggactggtctgaggtaactatctggcccaatgcccctgctgtaactccagctgtgttaggatttagatcccaggcaccatctgaggcaagccctccttcatatattgttctggcctccgctgaagaaaatgcctgttctttgcctgtggcaacagcttgccgcccttctaggaacactcgctcatgctcacagcctatccctgagtgtcgttttgattctgacccctgcatccagaccatagatgagattagacgtcaaatcaggatcagggaggtaaatgggattaagccatttgcttgtccttgcaaaatggaatgctatatggattctgaggaatttgaaaaacttgttagcttacttaagtcaactactgatcctcttattcataaaatagcacggattgcaatgggtgtccataatgttcacccatttgcccaagagtttattaacgaagtaggtgtagtgacacttattgaaagcttgctcagttttccttcccctgaaatgagaaaaaagactgtaattactctgaatcctccttctggggatgaaagacaacgcaaaattgaattacatgttaagcatatgtgtaaagaaaccatgtcatttcctttgaactcaccgggacagcaatctggattaaagatactaggacaactgactactgattttgtccatcactacattgttgccaattacttttcagagcttttccatttgctgtcctcaggaaattgcaaaaccagaaatcttgttttgaaactacttttaaatatgtctgaaaatccaactgcagccagagacatgatcaatatgaaggcattggcagcattaaaactcatctttaaccagaaagaggcaaaagccaatcttgttagtggtgtggccatatttattaacataaaggagcatatcagaaaaggctcaattgtagttgttgatcacttgagttataatacactcatggccattttcagggaagttaaagagattattgaaacaatgtaaaatgagccagagatagaacattttaagccatcttcaaactctagcaggctgtacattacagtgtacacattatacactgcatctttaacacagagtcacctgtgacaggctctaggtttgagctagactattttgggggtatcaaatgaatattataccttgggctgaaaatgtttgatttttatcttgtctagattggcatatttttaacattttacttaagatagcaaaccagttcgttttaagtaagctaacttgttcattagtatctgtggcttaaaatggcaaaaaagaaaatatccttgagtttgtaatctagttacagaagtaaggcatacacacacacaaagataacagtacctagagagagagtgtgtgtgagtgtgcgtgtctctgtgtgtgcacgtgcacgctcatggccaaatgtgcgcactctacataaaggaggcaggagttcctataggctatttaatgtaagagaaactatttttctcctgttccagctgtatcagatactcgttccgcaacacagaaatgactcagaatctcagacaaaatgtattatttgttcaattttaattttgctactacattcataactcttaaattgttaggctgtttcatttacatcaaagttatctcacaaaagagaaggcaggaaacgttttgtgagtgcctattctatgtcaaacactgtgttggcaccatattttacaagtttttttcctcttctcacagtgatcttgtgagttagttacttatatttttattagaactcattattctgggtaccctccaatgagaattagagaggttaaataccttttcctagattcccacagcaggaaggtggcatagctgttttgtctgacaccagaacccatctcaccacactgctttacagtcttcctgaaggacattttgaggtgggggggccttcaaagctcagagactggtttgaatggtttaattttgcaatggatcatgtccatgccaggtgttacaattcttaacttcctccaaattcgtgtgtccattagacatttggctacatctggctggaggtcaggagaaaattctgaggtaaatagatggattttatctggcagtgtcgaaaatagtaggagcctaaaactttgttcaatgagtaagatgtagatttggagtcatcagcaggggaaacttgttagatgtcctttgtatctttttctatccatttgtattttttctttcccaaagagctgaaatcattttataccctgaatttaaaaggtaattgcttttttcctccttgcgaaatcataccttaattttttttttttttttttttaccatttatgatttattctcctatgtgtcatatgaaaggccaaggggctttatcttttactagtaggcaagcctgggcatttctgcatttgtgccagctaacactacaaaatagacttaattagagaaatttagacccagaattgcagcttcaacaacacaaaacaggaaagctagaagaggttgctgtgtcaacctacaagatagtgattcttggaagttggtatggaccagaaagcattcccaggacatttaggctatggctgagttctctaagactcagggtgggaattataatccctggtctaagctgatatgaaagtttctatgtgtgaaaatatggagttatatgctttgagattttctgccagttaaactaaaacaagatcatactgtaaatgtttgtaacttgcttccccccactgtatactgtaaacatctttgcatgtcaataaatatgcctctacaac

SEQ ID NO: 110777 - DNA, 4031 bp, Homo sapiens
  Payload ID: 1726
  Gene Symbol: BHLHB9
  Gene Name: basic helix-loop-helix domain containing, class B, 9
  Uniprot ID: Q6PI77
  ENST ID: ENST00000447531
  CDS Start-End: 589-2232
acaccctcgcggagagagcggttcttgcagcatcctgcgcagcccctgcccagtttggtgcagaggcgtggggggcgggacgcgtctttgccattctgatagcggggaaagcggtgagaatcgaagtgaggagccgccagaggagagctgaggagaggagggggaggtcgacgacctgggccctgggcctctgaaggtctgtttctttctaggttcctgtagagatctgtatgtagctgttcacttggaagttaattaagaaagaacaaaaactattcatttggattcaaggtccatctccactggtggctgtggtggctttggattgttggaagaccatcaccttcagcaggtctgcacttgggaacaatcattctcccccagcccgagcgtgcctctgccctctgtatcattgacagaggctgtatgtttggaaagagaactttgtgactgcagaactgacagttgactctaattcttgctaccaagtttttccccgacccagtgaaagagtgttaagacttcgacctaggacacattgagaaccaaggccaagactggacagggccatataactgggcttcaaccatggctgggactaagaataagacaagagcccaggccaaaactgaaaaaaaggctgctatacaagctaaagctggagcagagagggaggctactggtgttgttaggcctgtagccaagaccagggccaaagcaaaagccaagacagggtctaagacagatgcagtagcagagatgaaggcagtgtctaagaacaaggttgttgctgagacgaaggaaggagctctgtcagagcctaagactctgggcaaagccatgggagatttcactcccaaggctgggaatgagtccaccagctccacatgtaaaaatgaggctggtactgatgcctggttctgggctggggaagaggccactatcaattcctggttctggaatggagaagaggctggtaatagtttcagcactaagaatgataaacctgaaattggtgcccaggtctgtgctgaggagttggaacctgcggctggggccgattgcaaacctaggtcaggggctgaggaggaggaggaagagaatgttattgggaactggttttgggaaggagatgatactagttttgaccctaatcctaaacctgtgagcaggatagttaagcctcagcctgtgtatgaaattaatgaaaaaaataggcccaaggactggtctgaggtaactatctggcccaatgcccctgctgtaactccagctgtgttaggatttagatcccaggcaccatctgaggcaagccctccttcatatattgttctggcctccgctgaagaaaatgcctgttctttgcctgtggcaacagcttgccgcccttctaggaacactcgctcatgctcacagcctatccctgagtgtcgttttgattctgacccctgcatccagaccatagatgagattagacgtcaaatcaggatcagggaggtaaatgggattaagccatttgcttgtccttgcaaaatggaatgctatatggattctgaggaatttgaaaaacttgttagcttacttaagtcaactactgatcctcttattcataaaatagcacggattgcaatgggtgtccataatgttcacccatttgcccaagagtttattaacgaagtaggtgtagtgacacttattgaaagcttgctcagttttccttcccctgaaatgagaaaaaagactgtaattactctgaatcctccttctggggatgaaagacaacgcaaaattgaattacatgttaagcatatgtgtaaagaaaccatgtcatttcctttgaactcaccgggacagcaatctggattaaagatactaggacaactgactactgattttgtccatcactacattgttgccaattacttttcagagcttttccatttgctgtcctcaggaaattgcaaaaccagaaatcttgttttgaaactacttttaaatatgtctgaaaatccaactgcagccagagacatgatcaatatgaaggcattggcagcattaaaactcatctttaaccagaaagaggcaaaagccaatcttgttagtggtgtggccatatttattaacataaaggagcatatcagaaaaggctcaattgtagttgttgatcacttgagttataatacactcatggccattttcagggaagttaaagagattattgaaacaatgtaaaatgagccagagatagaacattttaagccatcttcaaactctagcaggctgtacattacagtgtacacattatacactgcatctttaacacagagtcacctgtgacaggctctaggtttgagctagactattttgggggtatcaaatgaatattataccttgggctgaaaatgtttgatttttatcttgtctagattggcatatttttaacattttacttaagatagcaaaccagttcgttttaagtaagctaacttgttcattagtatctgtggcttaaaatggcaaaaaagaaaatatccttgagtttgtaatctagttacagaagtaaggcatacacacacacaaagataacagtacctagagagagagtgtgtgtgagtgtgcgtgtctctgtgtgtgcacgtgcacgctcatggccaaatgtgcgcactctacataaaggaggcaggagttcctataggctatttaatgtaagagaaactatttttctcctgttccagctgtatcagatactcgttccgcaacacagaaatgactcagaatctcagacaaaatgtattatttgttcaattttaattttgctactacattcataactcttaaattgttaggctgtttcatttacatcaaagttatctcacaaaagagaaggcaggaaacgttttgtgagtgcctattctatgtcaaacactgtgttggcaccatattttacaagtttttttcctcttctcacagtgatcttgtgagttagttacttatatttttattagaactcattattctgggtaccctccaatgagaattagagaggttaaataccttttcctagattcccacagcaggaaggtggcatagctgttttgtctgacaccagaacccatctcaccacactgctttacagtcttcctgaaggacattttgaggtgggggggccttcaaagctcagagactggtttgaatggtttaattttgcaatggatcatgtccatgccaggtgttacaattcttaacttcctccaaattcgtgtgtccattagacatttggctacatctggctggaggtcaggagaaaattctgaggtaaatagatggattttatctggcagtgtcgaaaatagtaggagcctaaaactttgttcaatgagtaagatgtagatttggagtcatcagcaggggaaacttgttagatgtcctttgtatctttttctatccatttgtattttttctttcccaaagagctgaaatcattttataccctgaatttaaaaggtaattgcttttttcctccttgcgaaatcataccttaattttttttttttttttttttaccatttatgatttattctcctatgtgtcatatgaaaggccaaggggctttatcttttactagtaggcaagcctgggcatttctgcatttgtgccagctaacactacaaaatagacttaattagagaaatttagacccagaattgcagcttcaacaacacaaaacaggaaagctagaagaggttgctgtgtcaacctacaagatagtgattcttggaagttggtatggaccagaaagcattcccaggacatttaggctatggctgagttctctaagactcagggtgggaattataatccctggtctaagctgatatgaaagtttctatgtgtgaaaatatggagttatatgctttgagattttctgccagttaaactaaaacaagatcatactgtaaatgtttgtaacttgcttccccccactgtatactgtaaacatctttgcatgtcaataaatatgcctctacaac

SEQ ID NO: 110778 - DNA, 706 bp, Homo sapiens
  Payload ID: 1727
  Gene Symbol: BHLHA15
  Gene Name: basic helix-loop-helix family, member a15
  Uniprot ID: Q7RTS1
  ENST ID: ENST00000314018
  CDS Start-End: 57-626
agctccaagggcctcaccttcctgccgccacctcctaggacagccagtccagggccatgaagaccaagaaccggcccccacggcgccgggccccggtgcaggacacagaggccacccccggggaggggacgcccgacgggtccctgccgaacccggggccagagccggccaagggtctgcggagccggccggcccgggccgcagcaagggctccgggcgagggcaggcgcaggcggccaggaccctccgggcccggtggccgtcgtgacagcagcatccagcggcggctggagagcaacgagagggagcggcagcggatgcacaagctaaataacgccttccaggccctgcgtgaagtcatcccccacgtgcgcgcggacaagaagctctccaagatcgagacgctcacgctggccaagaactacatcaaatcgctgacggccaccatcctgaccatgtccagcagccgcctcccaggcctggaggggccgggccccaagctctaccagcactaccagcagcagcagcaggtggctgggggtgcgttgggggccacggaggcccagccccagggccacctgcagaggtactccacgcagatccacagcttccgagagggcacctagcgcccagtcctgggtgggggtggcggtggccgcagctgcctggcctgctcctcccagccccagtccctccaagccacgag

SEQ ID NO: 110779 - DNA, 796 bp, Homo sapiens
  Payload ID: 1727
  Gene Symbol: BHLHA15
  Gene Name: basic helix-loop-helix family, member a15
  Uniprot ID: Q7RTS1
  ENST ID: ENST00000609256
  CDS Start-End: 127-696
cccggggcggctaaagcgacgtgtccttgtcccccgtgggcagcctcggcgcgtgtggccgcggatccccagctccaagggcctcaccttcctgccgccacctcctaggacagccagtccagggccatgaagaccaagaaccggcccccacggcgccgggccccggtgcaggacacagaggccacccccggggaggggacgcccgacgggtccctgccgaacccggggccagagccggccaagggtctgcggagccggccggcccgggccgcagcaagggctccgggcgagggcaggcgcaggcggccaggaccctccgggcccggtggccgtcgtgacagcagcatccagcggcggctggagagcaacgagagggagcggcagcggatgcacaagctaaataacgccttccaggccctgcgtgaagtcatcccccacgtgcgcgcggacaagaagctctccaagatcgagacgctcacgctggccaagaactacatcaaatcgctgacggccaccatcctgaccatgtccagcagccgcctcccaggcctggaggggccgggccccaagctctaccagcactaccagcagcagcagcaggtggctgggggtgcgttgggggccacggaggcccagccccagggccacctgcagaggtactccacgcagatccacagcttccgagagggcacctagcgcccagtcctgggtgggggtggcggtggccgcagctgcctggcctgctcctcccagccccagtccctccaagccacgagccccagatgggcggtgacac

SEQ ID NO: 110780 - DNA, 902 bp, Homo sapiens
  Payload ID: 1728
  Gene Symbol: BHLHA9
  Gene Name: basic helix-loop-helix family, member a9
  Uniprot ID: Q7RTU4
  ENST ID: ENST00000391429
  CDS Start-End: 6-713
aggccatgctgcggggcgcgccaggactaggcctcacggcgcggaagggggccgaggactctgcggaggacttggggggcccctgccccgagcccgggggcgattcgggggtgctgggggcgaacggcgcttcctgcagccggggcgaggcggaggagccggcgggcaggaggcgcgcgcggccggtgcggtccaaggcgcggcgcatggccgccaacgtgcgggagcgcaagcgcatcctagactacaacgaggccttcaacgcgctgcgccgggcgctgcggcacgacctgggcggcaagaggctctccaagatcgccacgctgcgcagggccatccaccgcatcgccgcgctctccctggtcctgcgcgccagccccgcgccccgcgggccctgcggacacctggagtgccacggcccggccgcgcgcggggacaccggggacacaggcgccagccccccgccgcctgcagggcccagcctcgcgcgcccagacgccgcccgcccctcggtgccgtccgcgccccgctgcgcctcgtgccccccgcacgcgcccctggcacggcccagtgcggtggccgaggggccgggcctagcacaggcctccgggggaagctggcgccgctgtccgggggcttcctctgccgggccgcctccctggccgcggggctacctgcgatccgcccccgggatgggccatccgcgctcctgaccggcctcgaggcaccggctgggctgcagggaggccgggctggcagctggactataaaacccgggactgcaaaggcgtcttggacagagcagaactggaccggctgagacctggcgtggaagagaaggagctcgccagagagaaggagctccgggacccggggttgcgcccccacatcccagcctgggg

SEQ ID NO: 110781 - DNA, 3262 bp, Homo sapiens
  Payload ID: 1729
  Gene Symbol: BHLHE22
  Gene Name: basic helix-loop-helix family, member e22
  Uniprot ID: Q8NFJ8
  ENST ID: ENST00000321870
  CDS Start-End: 425-1570
aaaagactcccccgtctgtggcggcggctgtttgatgggtccggaaatctcttgaaggtgaatccaagcaagataaacggtgcggagaggaggcgcggggctgggctcagagcggcggcggcggcggctccactccctccgcgcccaccctcccaccatgcggggccgcggcccatggtgagccccagcagccagcaccatcggctggagacgaagaagaagaagaagaggaggcggcgagcgcgggggaaggcgaaaaagaaaaagaaagaaggggagagggctcccggcagcaccaggaccgacgcgcgcaccagctccggagcccagctcgcgcgcgtctgtggggccgcctgactccggggccgaggcggcggcggcggcagcgggcgcggcggcccgggctgcgcgccggcgcgggaccatggagcgcgggatgcacctcggtgcagcggccgccggcgaggacgacctcttcctgcacaagagcctgagcgcctccacctccaagcgcttggaagcggctttccgctccacgcccccgggcatggacctgtccctggcgccgccgcctcgggaacgcccggcgtcctcctcctcgtcgcccctgggctgcttcgagccggctgaccccgagggggcagggctgctgttgccgccgcctggaggaggcggcggcggcagcgcgggaagtggcggcggcggcggcggcggggtgggtgtccccgggctgctagtaggttcagccggcgttgggggcgaccctagcctaagcagcctgccggccggggccgccctttgcctcaagtacggcgaaagcgcgagccggggctcggtggccgagagcagcggcggcgagcagagccccgacgacgacagcgacggtcgctgcgagctcgtgctgcgggccggagtagccgacccgcgggcctccccgggagcgggaggtggtggcgcgaaggcagccgagggctgctccaatgcccacctccacggcggcgccagcgtccccccggggggcctgggcggcggcggcggcgggggtagcagcagcggtagcagtggcggcggtggcggtagcggtagcggcagcggcggcagcagcagcagcagcagcagcagcagcaagaaatccaaagagcaaaaggcgctgcggcttaacatcaatgcccgagagcgccggcggatgcacgacctgaacgacgcgctggacgagctgcgcgcggtgatcccctacgcgcacagcccctcggtgcgaaagctctccaagatcgccacgctgctgctcgccaagaactacatcctcatgcaggcgcaggccctggaggagatgcggcgcctagtcgcctacctcaaccagggccaggccatctcggctgcctccctgcccagctcggcggctgcagcggcagcagctgctgccctgcacccggcgctcggcgcctacgagcaggcagccggctacccgttcagcgccggactgcccccggctgcctcctgcccggagaagtgcgccctgtttaacagcgtctcctccagcctctgcaaacagtgcacggagaagccttaaacacacccccgaaaaacacaagaccgacccaaaatctagaggaaagcgaaaagctgctccccaccccctttattttggtcctctcgtagttgtgaaacacttgcagagcaaacaaagcagaggcaagaactgaggagaagtatcagagacaaacgggacttttagccttgacatccccagaatctcggtctttggggtggggagggagggaggagggaggtggagttgggatggagtatggatgtcttttttttctcagaaaagtggcaactttggtggcagcctagaccgcgaggaagtggaatcttccttaaaggtgaaacataagttgagaagtagtgcttggttattaagcctggagagtgtttgaatggcaaaatactaatcctactaataattgtggatttggctagtgctgagggggagaggaggggttaggggttgggtagcatgagagatggaatattcattcagacaaatcagaaagggcacttgaaaataaattttgattctgagccaggagaaaaacttgaaatgttgacttaagtgagggggaaataaaacccagagagagagagagagcgagagagagagacatgttactatgaaagacttgtattttttattgtctctgaactttaatcctgtgaaaatgctcaaagttttggcgagagtgatataaaaaaactgactgtggctgaaagaattgcatttaaaaatatttatgtgcaccttgttactttctactctgcaatgatgtattaacaattcatggtatttatttgttattcttcaatgacccttccacatcaacagtatttatcatgtgttaaagtcatgggtcttatgtgcagatttttttaatgcctctaaaattgttttatagattacttatgctgtgtgccaagtgtttaaaggtttatttgccaacaagtatgaagagaaatattgatgtatctgagctgcttaggtttatgaaaggtcacctggatattttcagttgcatcatccctgtatttaaattgagctttaataaattgcttcagtccaaaaattacaggaaaggtgtattcttaattgatgaatgaattgatctcttttttgaaaggggactcctttacattccaaaagggaaaaacatcacagcaatagttgctatacgtaagaacatgctaagcaaatatttttccaggctgtgctgtgcatttttaaaaggtctaatttaattgcttttaatatatatgtacatatatgttattttaactgtggagaattatttaagttaaaagactggtttgatttgcctatggtgtgaaatcctttgttatttttctaaaaaaataaaatttaaaaagaaagaaaactaaggaagaacaagaagctatttacccaaagtgagctttcagttttagttttgcatggctgtttgactgcctttccgccctatgaaaatcaagaaaatcttttttaaaaatggagtcctgctattttccactccttgcagataatacaaattcagtttgtcaggttggatggtgagttgggagctgtgatggatctgttggcgggttttggatgtgtaaagaatgatatatatattaaataggtcaatcagactatgacagctatgtacgaccatttgtatgtgtatctatgtcagaaagaatctttattaaaatattttgatcaaac

SEQ ID NO: 110782 - DNA, 1057 bp, Homo sapiens
  Payload ID: 1730
  Gene Symbol: BHLHE23
  Gene Name: basic helix-loop-helix family, member e23
  Uniprot ID: Q8NDY6
  ENST ID: ENST00000370346
  CDS Start-End: 310-987
tgattggacagcagcgaggtcccaccgggcgcctccgcggcttaaaaccgaagcgggggcgagggggaggtagagcccgccccctgcgcgtcgcggctgggagggagaggaggtgggagagaaggaagaggcggaggaggcagcgggcgccgaggctctgggacccgcaggcaagccagaccgacgcgcagagccgggagcctcatcgcagcggcagcggcagcggcgggctcgggccggcctcgggggctgctcacccacatgagcatccgcccacccggcgagcccccgagcccaggcggcgcggccatggccgagctcaagtcgctgtcgggggacgcgtacctggcactaagccacggctacgcggcggcggctgcgggtctcgcctacggggcggcgcgagaacccgaagcggcccgcggctacggcactccgggcccgggcggcgacctccccgcggcgcctgcacctcgcgccccagctcaggcggcggagagcagcggcgaacagagcggggacgaggacgacgccttcgagcagcggcggcggcggcgcgggccagggagcgcggcggacgggcggcggcggccgcgagagcagcggtctctgcggctcagcatcaacgcgcgcgagcggcggcgcatgcacgacctaaacgacgcgctggacgggctgcgagccgtcatcccctacgcgcacagcccgtcggtgcgcaagctctccaagatcgccacgctgctgctcgccaagaactatatcctcatgcaggcgcaggccctggacgagatgcggcgcctggtggccttcctcaaccagggccagggcctggccgcgcccgtaaacgccgcgcccttgacgcccttcggccaggccactgtgtgccccttctccgcaggcgccgccctggggccctgccctgacaagtgcgccgccttctccgggacgccctccgcgctttgcaaacactgtcacgagaagccgtgaccgcgcgggcccccggccctcccgcacgcgtcctccgatcgcccctgtgactgtctctctgcccggacag

SEQ ID NO: 110783 - DNA, 1109 bp, Homo sapiens
  Payload ID: 1730
  Gene Symbol: BHLHE23
  Gene Name: basic helix-loop-helix family, member e23
  ENST ID: ENST00000612929
  CDS Start-End: 262-987
tgattggacagcagcgaggtcccaccgggcgcctccgcggcttaaaaccgaagcgggggcgagggggaggtagagcccgccccctgcgcgtcgcggctgggagggagaggaggtgggagagaaggaagaggcggaggaggcagcgggcgccgaggctctgggacccgcaggcaagccagaccgacgcgcagagccgggagcctcatcgcagcggcagcggcagcggcgggctcgggccggcctcgggggctgctcacccacatgagcatccgcccacccggcgagcccccgagcccaggcggcgcggccatggccgagctcaagtcgctgtcgggggacgcgtacctggcactaagccacggctacgcggcggcggctgcgggtctcgcctacggggcggcgcgagaacccgaagcggcccgcggctacggcactccgggcccgggcggcgacctccccgcggcgcctgcacctcgcgccccagctcaggcggcggagagcagcggcgaacagagcggggacgaggacgacgccttcgagcagcggcggcggcggcgcgggccagggagcgcggcggacgggcggcggcggccgcgagagcagcggtctctgcggctcagcatcaacgcgcgcgagcggcggcgcatgcacgacctaaacgacgcgctggacgggctgcgagccgtcatcccctacgcgcacagcccgtcggtgcgcaagctctccaagatcgccacgctgctgctcgccaagaactatatcctcatgcaggcgcaggccctggacgagatgcggcgcctggtggccttcctcaaccagggccagggcctggccgcgcccgtaaacgccgcgcccttgacgcccttcggccaggccactgtgtgccccttctccgcaggcgccgccctggggccctgccctgacaagtgcgccgccttctccgggacgccctccgcgctttgcaaacactgtcacgagaagccgtgaccgcgcgggcccccggccctcccgcacgcgtcctccgatcgcccctgtgactgtctctctgcccggacaggaaaggcctggagggaccctgcagaccaggaggagggggcccgacttcgctt

SEQ ID NO: 110784 - DNA, 3473 bp, Homo sapiens
  Payload ID: 1731
  Gene Symbol: BHLHE40
  Gene Name: basic helix-loop-helix family, member e40
  Uniprot ID: O14503
  ENST ID: ENST00000256495
  CDS Start-End: 604-1842
gcggccgcagccgcagacacctgggggccggggctgggggtgggggctccctagcagccgccggagcgttgtccaacacgtgagactcatgtgatgaagccgggggagggcgggcaggtcgctccttccctccccggcagtggccagacgtgcctggagtcacagggtagaacacgtagctccaacccacccactcgctcccatttaacccagcccgcagcctctccattactcctcggcttgcccccccacccccccactccgccctaaccgcccccccctcacccgctccctcccgcctccccgcccgccccacttctcattcacttggctcgcacggcgcagacagaccgcgcagggagcacacaccgccagtctgtgcgctgagtcggagccagaggccgcggggacaccgggccatgcacgcccccaactgaagctgcatctcaaagccgaagattccagcagcccaggggatttcaaagagctcagactcagaggaacatctgcggagagacccccgaagccctctccagggcagtcctcatccagacgctccgctagtgcagacaggagcgcgcagtggccccggctcgccgcgccatggagcggatccccagcgcgcaaccaccccccgcctgcctgcccaaagcaccgggactggagcacggagacctaccagggatgtaccctgcccacatgtaccaagtgtacaagtcaagacggggaataaagcggagcgaggacagcaaggagacctacaaattgccgcaccggctcatcgagaaaaagagacgtgaccggattaacgagtgcatcgcccagctgaaggatctcctacccgaacatctcaaacttacaactttgggtcacttggaaaaagcagtggttcttgaacttaccttgaagcatgtgaaagcactaacaaacctaattgatcagcagcagcagaaaatcattgccctgcagagtggtttacaagctggtgagctgtcagggagaaatgtcgaaacaggtcaagagatgttctgctcaggtttccagacatgtgcccgggaggtgcttcagtatctggccaagcacgagaacactcgggacctgaagtcttcgcagcttgtcacccacctccaccgggtggtctcggagctgctgcagggtggtacctccaggaagccatcagacccagctcccaaagtgatggacttcaaggaaaaacccagctctccggccaaaggttcggaaggtcctgggaaaaactgcgtgccagtcatccagcggactttcgctcactcgagtggggagcagagcggcagcgacacggacacagacagtggctatggaggagaatcggagaagggcgacttgcgcagtgagcagccgtgcttcaaaagtgaccacggacgcaggttcacgatgggagaaaggatcggcgcaattaagcaagagtccgaagaaccccccacaaaaaagaaccggatgcagctttcggatgatgaaggccatttcactagcagtgacctgatcagctccccgttcctgggcccacacccacaccagcctcctttctgcctgcccttctacctgatcccaccttcagcgactgcctacctgcccatgctggagaagtgctggtatcccacctcagtgccagtgctatacccaggcctcaacgcctctgccgcagccctctctagcttcatgaacccagacaagatctcggctcccttgctcatgccccagagactcccttctcccttgccagctcatccgtccgtcgactcttctgtcttgctccaagctctgaagccaatcccccctttaaacttagaaaccaaagactaaactctctaggggatcctgctgctttgctttccttcctcgctacttcctaaaaagcaacaaaaaagtttttgtgaatgctgcaagattgttgcattgtgtatactgagataatctgaggcatggagagcagattcagggtgtgtgtgtgtgtgtgtgtgtgtgtatgtgcgtgtgcgtgcacatgtgtgcctgcgtgttggtataggactttaaagctccttttggcatagggaagtcacgaaggattgcttgacatcaggagacttgggggggattgtagcagacgtctgggcttttccccacccagagaatagcccccttcgatacacatcagctggattttcaaaagcttcaaagtcttggtctgtgagtcactcttcagtttgggagctgggtctgtggctttgatcagaaggtactttcaaaagagggctttccagggctcagctcccaaccagctgttaggaccccacccttttgcctttattgtcgacgtgactcaccagacgtcggggagagagagcagtcagaccgagctttctgctaacatggggaggtagcaggcactggcatagcacggtagtggtttggggaggtttccgcaggtctgctccccacccctgcctcggaagaataaagagaatgtagttccctactcaggctttcgtagtgattagcttactaaggaactgaaaatgggccccttgtacaagctgagctgccccggagggagggaggagttccctgggcttctggcacctgtttctaggcctaaccattagtacttactgtgcagggaaccaaaccaaggtctgagaaatgcggacaccccgagcgagcaccccaaagtgcacaaagctgagtaaaaagctgcccccttcaaacagaactagactcagttttcaattccatcctaaaactccttttaaccaagcttagcttctcaaaggcctaaccaagccttggcaccgccagatcctttctgtaggctaattcctcttgcccaacggcatatggagtgtccttattgctaaaaaggattccgtctccttcaaagaagttttatttttggtccagagtacttgttttcccgatgtgtccagccagctccgcagcagcttttcaaaatgcactatgcctgattgctgatcgtgttttaactttttcttttcctgtttttattttggtattaagtcgttgcctttatttgtaaagctgttataaatatatattatataaatatattaaaaaggaaaatgtttcagatgtttatttgtataattacttgattcacacagtgagaaaaaatgaatgtattcctgtttttgaagagaagaataattttttttttctctagggagaggtacagtgtttatattttggagccttcctgaaggtgtaaaattgtaaatatttttatctatgagtaaatgttaagtagttgttttaaaatacttaataaaataattcttttcctgtggaagagaaagatggtctcctgagttttttaaaatagctcacttggtgtgatatggctgactcccatgtccttctttcttggctgaagcaaaccagttaatctcagtgtaatttcattcagcttttcatgtgctttgtattcaatcagaata

SEQ ID NO: 110785 - DNA, 3837 bp, Homo sapiens
  Payload ID: 1732
  Gene Symbol: BHLHE41
  Gene Name: basic helix-loop-helix family, member e41
  Uniprot ID: Q9C0J9
  ENST ID: ENST00000242728
  CDS Start-End: 349-1797
cccccgcccccctccgggctggaccgcggatggtacgttccgcacgtgagctgggtgctggtctggccggcgacgcgcgtgccctgtggccaaacactgcctggagtgagagcaaactaccagcgcagtggggccggcgcgagtgtgcgtgtgtgtgcgtgtgtgtgtgcgagcgcggtggaggggggggaccaactgcttcacactttcaacactgcactgaagagggagagcgagagagagactggagacgcacagatccccccaaggtctcccaagcctaccgtcccacagattattgtacagagccccaaaaatcgaaacagaggaaacgaacagcagttgaacatggacgaaggaattcctcatttgcaagagagacagttactggaacatagagattttataggactggactattcctctttgtatatgtgtaaacccaaaaggagcatgaaacgagacgacaccaaggatacctacaaattaccgcacagattaatagaaaagaaaagaagagaccgaattaatgaatgcattgctcagctgaaagatttactgcctgaacatctgaaattgacaactctgggacatctggagaaagctgtagtcttggaattaactttgaaacacttaaaagctttaaccgccttaaccgagcaacagcatcagaagataattgctttacagaatggggagcgatctctgaaatcgcccattcagtccgacttggatgcgttccactcgggatttcaaacatgcgccaaagaagtcttgcaatacctctcccggtttgagagctggacacccagggagccgcggtgtgtccagctgatcaaccacttgcacgccgtggccacccagttcttgcccaccccgcagctgttgactcaacaggtccctctgagcaaaggcaccggcgctccctcggccgccgggtccgcggccgccccctgcctggagcgcgcggggcagaagctggagcccctcgcctactgcgtgcccgtcatccagcggactcagcccagcgccgagctcgccgccgagaacgacacggacaccgacagcggctacggcggcgaagccgaggcccggccggaccgcgagaaaggcaaaggcgcgggggcgagccgcgtcaccatcaagcaggagcctcccggggaggactcgccggcgcccaagaggatgaagctggattcccgcggcggcggcagcggcggcggcccggggggcggcgcggcggcggcggcagccgcgcttctggggcccgaccctgccgccgcggccgcgctgctgagacccgacgccgccctgctcagctcgctggtggcgttcggcggaggcggaggcgcgcccttcccgcagcccgcggccgccgcggcccccttctgcctgcccttctgcttcctctcgccttctgcagctgccgcctacgtgcagcccttcctggacaagagcggcctggagaagtatctgtacccggcggcggctgccgccccgttcccgctgctataccccggcatccccgccccggcggcagccgcggcagccgccgccgccgctgccgccgccgccgccgcgttcccctgcctgtcctcggtgttgtcgccccctcccgagaaggcgggcgccgccgccgcgaccctcctgccgcacgaggtggcgccccttggggcgccgcacccccagcacccgcacggccgcacccacctgcccttcgccgggccccgcgagccggggaacccggagagctctgctcaggaagatccctcgcagccaggaaaggaagctccctgaatccttgcgtcccgaaggacggaggttcaagcagagtgagaagttaaaatacccttaaggaggttcaagcagagtgagaagttaaaatacccttaaggtctttaagggaggaagtgtaatagatgcacgacaggcataaacaagaacaacaaaacaggtgttatgtgtacattcggagttcctgttttgctcatcccgcaccaccccaccctccacacactaacatccctttcttccccccaccagctgtaaaagatcctatgcgaaagacactggctcttttttttaatcccccaaataaattttgcccccttttaggccatgttccattatctcttaaaattggaacctaattcgagaggaagtaagaagggtctgttctgtggctgagctaggtgaaccccggggtaggggaaagatgttaacacctttgacgtctttggagttgacatggaacagcaggtagttgttatgtagagctagttctcaaagctgccctgcctgttttaggaggcgttccacaaacagattgaggctcttttagaattgaatttactcttcagtattttctaatgttcagctttctaaaaggcatatatttttcaaagaagtgaggatgcagtttctcacgttgcaacctattctgaagtggtttaaatggtatctcttagtaacttgcactcgttaaagaaacacggagctgggccatcgtcagaactaagtcagggaaggagatggatgagaaggccagaatcattcctagtacatttgctaacactttattgagaaattgaccatgaattaatggactcatcttaatttcttctaagtccatatatagatagatatctatctgtacagatttctatttatccatagataggtatctatacatacacatctcaagtgcatctattcccactctcattaatccatcatgttcctaaatttttgtaatcttactgtaaaaaaaagtgcactgaacttcaaaacaaaacaaaaaacaacaacaacaaaaaacaagtccaaactgatatatcctatattctgttaaaattcaaaagtgaacgaaagcatttaactggccagttttgattgcaaatgctgtaaagatatagaatgaagtcctgtgaggccttcctatctccaagtctatgtattttctggagaccaaaccagataccagataatcacaaagaaagcttttttaataaggcttaaaccaagaccttgtctagatatttttagtttgttgccaaggtagcactgtgagaaatctcacttggatgttatgtaaggggtgagacacaacagtctgactatgagtgaggaaaatatctgggtcttttcgtcagtttggtgcatttgctgctgctgttgctactgtttgcctcaaacgctgtgtttaaacaacgttaaactcttagcctacaaggtggctcttatgtacatagttgttaatacatccaattaatgatgtctgacatgctatttttgtagggagaaaatatgtgctaatgatattttgagttaaaatatcttttggggaggatttgctgaaaagttgcacttttgttacaatgcttatgcttggtacaagcttatgctgtcttaaattattttaaaaaaataaatactgtctgtgagaaaccagctggtttagaaaagtttagtatgtgacgataaactagaaattacctttatattctagtattttcagcactccataaattctattacctaaatattgccacactattttgtgatttaaaaattcttactaaggaataaaaactttaatatacgatatgatattgtctaataattaaaaaagacataatggatgctcaattagttttaagatatctataactatagggatacaaatcactacagttctcagatttacagcttttttttgtcattggcttgatgtcacacatttccaatctcttgcaagcctccaggctctggctttgtctacctgctcgttcccaatgtatcttaatgaaaagtgcaaaagaaaaacctaccaattaa

SEQ ID NO: 110786 - DNA, 6875 bp, Homo sapiens
  Payload ID: 1733
  Gene Symbol: BZW1
  Gene Name: basic leucine zipper and W2 domains 1
  Uniprot ID: Q7L1Q6
  ENST ID: ENST00000409600
  CDS Start-End: 456-1715
gacttccggtgctggaggagggggccggcggcgagggactccaggaggacgcgtccaacttcgagaccggcgggggccggctccgctcttccaacccctccatgtgtgaagagggcggacgacgcagcgggggaagaaaaataagctagtctaggacaagtgtccaggcgacgtggaacccagtaagggaataaagaagactggaaacgtctctcccctcccctatcccagtccctcaccctaatccgcgcgcaatagaaaaggcggaagcgcctgtccacgatcagggcggggcaaggggaagaaatctcgcgataggagagcggtccgggcgggggtggcacctctccctcctcctggcgttagttccggtcgcagaggagacaccgccgcagttgccggtacatcggggatttctggctctttcctcttcgccttaaattcgggtgtcttttatgaataatcaaaagcagcaaaagccaacgctatcaggccagcgttttaaaactagaaaaagagatgaaaaagagaggtttgaccctactcagtttcaagactgtattattcaaggcttaactgaaaccggtactgatttggaagcagtagctaagtttcttgatgcttctggagcaaaacttgattaccgtcgatatgcagaaacactctttgacattctggtggctggtggaatgctggccccaggtggtacactggcagatgacatgatgcgtacagatgtctgcgtgtttgcagcccaagaagatctagagaccatgcaagcatttgctcaggtttttaacaagttaatcaggcgctacaaatacctggagaaaggttttgaagatgaagtaaaaaagctgctgctgttcttgaagggtttttcagagtcggagaggaacaagctagctatgttgactggtgttcttctggctaatggaacacttaatgcatccattcttaatagcctttataatgaaaatttggttaaagaaggagtttcagcagcttttgctgtgaagctctttaaatcatggataaatgaaaaagatatcaatgcagtagctgcaagtcttcggaaagtcagcatggataacagactgatggaactctttcctgccaataagcaaagtgttgaacacttcacaaaatattttactgaggcaggcttgaaagagctttcagaatatgttcggaatcagcaaaccatcggagctcgtaaggagctccagaaagaacttcaagaacagatgtcccgtggtgatccatttaaggatataattttatatgtcaaggaggagatgaaaaaaaacaacatcccagagccagttgtcatcggaatagtctggtcaagtgtaatgagcactgtggaatggaacaaaaaagaggagcttgtagcagagcaagccatcaagcacttgaagcaatacagccctctacttgctgcctttactactcaaggtcagtctgagctgactctgttactgaagattcaggagtattgctatgacaacattcatttcatgaaagccttccagaaaatagtggtgcttttttataaagctgaagtcctgagcgaggagcccattttgaagtggtataaagatgcacatgttgcaaaggggaagagtgttttccttgagcaaatgaaaaagtttgtagaatggctcaaaaatgctgaagaagaatctgaatctgaagctgaagaaggtgactgaattttgaaactacaccctcagtaaagcaaacaggagttgtagataaaatgtcatgtctcatgtgtcctggttcttacatcttcctacctccctgtatcaagcatgatataagggctttcatggcaaattttattttaactgtttctatggttgctggaaatgttgggtttagtttctaaaaccatgttttaagtagctacaggagctatagatttgaatctaatgttgcattagtcttttcagttatcttctacctcctgtattttctactgtaataatgtaatttaaggccttccacaatgaacagttcactttattccctgggttttctataaacagttttaaggatatgatttggttaaaaaataatttgttataaaaattctgtttgcaaattaaactggaaaagtatccagagtctcaaaaggcaatgatttgtgagataatatggcatgcccggagccctgctcatcaatgaaaaacccatatgtaataatcgaattcatttaacatgaatcttgagtacgtggaccattgcttgcatgttaactttttgttttgttttgttttgttttgttttgcatttttaactccagatatcctaaagctcaattgtttggtctctggttttcatccttagagaagccatggagaacagacttgaaaagtttaggaaatcataatgtggcagaggtggtgggaagaagaaagttgagctttttccccttgagaaacttctgcatttagtttctatctttccaggcaaaacaaatgggtattcttttcatacaaccattttcaaatgaaccttagaaaagtcttaacatttaaggtattttatgcacagaatacacttagattgataggaaagaactcgtaatggagtttgagtaaagaaaatgactgatgtactaaacccagtaaaaattgttgaaaatgttaaaggtcagcatgttctaattgggaatctagatatagcttagatttcctattggcttagagtatttgctataacaaatgaagtgcaatgacaattatatattcctactcggtcatactggactggcttcgttctcttaatatactcagtaatgactcaagcctctggctattaacataccctagttgccgttttttaattgccatgagccaaatacttcttggtatacaattgatccatttattttaatggctgccttttcattttcatcttttcttgctgctacccatctatgtatgtagtcattggggggaaaatgtagccacattttttatgggaagactttgtgttaaaagtgaacattttgaaggtttttaactggtgaaactagcctggaataatgccaccagagactgagtggaaatcgccccttttgaaggtgccattcttatgagccaaaagtttgtcatttaaaagttcattttgagggaataacatgtaatataatttgaaataaaggtatagtaaccttaaaaagaacattataactgattgttgtgaatggggtgaatttgttaaaatgagtaactttgataaagtttttcatgcacaggcaaaatgtattcactagatttctacgtagtgatctgcttttactttgtaatttgtagttctcaaaagacttttttttaaaaaaataaagtccatacttacacttaggctttatacatcagtctttttttttttaaattccatgttaatacctagtggtattgtatgttgtgtgttcagatgtctttactgtatctgtataccattaagtaataattagactcccaaactgtaaaccacctacacagaattctggtgtagctaaaactacattaatatttctacaaccaattcattgcatgtttcttccatacaaagtgtgccattttatactgtgtatagtgaaaaagtgtgtcatcttccagaactacattattatctttgatcgtagtttgtttcttcataatgacactgtagtgtttacttagtagaacattatagtaagtggatatcacttgtgacagtaatagtgtaaagaaagggaatgctttataaaaagattgcagattccattccatataaaaagattccattctgaatcttaagtggtaattttagaattcaggtgccagtgccagcctatggcctcaagtatgtaattcttaatatagatgttaaattgtacttttaattatgattggataaatgttttttctaactgtcagtttctaaggctgtctccttagaaactaaatgagtttttagagctggttgtaagtttcttagccttactctgtgagttatagatgttatttcattctatatatagatgtttattccattcttatttaaaaaaaaaaacctccatataccaaaaatgctacaggatattttgaaatagcatattttagttaggggaaatgcatgtgaccaagaggttggacttctaattcagtttttcaaaagcttttttccattatcatacccccagcctttttaggcttttttttttttttttttgagacggagtctcgctctgtcaccaggctggagtgcagtggcgcgatcttggctcactgcaagttccgcctcccgggttcacgccattctcctgcctcagcctcccgagtagctgggactacaggcgcccgccaccatgcccgactaatttttttgtatttttagtagagacgaggtttcaccggattagcgaggatggtctcaatctcctgaccttgtgatccacccgcctcagcctcccaaagtgctgggattatgggcttgagccaccgcgcccagctagacttttttctaatagagtcccccataaattttattaccatagatacgctgtgtatgtactgtttctgtgctttgtacatgaaaagagtaaaatgtttttgtttttgttttggagacagtctcactctgttacctgggctggagtgcaatggcatgatctcagctcactgcaatctctgcctcctgggttcaagcgattctcttgcttcagcctcctgagtagctgggattacaggcggccaccaccacccctggctaatttttgtatttttagtagaggtttcaccacgttgatcaggctggtctcaaactcctgacctcgtggtctgcctgccttggcctcccaaagtgctgggattacaggcgtgagccaccatgcccaaccaattttttttttttaaatccttggtagtgattgacccccattgagaatgcatgctctaatattttttaaaagggaagaagacctagtgatagacctttgcattggcaggcatgtctttatgtttatacagtgaagtagtattttttctgtcagggtcaatagaaagtagacgaaattcattttcagccaatctttcaccagttgtgctttgttccttaccccaccacaggcaacagacaaagcatttcctgctgtctttcaaggtcttaacagattctttcttgattataaatgtattactaagtagaatcatttgggttctttctataaaaatcagtgaaaatcctctagatgaatgaattaaagttgtaggcataacactgataaacctctgctctcatactgaagtaggctgcttgcaggaactgacaactattggttggctttaaatgtaatgtagatgccaaagttttagtgtacagtgttacttaaattaccaaattacctttgtacaaatattcctcagatgctgtctacaggtgccatataaaataggttgataagtatttgcaaattctggtaaattgccttgctatgatttttcatgctcagtattagtcctctagtatcaatacgaagtttttctattccccagcctactaaggcctacaggttaaaataccaggaataaaaaggttttcagtggacttgatttaagtggaatctggatgatgtgacaagtacctttgtctttggagtaatgagtttataattggcttttgtccaaaaactcttaagtggattaatatctgaacaatcttagacataattatatgaaactggatcagaaaggctttctgactcctttctcttcacttttttctcccagcttaactagaggcaattaacagtcatttcaaatctaattatttttattttccagtgtacttatcatcctttcatctttatgctaggagtatagtctcagttcttaatgagttgatgggatgaagatatagatagatagatagatagatagatagatagatatttttttttttttttttttttttttttttttttttgagacagagtctcgctctgtcgcccaggcgggagtgcagtggcacaatctcggctcactgcaagctccgccttgggggttcacaccattctcctgtctcagcctcctagctgggattacaggcgcccaccaaccaagcccggctaaggtatttttaaatgtactcaatcactgtcattttagtaaccttgaatcagaacctcagttgttaaaggcttaactgcttgtggcaactactatagtgctctagtggggacagtggttaaaatctgcagaatcccttgctttgtcatcttatccagaaggactgatagcttgttaaactgtggtatgattagaatgttggtggttgtgtagtgcatttggggtgctacaacgttaatcaaatataattgagctgttctgtttccagtcagtgtaaccatttaaaaataccttggcaaaacaagctaggagctagttcatgctaatattcttaaggacaaaaatagtttacagcttttttttttttaatctgaaatcctgaaggctatgcttaaaagttagagataaacctgttggaaataagtgattcatttatagactgaagcctctatgacttcaaaaagatactcaacagtctctggcatttgaagaacaaaatattttctctgtaaatacacctcatttccattctagttaggagcaatggcgcccaggacggcacacagaatggagaaaactggatagctggtaactcatttagctcttggcactctaaaaaacctcaaatacagccatccaagccagtaattctattgctgcgttatttctgtgtttaactgtgaaacttgcttcttgtctgtacccttgaaatggaataaaatttcatgagactccttgttaatgtagagaaaa

SEQ ID NO: 110787 - DNA, 2455 bp, Homo sapiens
  Payload ID: 1733
  Gene Symbol: BZW1
  Gene Name: basic leucine zipper and W2 domains 1
  Uniprot ID: Q7L1Q6
  ENST ID: ENST00000409226
  CDS Start-End: 124-1395
cgggtggggaggtggggtccgggtgtgcgccgcggcgctggctgcgaaggcagtggccgaggcgggctccctctgggccgtgcccggcctggctaacaaagccgccgcggcctctgttgtgtgatggtgtcttttatgaataatcaaaagcagcaaaagccaacgctatcaggccagcgttttaaaactagaaaaagagatgaaaaagagaggtttgaccctactcagtttcaagactgtattattcaaggcttaactgaaaccggtactgatttggaagcagtagctaagtttcttgatgcttctggagcaaaacttgattaccgtcgatatgcagaaacactctttgacattctggtggctggtggaatgctggccccaggtggtacactggcagatgacatgatgcgtacagatgtctgcgtgtttgcagcccaagaagatctagagaccatgcaagcatttgctcaggtttttaacaagttaatcaggcgctacaaatacctggagaaaggttttgaagatgaagtaaaaaagctgctgctgttcttgaagggtttttcagagtcggagaggaacaagctagctatgttgactggtgttcttctggctaatggaacacttaatgcatccattcttaatagcctttataatgaaaatttggttaaagaaggagtttcagcagcttttgctgtgaagctctttaaatcatggataaatgaaaaagatatcaatgcagtagctgcaagtcttcggaaagtcagcatggataacagactgatggaactctttcctgccaataagcaaagtgttgaacacttcacaaaatattttactgaggcaggcttgaaagagctttcagaatatgttcggaatcagcaaaccatcggagctcgtaaggagctccagaaagaacttcaagaacagatgtcccgtggtgatccatttaaggatataattttatatgtcaaggaggagatgaaaaaaaacaacatcccagagccagttgtcatcggaatagtctggtcaagtgtaatgagcactgtggaatggaacaaaaaagaggagcttgtagcagagcaagccatcaagcacttgaagcaatacagccctctacttgctgcctttactactcaaggtcagtctgagctgactctgttactgaagattcaggagtattgctatgacaacattcatttcatgaaagccttccagaaaatagtggtgcttttttataaagctgaagtcctgagcgaggagcccattttgaagtggtataaagatgcacatgttgcaaaggggaagagtgttttccttgagcaaatgaaaaagtttgtagaatggctcaaaaatgctgaagaagaatctgaatctgaagctgaagaaggtgactgaattttgaaactacaccctcagtaaagcaaacaggagttgtagataaaatgtcatgtctcatgtgtcctggttcttacatcttcctacctccctgtatcaagcatgatataagggctttcatggcaaattttattttaactgtttctatggttgctggaaatgttgggtttagtttctaaaaccatgttttaagtagctacaggagctatagatttgaatctaatgttgcattagtcttttcagttatcttctacctcctgtattttctactgtaataatgtaatttaaggccttccacaatgaacagttcactttattccctgggttttctataaacagttttaaggatatgatttggttaaaaaataatttgttataaaaattctgtttgcaaattaaactggaaaagtatccagagtctcaaaaggcaatgatttgtgagataatatggcatgcccggagccctgctcatcaatgaaaaacccatatgtaataatcgaattcatttaacatgaatcttgagtacgtggaccattgcttgcatgttaactttttgttttgttttgttttgttttgttttgcatttttaactccagatatcctaaagctcaattgtttggtctctggttttcatccttagagaagccatggagaacagacttgaaaagtttaggaaatcataatgtggcagaggtggtgggaagaagaaagttgagctttttccccttgagaaacttctgcatttagtttctatctttccaggcaaaacaaatgggtattcttttcatacaaccattttcaaatgaaccttagaaaagtcttaacatttaaggtattttatgcacagaatacacttagattgataggaaagaactcgtaatggagtttgagtaaagaaaatgactgatgtactaaacccagtaaaaattgttgaaaatgttaaaggtcagcatgttctaattgggaatctagatatagcttagatttcctattggcttagagtatttgctataacaaatgaagtgcaatgacaattatatattcctactcggtcatactg

SEQ ID NO: 110788 - DNA, 1075 bp, Homo sapiens
  Payload ID: 1733
  Gene Symbol: BZW1
  Gene Name: basic leucine zipper and W2 domains 1
  ENST ID: ENST00000410110
  CDS Start-End: 193-1075
gacttccggtgctggaggagggggccggcggcgagggactccaggaggacgcgtccaacttcgagaccggcgggggccggctccgctcttccaacccctccatgtgtgaagagggcggacgacgcagcgggggaagaaaaataagctagtctaggacaagtgtccaggcgacgtggaacccaggtgtcttttatgaataatcaaaagcagcaaaagccaacgctatcaggccagcgttttaaaactagaaaaagagatgaaaaagagaggtttgaccctactcagtttcaagactgtattattcaaggcttaactgaaaccggtactgatttggaagcagtagctaagtttcttgatgcttctggagcaaaacttgattaccgtcgatatgcagaaacactctttgacattctggtggctggtggaatgctggccccaggtggtacactggcagatgacatgatgcgtacagatgtctgcgtgtttgcagcccaagaagatctagagaccatgcaagcatttgctcaggtttttaacaagttaatcaggcgctacaaatacctggagaaaggttttgaagatgaagtaaaaaagctgctgctgttcttgaagggtttttcagagtcggagaggaacaagctagctatgttgactggtgttcttctggctaatggaacacttaatgcatccattcttaatagcctttataatgaaaatttggttaaagaaggagtttcagcagcttttgctgtgaagctctttaaatcatggataaatgaaaaagatatcaatgcagtagctgcaagtcttcggaaagtcagcatggataacagactgatggaactctttcctgccaataagcaaagtgttgaacacttcacaaaatattttactgaggcaggcttgaaagagctttcagaatatgttcggaatcagcaaaccatcggagctcgtaaggagctccagaaagaacttcaagaacagatgtcccgtggtgatccatttaaggatataattttatatgtcaaggaggagatgaaaaaaaacaacatcccagagccagttgtcatcggaa

SEQ ID NO: 110789 - DNA, 1059 bp, Homo sapiens
  Payload ID: 1733
  Gene Symbol: BZW1
  Gene Name: basic leucine zipper and W2 domains 1
  ENST ID: ENST00000452206
  CDS Start-End: 412-1059
gacttccggtgctggaggagggggccggcggcgagggactccaggaggacgcgtccaacttcgagaccggcgggggccggctccgctcttccaacccctccatgtgtgaagagggcggacgacgcagcgggggaagaaaaataagctagtctaggacaagtgtccaggcgacgtggaacccagtaagggaataaagaagactggaaacgtctctcccctcccctatcccagtccctcaccctaatccgcgcgcaatagaaaaggcggaagcgcctgtccacgatcagggcggggcaaggggaagaaatctcgcgataggagagcggtccgggcgggggtggcacctctccctcctcctggcgttagttccggtcgcagaggagacaccgccgcagttgccgggtgtcttttatgaataatcaaaagcagcaaaagccaacgctatcaggccagcgttttaaaactagaaaaagagatgaaaaagagaggtttgaccctactcagtttcaagactgtattattcaaggcttaactgaaaccggtactgatttggaagcagtagctaagtttcttgatgcttctggagcaaaacttgattaccgtcgatatgcagaaacactctttgacattctggtggctggtggaatgctggccccaggtggtacactggcagatgacatgatgcgtacagatgtctgcgtgtttgcagcccaagaagatctagagaccatgcaagcatttgctcaggtttttaacaagttaatcaggcgctacaaatacctggagaaaggttttgaagatgaagtaaaaaagctgctgctgttcttgaagggtttttcagagtcggagaggaacaagctagctatgttgactggtgttcttctggctaatggaacacttaatgcatccattcttaatagcctttataatgaaaatttggttaaagaaggagtttcagcagcttttgctgtgaagctctttaaatcatggataaatgaaaaagatatcaatgcagtagctgcaagtcttcggaaagtcagcatggataacagactgatg

SEQ ID NO: 110790 - DNA, 557 bp, Homo sapiens
  Payload ID: 1733
  Gene Symbol: BZW1
  Gene Name: basic leucine zipper and W2 domains 1
  ENST ID: ENST00000447069
  CDS Start-End: 209-557
agttttgcaggcctgagtggtgcaaggcggccgctgttgcggtcacaggcatgacctagggtaggatggtgctgcccgtaaccaggcttgtcagaagaaggggttcaccttttgacagtgttttagaattggcatacacattttggatgcctgctgactatggtgataatctctctttgcgttctgcgatgcttagtggtcgtggaagatggtgtcttttatgaataatcaaaagcagcaaaagccaacgctatcaggccagcgttttaaaactagaaaaagagatgaaaaagagaggtttgaccctactcagtttcaagactgtattattcaaggcttaactgaaaccggtactgatttggaagcagtagctaagtttcttgatgcttctggagcaaaacttgattaccgtcgatatgcagaaacactctttgacattctggtggctggtggaatgctggccccaggtggtacactggcagatgacatgatgcgtacagatgtctgcgtgtttgcagcccaagaagatctagagaccatgcaagcatttgctcagg

SEQ ID NO: 110791 - DNA, 1473 bp, Homo sapiens
  Payload ID: 1733
  Gene Symbol: BZW1
  Gene Name: basic leucine zipper and W2 domains 1
  Uniprot ID: Q7L1Q6
  ENST ID: ENST00000452790
  CDS Start-End: 53-1408
accaccgctgcggccgccgcctccgccgctgctttcgctggagggcgggcggatgtacggggcgcctggggccccggcgcaaagcgcctcagtgactgtggtccgctcgttgcggcggccgccaccgcaggcgacaggggtgtcttttatgaataatcaaaagcagcaaaagccaacgctatcaggccagcgttttaaaactagaaaaagagatgaaaaagagaggtttgaccctactcagtttcaagactgtattattcaaggcttaactgaaaccggtactgatttggaagcagtagctaagtttcttgatgcttctggagcaaaacttgattaccgtcgatatgcagaaacactctttgacattctggtggctggtggaatgctggccccaggtggtacactggcagatgacatgatgcgtacagatgtctgcgtgtttgcagcccaagaagatctagagaccatgcaagcatttgctcaggtttttaacaagttaatcaggcgctacaaatacctggagaaaggttttgaagatgaagtaaaaaagctgctgctgttcttgaagggtttttcagagtcggagaggaacaagctagctatgttgactggtgttcttctggctaatggaacacttaatgcatccattcttaatagcctttataatgaaaatttggttaaagaaggagtttcagcagcttttgctgtgaagctctttaaatcatggataaatgaaaaagatatcaatgcagtagctgcaagtcttcggaaagtcagcatggataacagactgatggaactctttcctgccaataagcaaagtgttgaacacttcacaaaatattttactgaggcaggcttgaaagagctttcagaatatgttcggaatcagcaaaccatcggagctcgtaaggagctccagaaagaacttcaagaacagatgtcccgtggtgatccatttaaggatataattttatatgtcaaggaggagatgaaaaaaaacaacatcccagagccagttgtcatcggaatagtctggtcaagtgtaatgagcactgtggaatggaacaaaaaagaggagcttgtagcagagcaagccatcaagcacttgaagcaatacagccctctacttgctgcctttactactcaaggtcagtctgagctgactctgttactgaagattcaggagtattgctatgacaacattcatttcatgaaagccttccagaaaatagtggtgcttttttataaagctgaagtcctgagcgaggagcccattttgaagtggtataaagatgcacatgttgcaaaggggaagagtgttttccttgagcaaatgaaaaagtttgtagaatggctcaaaaatgctgaagaagaatctgaatctgaagctgaagaaggtgactgaattttgaaactacaccctcagtaaagcaaacaggagttgtagataaaatgtcatgtctcatgtgt

SEQ ID NO: 110792 - DNA, 779 bp, Homo sapiens
  Payload ID: 1733
  Gene Symbol: BZW1
  Gene Name: basic leucine zipper and W2 domains 1
  ENST ID: ENST00000359893
  CDS Start-End: 1-407
tcggagctcgtaaggagctccagaaagaacttcaagaacagatgtcccgtggtgatccatttaaggatataattttatatgtcaaggaggagatgaaaaaaaacaacatcccagagccagttgtcatcggaatagtctggtcaagtgtaatgagcactgtggaatggaacaaaaaagaggagcttgtagcagagcaagccatcaagcacttgaagcaatacagccctctacttgctgcctttactactcaagctgaagtcctgagcgaggagcccattttgaagtggtataaagatgcacatgttgcaaaggggaagagtgttttccttgagcaaatgaaaaagtttgtagaatggctcaaaaatgctgaagaagaatctgaatctgaagctgaagaaggtgactgaattttgaaactacaccctcagtaaagcaaacaggagttgtagataaaatgtcatgtctcatgtgtcctggttcttacatcttcctacctccctgtatcaagcatgatataagggctttcatggcaaattttattttaactgtttctatggttgctggaaatgttgggtttagtttctaaaaccatgttttaagtagctacaggagctatagatttgaatctaatgttgcattagtcttttcagttatcttctacctcctgtattttctactgtaataatgtaatttaaggccttccacaatgaacagttcactttattccctgggttttctataaacagttttaaggatatgatttggttaaaaaataattt

SEQ ID NO: 110793 - DNA, 557 bp, Homo sapiens
  Payload ID: 1733
  Gene Symbol: BZW1
  Gene Name: basic leucine zipper and W2 domains 1
  ENST ID: ENST00000419090
  CDS Start-End: 73-557
aatttgaagggtttcttgtagagagaaatgcacattttgacgtacatttgattcaagtgcagggtgtcttttatgaataatcaaaagcagcaaaagccaacgctatcaggccagcgttttaaaactagaaaaagagatgaaaaagagaggtttgaccctactcagtttcaagactgtattattcaaggcttaactgaaaccggtactgatttggaagcagtagctaagtttcttgatgcttctggagcaaaacttgattaccgtcgatatgcagaaacactctttgacattctggtggctggtggaatgctggccccaggtggtacactggcagatgacatgatgcgtacagatgtctgcgtgtttgcagcccaagaagatctagagaccatgcaagcatttgctcaggtttttaacaagttaatcaggcgctacaaatacctggagaaaggttttgaagatgaagtaaaaaagctgctgctgttcttgaagggtttttcagagtcggagaggaacaagctagctatgttgactggtgttcttctggctaatggaac

SEQ ID NO: 110794 - DNA, 578 bp, Homo sapiens
  Payload ID: 1733
  Gene Symbol: BZW1
  Gene Name: basic leucine zipper and W2 domains 1
  ENST ID: ENST00000450637
  CDS Start-End: 115-578
agaaagaaaaggtatcagtacagaaaagaagagtcagaaaataccgtgcaaaggcacattcagaacgtaaccaggatagctggagccaggattcaaggagagagggtgtcttttatgaataatcaaaagcagcaaaagccaacgctatcaggccagcgttttaaaactagaaaaagagatgaaaaagagaggtttgaccctactcagtttcaagactgtattattcaaggcttaactgaaaccggtactgatttggaagcagtagctaagtttcttgatgcttctggagcaaaacttgattaccgtcgatatgcagaaacactctttgacattctggtggctggtggaatgctggccccaggtggtacactggcagatgacatgatgcgtacagatgtctgcgtgtttgcagcccaagaagatctagagaccatgcaagcatttgctcaggtttttaacaagttaatcaggcgctacaaatacctggagaaaggttttgaagatgaagtaaaaaagctgctgctgttcttgaagggtttttcagagtcggagaggaacaagctagctatgttgactgg

SEQ ID NO: 110795 - DNA, 1860 bp, Homo sapiens
  Payload ID: 1734
  Gene Symbol: BZW2
  Gene Name: basic leucine zipper and W2 domains 2
  Uniprot ID: Q9Y6E2
  ENST ID: ENST00000258761
  CDS Start-End: 166-1425
ggcggggctgcgccgggttccgtgtgtctatgtcaatgtgtctgtccttcactcctccattgtctgccgccactgctgctgctgctgctgctgccgctgctgctgcacgaatcgccgcagcccccagccttgcgcgtcgtcgctacctcctcggacagaaattttatgaataagcatcagaagccagtgctaacaggccagcggttcaaaactcggaaaagggatgaaaaagagaaattcgaacccacagtcttcagggatacacttgtccaggggcttaatgaggctggtgatgaccttgaagctgtagccaaatttctggactctacaggctcaagattagattatcgtcgctatgcagacacactcttcgatatcctggtggctggcagtatgcttgcccctggaggaacgcgcatagatgatggtgacaagaccaagatgaccaaccactgtgtgttttcagcaaatgaagatcatgaaaccatccgaaactatgctcaggtcttcaataaactcatcaggagatataagtatttggagaaggcatttgaagatgaaatgaaaaagcttctcctcttccttaaagccttttccgaaacagagcagacaaagttggcgatgctgtcggggattctgctgggcaatggcaccctgcccgccaccatcctcaccagtctcttcaccgacagcttagtcaaagaaggcattgcggcctcatttgctgtcaagcttttcaaagcatggatggcagaaaaagatgccaactctgttacctcgtctttgagaaaagccaacttagacaagaggctgcttgaactctttccagttaacagacagagtgtggatcattttgctaaatacttcactgacgcaggtcttaaggagctttccgacttcctccgagtccagcagtccctgggcaccaggaaggaactgcagaaggagctccaggagcgtctttctcaggaatgcccgatcaaggaggtggtgctttatgtcaaagaagaaatgaagaggaatgatcttccagaaacagcagtgattggtcttctgtggacatgtataatgaacgctgttgagtggaacaagaaggaagaacttgttgcagagcaggctctgaagcacctgaagcaatatgctcccctgctggccgtgttcagctcccaaggccagtcagagctgatcctcctccagaaggttcaggaatactgctacgacaacatccatttcatgaaagcctttcagaagattgtggttctcttttataaagctgatgttctgagcgaagaagcaatactgaaatggtataaggaagcacatgttgctaaaggcaaaagtgtttttcttgaccagatgaagaaatttgttgagtggttacaaaatgcagaagaagaatccgaatcggaaggtgaggaaaattaaatggctcaacaagcacaatacctaggttaccacacaccactttttgattgggaatgctgaaccatttgagaagagaaacttggcttctgttttcgcaaaggaaaaaaaaaataggataggcttcccttgtgcagagggagaaatggttttgtttttgttttgtttttaaatggagccctgaggcatcagctattatacttgggactctacctctcactcactatatgctaacttaaagccattcaacaaggagtcaagtagatctgaaattaaatactcaacagactcctccttttttagctgtatttttcaggtactgtgtggtgaccgccccactggtgtctattacaggccactttggtagttgtgtatctgctcatgtatgtgatttgacaaaccagttttttaaaataaatggctttttaaaaatctggg

SEQ ID NO: 110796 - DNA, 898 bp, Homo sapiens
  Payload ID: 1734
  Gene Symbol: BZW2
  Gene Name: basic leucine zipper and W2 domains 2
  ENST ID: ENST00000407633
  CDS Start-End: 112-789
gtggtaccaggacttagactaatcagtagtcacctggactggataaaaggggacctcttttaggaaggaggcattgcggcctcatttgctgtcaagcttttcaaagcatggatggcagaaaaagatgccaactctgttacctcgtctttgagaaaagccaacttagacaagaggctgcttgaactctttccagttaacagacagagtgtggatcattttgctaaatacttcactgacgcaggtcttaaggagctttccgacttcctccgagtccagcagtccctgggcaccaggaaggaactgcagaaggagctccaggagcgtctttctcaggaatgcccgatcaaggaggtggtgctttatgtcaaagaagaaatgaagaggaatgatcttccagaaacagcagtgattggtcttctgtggacatgtataatgaacgctgttgagtggaacaagaaggaagaacttgttgcagagcaggctctgaagcacctgaagcaatatgctcccctgctggccgtgttcagctcccaaggccagtcagagctgatcctcctccagaaggttcaggaatactgctacgacaacatccatttcatgaaagcctttcagaagattgtggttctcttttataaagctgatgttctgagcgaagaagcaatactgaaatggtataaggaagcacatgttgctaaaggcaaaagtgtttttcttgaccagatgaagaaatttgttgagtggttacaaaatgcagaagaagaatccgaatcggaaggtgaggaaaattaaatggctcaacaagcacaatacctaggttaccacacaccactttttgattgggaatgctgaaccatttgagaagagaaacttggcttctgttttcgcaaaggaaaaaaaa

SEQ ID NO: 110797 - DNA, 1689 bp, Homo sapiens
  Payload ID: 1734
  Gene Symbol: BZW2
  Gene Name: basic leucine zipper and W2 domains 2
  ENST ID: ENST00000405202
  CDS Start-End: 265-1296
tgccgccactgctgctgctgctgctgctgccgctgctgctgcacgaatcgccgcagcccccagccttgcgcgtcgtcgctacctcctcggacagatgaaaaagagaaattcgaacccacagtcttcagggatacacttgtccaggggcttaatgaggctggtgatgaccttgaagctgtagccaaatttctggactctacaggctcaagattagattatcgtcgctatgcagacacactcttcgatatcctggtggctggcagtatgcttgcccctggaggaacgcgcatagatgatggtgacaagaccaagatgaccaaccactgtgtgttttcagcaaatgaagatcatgaaaccatccgaaactatgctcaggtcttcaataaactcatcaggagatataagtatttggagaaggcatttgaagatgaaatgaaaaagcttctcctcttccttaaagccttttccgaaacagagcagacaaagttggcgatgctgtcggggattctgctgggcaatggcaccctgcccgccaccatcctcaccagtctcttcaccgacagcttagtcaaagaaggcattgcggcctcatttgctgtcaagcttttcaaagcatggatggcagaaaaagatgccaactctgttacctcgtctttgagaaaagccaacttagacaagaggctgcttgaactctttccagttaacagacagagtgtggatcattttgctaaatacttcactgacgcaggtcttaaggagctttccgacttcctccgagtccagcagtccctgggcaccaggaaggaactgcagaaggagctccaggagcgtctttctcaggaatgcccgatcaaggaggtggtgctttatgtcaaagaagaaatgaagaggaatgatcttccagaaacagcagtgattggtcttctgtggacatgtataatgaacgctgttgagtggaacaagaaggaagaacttgttgcagagcaggctctgaagcacctgaagcaatatgctcccctgctggccgtgttcagctcccaaggccagtcagagctgatcctcctccagaaggttcaggaatactgctacgacaacatccatttcatgaaagcctttcagaagattgtggttctcttttataaagctgatgttctgagcgaagaagcaatactgaaatggtataaggaagcacatgttgctaaaggcaaaagtgtttttcttgaccagatgaagaaatttgttgagtggttacaaaatgcagaagaagaatccgaatcggaaggtgaggaaaattaaatggctcaacaagcacaatacctaggttaccacacaccactttttgattgggaatgctgaaccatttgagaagagaaacttggcttctgttttcgcaaaggaaaaaaaaaataggataggcttcccttgtgcagagggagaaatggttttgtttttgttttgtttttaaatggagccctgaggcatcagctattatacttgggactctacctctcactcactatatgctaacttaaagccattcaacaaggagtcaagtagatctgaaattaaatactcaacagactcctccttttttagctgtatttttcaggtactgtgtggtgaccgccccactggtgtctattacaggccactttggtagttgtgtatctgctcatgtatgtgatttga

SEQ ID NO: 110798 - DNA, 1784 bp, Homo sapiens
  Payload ID: 1734
  Gene Symbol: BZW2
  Gene Name: basic leucine zipper and W2 domains 2
  ENST ID: ENST00000436868
  CDS Start-End: 123-635
gtccttcactcctccattgtctgccgccactgctgctgctgctgctgctgccgctgctgctgcacgaatcgccgcagcccccagccttgcgcgtcgtcgctacctcctcggacagaaattttatgaataagcatcagaagccagtgctaacaggccagcggttcaaaactcggaaaagggatgaaaaagagaaattcgaacccacagtcttcagggatacacttgtccaggggcttaatgaggctggtgatgaccttgaagctgtagccaaatttctggactctacaggctcaagattagattatcgtcgctatgcagacacactcttcgatatcctggtggctggcagtatgcttgcccctggaggaacgcgcatagatgatggtgacaagaccaagatgaccaaccactgtgtgttttcagcaaatgaagatcatgaaaccatccgaaactatgctcaggtcttcaataaactcatcaggagatataagtatttggagaaggcatttgaagatgaaatgaaaaagccttttccgaaacagagcagacaaagttggcgatgctgtcggggattctgctgggcaatggcaccctgcccgccaccatcctcaccagtctcttcaccgacagcttagtcaaagaaggcattgcggcctcatttgctgtcaagcttttcaaagcatggatggcagaaaaagatgccaactctgttacctcgtctttgagaaaagccaacttagacaagaggctgcttgaactctttccagttaacagacagagtgtggatcattttgctaaatacttcactgacgcaggtcttaaggagctttccgacttcctccgagtccagcagtccctgggcaccaggaaggaactgcagaaggagctccaggagcgtctttctcaggaatgcccgatcaaggaggtggtgctttatgtcaaagaagaaatgaagaggaatgatcttccagaaacagcagtgattggtcttctgtggacatgtataatgaacgctgttgagtggaacaagaaggaagaacttgttgcagagcaggctctgaagcacctgaagcaatatgctcccctgctggccgtgttcagctcccaaggccagtcagagctgatcctcctccagaaggttcaggaatactgctacgacaacatccatttcatgaaagcctttcagaagattgtggttctcttttataaagctgatgttctgagcgaagaagcaatactgaaatggtataaggaagcacatgttgctaaaggcaaaagtgtttttcttgaccagatgaagaaatttgttgagtggttacaaaatgcagaagaagaatccgaatcggaaggtgaggaaaattaaatggctcaacaagcacaatacctaggttaccacacaccactttttgattgggaatgctgaaccatttgagaagagaaacttggcttctgttttcgcaaaggaaaaaaaaaataggataggcttcccttgtgcagagggagaaatggttttgtttttgttttgtttttaaatggagccctgaggcatcagctattatacttgggactctacctctcactcactatatgctaacttaaagccattcaacaaggagtcaagtagatctgaaattaaatactcaacagactcctccttttttagctgtatttttcaggtactgtgtggtgaccgccccactggtgtctattacaggccactttggtagttgtgtatctgctcatgtatgtgatttgacaaaccagttttttaaaataaatggctt

SEQ ID NO: 110799 - DNA, 1862 bp, Homo sapiens
  Payload ID: 1734
  Gene Symbol: BZW2
  Gene Name: basic leucine zipper and W2 domains 2
  Uniprot ID: Q9Y6E2
  ENST ID: ENST00000433922
  CDS Start-End: 179-1438
ggggctgcgccgggttccgtgtgtctatgtcaatgtgtctgtccttcactcctccattgtctgccgccactgctgctgctgctgctgctgccgctgctgctgcacgaatcgccgcagcccccagccttgcgcgtcgtcgctacctcctcggacaggtgagaagcagcccagaaattttatgaataagcatcagaagccagtgctaacaggccagcggttcaaaactcggaaaagggatgaaaaagagaaattcgaacccacagtcttcagggatacacttgtccaggggcttaatgaggctggtgatgaccttgaagctgtagccaaatttctggactctacaggctcaagattagattatcgtcgctatgcagacacactcttcgatatcctggtggctggcagtatgcttgcccctggaggaacgcgcatagatgatggtgacaagaccaagatgaccaaccactgtgtgttttcagcaaatgaagatcatgaaaccatccgaaactatgctcaggtcttcaataaactcatcaggagatataagtatttggagaaggcatttgaagatgaaatgaaaaagcttctcctcttccttaaagccttttccgaaacagagcagacaaagttggcgatgctgtcggggattctgctgggcaatggcaccctgcccgccaccatcctcaccagtctcttcaccgacagcttagtcaaagaaggcattgcggcctcatttgctgtcaagcttttcaaagcatggatggcagaaaaagatgccaactctgttacctcgtctttgagaaaagccaacttagacaagaggctgcttgaactctttccagttaacagacagagtgtggatcattttgctaaatacttcactgacgcaggtcttaaggagctttccgacttcctccgagtccagcagtccctgggcaccaggaaggaactgcagaaggagctccaggagcgtctttctcaggaatgcccgatcaaggaggtggtgctttatgtcaaagaagaaatgaagaggaatgatcttccagaaacagcagtgattggtcttctgtggacatgtataatgaacgctgttgagtggaacaagaaggaagaacttgttgcagagcaggctctgaagcacctgaagcaatatgctcccctgctggccgtgttcagctcccaaggccagtcagagctgatcctcctccagaaggttcaggaatactgctacgacaacatccatttcatgaaagcctttcagaagattgtggttctcttttataaagctgatgttctgagcgaagaagcaatactgaaatggtataaggaagcacatgttgctaaaggcaaaagtgtttttcttgaccagatgaagaaatttgttgagtggttacaaaatgcagaagaagaatccgaatcggaaggtgaggaaaattaaatggctcaacaagcacaatacctaggttaccacacaccactttttgattgggaatgctgaaccatttgagaagagaaacttggcttctgttttcgcaaaggaaaaaaaaaataggataggcttcccttgtgcagagggagaaatggttttgtttttgttttgtttttaaatggagccctgaggcatcagctattatacttgggactctacctctcactcactatatgctaacttaaagccattcaacaaggagtcaagtagatctgaaattaaatactcaacagactcctccttttttagctgtatttttcaggtactgtgtggtgaccgccccactggtgtctattacaggccactttggtagttgtgtatctgctcatgtatgtgatttgacaaaccagttttttaaaataaatggcttttt

SEQ ID NO: 110800 - DNA, 1405 bp, Homo sapiens
  Payload ID: 1734
  Gene Symbol: BZW2
  Gene Name: basic leucine zipper and W2 domains 2
  ENST ID: ENST00000415365
  CDS Start-End: 182-1405
ggcggggctgcgccgggttccgtgtgtctatgtcaatgtgtctgtccttcactcctccattgtctgccgccactgctgctgctgctgctgctgccgctgctgctgcacgaatcgccgcagcccccagccttgcgcgtcgtcgctacctcctcggacaggtgagaagcagcccagaaattttatgaataagcatcagaagccagtgctaacaggccagcggttcaaaactcggaaaagggatgaaaaagagaaattcgaacccacagtcttcagggatacacttgtccaggggcttaatgaggctggtgatgaccttgaagctgtagccaaatttctggactctacaggctcaagattagattatcgtcgctatgcagacacactcttcgatatcctggtggctggcagtatgcttgcccctggaggaacgcgcatagatgatggtgacaagaccaagatgaccaaccactgtgtgttttcagcaaatgaagatcatgaaaccatccgaaactatgctcaggtcttcaataaactcatcaggagatataagtatttggagaaggcatttgaagatgaaatgaaaaagcttctcctcttccttaaagccttttccgaaacagagcagacaaagttggcgatgctgtcggggattctgctgggcaatggcaccctgcccgccaccatcctcaccagtctcttcaccgacagcttagtcaaagaaggcattgcggcctcatttgctgtcaagcttttcaaagcatggatggcagaaaaagatgccaactctgttacctcgtctttgagaaaagccaacttagacaagaggctgcttgaactctttccagttaacagacagagtgtggatcattttgctaaatacttcactgacgcaggtcttaaggagctttccgacttcctccgagtccagcagtccctgggcaccaggaaggaactgcagaaggagctccaggagcgtctttctcaggaatgcccgatcaaggaggtggtgctttatgtcaaagaagaaatgaagaggaatgatcttccagaaacagcagtgattggtcttctgtggacatgtataatgaacgctgttgagtggaacaagaaggaagaacttgttgcagagcaggctctgaagcacctgaagcaatatgctcccctgctggccgtgttcagctcccaaggccagtcagagctgatcctcctccagaaggttcaggaatactgctacgacaacatccatttcatgaaagcctttcagaagattgtggttctcttttataaagctgatgttctgagcgaagaagcaatactgaaatggtataaggaagcacatgttgctaaaggcaaaagtgtttttcttgaccagatgaagaaatttgttgagtggttacaaaatgca

SEQ ID NO: 110801 - DNA, 1711 bp, Homo sapiens
  Payload ID: 1734
  Gene Symbol: BZW2
  Gene Name: basic leucine zipper and W2 domains 2
  ENST ID: ENST00000437745
  CDS Start-End: 153-638
atgtcaatgtgtctgtccttcactcctccattgtctgccgccactgctgctgctgctgctgctgccgctgctgctgcacgaatcgccgcagcccccagccttgcgcgtcgtcgctacctcctcggacaggtgagaagcagcccagaaattttatgaataagcatcagaagccagtgctaacaggccagcggttcaaaactcggaaaagggatgaaaaagagaaattcgaacccacagtcttcagggatacacttgtccaggggcttaatgaggctggtgatgaccttgaagctgtagccaaatttctggactctacaggctcaagattagattatcgtcgctatgcagacacactcttcgatatcctggtggctggcagtatgcttgcccctggaggaacgcgcatagatgatggtgacaagaccaagatgaccaaccactgtgtgttttcagcaaatgaagatcatgaaaccatccgaaactatgctcaggtcttcaataaactcatcaggagatataagtatttggagaaggcatttgaagatgaaatgaaaaaggcattgcggcctcatttgctgtcaagcttttcaaagcatggatggcagaaaaagatgccaactctgttacctcgtctttgagaaaagccaacttagacaagaggctgcttgaactctttccagttaacagacagagtgtggatcattttgctaaatacttcactgacgcaggtcttaaggagctttccgacttcctccgagtccagcagtccctgggcaccaggaaggaactgcagaaggagctccaggagcgtctttctcaggaatgcccgatcaaggaggtggtgctttatgtcaaagaagaaatgaagaggaatgatcttccagaaacagcagtgattggtcttctgtggacatgtataatgaacgctgttgagtggaacaagaaggaagaacttgttgcagagcaggctctgaagcacctgaagcaatatgctcccctgctggccgtgttcagctcccaaggccagtcagagctgatcctcctccagaaggttcaggaatactgctacgacaacatccatttcatgaaagcctttcagaagattgtggttctcttttataaagctgatgttctgagcgaagaagcaatactgaaatggtataaggaagcacatgttgctaaaggcaaaagtgtttttcttgaccagatgaagaaatttgttgagtggttacaaaatgcagaagaagaatccgaatcggaaggtgaggaaaattaaatggctcaacaagcacaatacctaggttaccacacaccactttttgattgggaatgctgaaccatttgagaagagaaacttggcttctgttttcgcaaaggaaaaaaaaaataggataggcttcccttgtgcagagggagaaatggttttgtttttgttttgtttttaaatggagccctgaggcatcagctattatacttgggactctacctctcactcactatatgctaacttaaagccattcaacaaggagtcaagtagatctgaaattaaatactcaacagactcctccttttttagctgtatttttcaggtactgtgtggtgaccgccccactggtgtctattacaggccactttggtagttgtgtatctgctcatgtatgtgatttgacaaaccagttttttaaaataaatggctttttaaaaatctggg

SEQ ID NO: 110802 - DNA, 1464 bp, Homo sapiens
  Payload ID: 1734
  Gene Symbol: BZW2
  Gene Name: basic leucine zipper and W2 domains 2
  ENST ID: ENST00000452975
  CDS Start-End: 471-1040
cattcccttgtagggacaactagaagaaattttatgaataagcatcagaagccagtgctaacaggccagcggttcaaaactcggaaaagggatgaaaaagagaaattcgaacccacagtcttcagggatacacttgtccaggggcttaatgaggctggtgatgaccttgaagctgtagccaaatttctggactctacaggctcaagattagattatcgtcgctatgcagacacactcttcgatatcctggtggctggcagtatgcttgcccctggaggaacgcgcatagatgatggtgacaagaccaagatgaccaaccactgtgtgttttcagcaaatgaagatcatgaaaccatccgaaactatgctcaggtcttcaataaactcatcaggagatataagtatttggagaaggcatttgaagatgaaatgaaaaagccttttccgaaacagagcagacaaagttggcgatgctgtcggggattctgctgggcaatggcaccctgcccgccaccatcctcaccagtctcttcaccgacagcttagtcaaagaaggcattgcggcctcatttgctgtcaagcttttcaaagcatggatggcagaaaaagatgccaactctgttacctcgtctttgagaaaagccaacttagacaagaggctgcttgaactctttccagttaacagacagagtgtggatcattttgctaaatacttcactgacgcaggtcttaaggagctttccgacttcctccgagtccagcagtccctgggcaccaggaaggaactgcagaaggagctccaggagcgtctttctcaggaatgcccgatcaaggaggtggtgctttatgtcaaagaagaaatgaagattgtggttctcttttataaagctgatgttctgagcgaagaagcaatactgaaatggtataaggaagcacatgttgctaaaggcaaaagtgtttttcttgaccagatgaagaaatttgttgagtggttacaaaatgcagaagaagaatccgaatcggaaggtgaggaaaattaaatggctcaacaagcacaatacctaggttaccacacaccactttttgattgggaatgctgaaccatttgagaagagaaacttggcttctgttttcgcaaaggaaaaaaaaaataggataggcttcccttgtgcagagggagaaatggttttgtttttgttttgtttttaaatggagccctgaggcatcagctattatacttgggactctacctctcactcactatatgctaacttaaagccattcaacaaggagtcaagtagatctgaaattaaatactcaacagactcctccttttttagctgtatttttcaggtactgtgtggtgaccgccccactggtgtctattacaggccactttggtagttgtgtatctgctcatgtatgtgatttgacaaaccagttttttaaaataaatggcttttt

SEQ ID NO: 110803 - DNA, 859 bp, Homo sapiens
  Payload ID: 1734
  Gene Symbol: BZW2
  Gene Name: basic leucine zipper and W2 domains 2
  ENST ID: ENST00000446596
  CDS Start-End: 38-859
cagtcattcccttgtagggacaactagaagaaattttatgaataagcatcagaagccagtgctaacaggccagcggttcaaaactcggaaaagggatgaaaaagagaaattcgaacccacagtcttcagggatacacttgtccaggggcttaatgaggctggtgatgaccttgaagctgtagccaaatttctggactctacaggctcaagattagattatcgtcgctatgcagacacactcttcgatatcctggtggctggcagtatgcttgcccctggaggaacgcgcatagatgatggtgacaagaccaagatgaccaaccactgtgtgttttcagcaaatgaagatcatgaaaccatccgaaactatgctcaggtcttcaataaactcatcaggagatataagtatttggagaaggcatttgaagatgaaatgaaaaagcttctcctcttccttaaagccttttccgaaacagagcagacaaagttggcgatgctgtcggggattctgctgggcaatggcaccctgcccgccaccatcctcaccagtctcttcaccgacagcttagtcaaagaaggcattgcggcctcatttgctgtcaagcttttcaaagcatggatggcagaaaaagatgccaactctgttacctcgtctttgagaaaagccaacttagacaagaggctgcttgaactctttccagttaacagacagagtgtggatcattttgctaaatacttcactgacgcaggtcttaaggagctttccgacttcctccgagtccagcagtccctgggcaccaggaaggaactgcagaaggagctccaggagcgtctttctcaggaatgcccgatcaaggag

SEQ ID NO: 110804 - DNA, 674 bp, Homo sapiens
  Payload ID: 1734
  Gene Symbol: BZW2
  Gene Name: basic leucine zipper and W2 domains 2
  ENST ID: ENST00000438834
  CDS Start-End: 49-674
agtttctttccaaaatggagagaactaaagaagagtcccagaaattttatgaataagcatcagaagccagtgctaacaggccagcggttcaaaactcggaaaagggatgaaaaagagaaattcgaacccacagtcttcagggatacacttgtccaggggcttaatgaggctggtgatgaccttgaagctgtagccaaatttctggactctacaggctcaagattagattatcgtcgctatgcagacacactcttcgatatcctggtggctggcagtatgcttgcccctggaggaacgcgcatagatgatggtgacaagaccaagatgaccaaccactgtgtgttttcagcaaatgaagatcatgaaaccatccgaaactatgctcaggtcttcaataaactcatcaggagatataagtatttggagaaggcatttgaagatgaaatgaaaaagcttctcctcttccttaaagccttttccgaaacagagcagacaaagttggcgatgctgtcggggattctgctgggcaatggcaccctgcccgccaccatcctcaccagtctcttcaccgacagcttagtcaaagaaggcattgcggcctcatttgctgtcaagcttttcaaagcatggatggcagaaaaagatgccaactctgttacctcgtctttgagaaa

SEQ ID NO: 110805 - DNA, 617 bp, Homo sapiens
  Payload ID: 1734
  Gene Symbol: BZW2
  Gene Name: basic leucine zipper and W2 domains 2
  ENST ID: ENST00000430000
  CDS Start-End: 130-617
atagtgtagcatgaagagctaaatttagagggaagtggggcctctgctccaaatagtaacagctaaaggatagacactcttggagagcagaatatctttatttagtctgtcaccaccagtggaaattttatgaataagcatcagaagccagtgctaacaggccagcggttcaaaactcggaaaagggatgaaaaagagaaattcgaacccacagtcttcagggatacacttgtccaggggcttaatgaggctggtgatgaccttgaagctgtagccaaatttctggactctacaggctcaagattagattatcgtcgctatgcagacacactcttcgatatcctggtggctggcagtatgcttgcccctggaggaacgcgcatagatgatggtgacaagaccaagatgaccaaccactgtgtgttttcagcaaatgaagatcatgaaaccatccgaaactatgctcaggtcttcaataaactcatcaggagatataagtatttggagaaggcatttgaagatgaaatgaaaaagcttctcctcttccttaaagccttttccgaaacagagcagacaaagttggcgatgctgtcggggattctgctgggcaatggcac

SEQ ID NO: 110806 - DNA, 1721 bp, Homo sapiens
  Payload ID: 1734
  Gene Symbol: BZW2
  Gene Name: basic leucine zipper and W2 domains 2
  ENST ID: ENST00000630952
  CDS Start-End: 163-648
ggggctgcgccgggttccgtgtgtctatgtcaatgtgtctgtccttcactcctccattgtctgccgccactgctgctgctgctgctgctgccgctgctgctgcacgaatcgccgcagcccccagccttgcgcgtcgtcgctacctcctcggacagaaattttatgaataagcatcagaagccagtgctaacaggccagcggttcaaaactcggaaaagggatgaaaaagagaaattcgaacccacagtcttcagggatacacttgtccaggggcttaatgaggctggtgatgaccttgaagctgtagccaaatttctggactctacaggctcaagattagattatcgtcgctatgcagacacactcttcgatatcctggtggctggcagtatgcttgcccctggaggaacgcgcatagatgatggtgacaagaccaagatgaccaaccactgtgtgttttcagcaaatgaagatcatgaaaccatccgaaactatgctcaggtcttcaataaactcatcaggagatataagtatttggagaaggcatttgaagatgaaatgaaaaaggcattgcggcctcatttgctgtcaagcttttcaaagcatggatggcagaaaaagatgccaactctgttacctcgtctttgagaaaagccaacttagacaagaggctgcttgaactctttccagttaacagacagagtgtggatcattttgctaaatacttcactgacgcaggtcttaaggagctttccgacttcctccgagtccagcagtccctgggcaccaggaaggaactgcagaaggagctccaggagcgtctttctcaggaatgcccgatcaaggaggtggtgctttatgtcaaagaagaaatgaagaggaatgatcttccagaaacagcagtgattggtcttctgtggacatgtataatgaacgctgttgagtggaacaagaaggaagaacttgttgcagagcaggctctgaagcacctgaagcaatatgctcccctgctggccgtgttcagctcccaaggccagtcagagctgatcctcctccagaaggttcaggaatactgctacgacaacatccatttcatgaaagcctttcagaagattgtggttctcttttataaagctgatgttctgagcgaagaagcaatactgaaatggtataaggaagcacatgttgctaaaggcaaaagtgtttttcttgaccagatgaagaaatttgttgagtggttacaaaatgcagaagaagaatccgaatcggaaggtgaggaaaattaaatggctcaacaagcacaatacctaggttaccacacaccactttttgattgggaatgctgaaccatttgagaagagaaacttggcttctgttttcgcaaaggaaaaaaaaaataggataggcttcccttgtgcagagggagaaatggttttgtttttgttttgtttttaaatggagccctgaggcatcagctattatacttgggactctacctctcactcactatatgctaacttaaagccattcaacaaggagtcaagtagatctgaaattaaatactcaacagactcctccttttttagctgtatttttcaggtactgtgtggtgaccgccccactggtgtctattacaggccactttggtagttgtgtatctgctcatgtatgtgatttgacaaaccagttttttaaaataaatggctttttaaaaatctggg

SEQ ID NO: 110807 - DNA, 2300 bp, Homo sapiens
  Payload ID: 1735
  Gene Symbol: BLZF1
  Gene Name: basic leucine zipper nuclear factor 1
  Uniprot ID: Q9H2G9
  ENST ID: ENST00000329281
  CDS Start-End: 424-1626
ttgtttaacagctggcccggaagtttaagtgaatatgcggcttgggctccaaaagttgctgtacggtattttattttaaagtagaaatctgtccgcttttcacttacggaggccttacagtgtgtgttctgtgttacttgagtttatacgcactgcagaatttgtttaccctgctcttttggaaacgtattccggaagcgaaaccctgagtaatcggaagtggttaggagtgagagagctgctggatatgcggagggactgggcgggtcggcttccgaatggaagaggtctgtgagaagttaacctggtgataccgatccgaagagcctatcaagtgaagccccctgaaatacggagaataagaatcttagaggttgttcagcagaagtcttggagtgcattttcagtggttaaggtgaaaaaatgactactaaaaatttagaaaccaaagtcaccgttacttcatccccaatccgaggagcaggagatggaatggaaactgaggaaccacctaaatctgttgaagttacctccggagtccaatctagaaagcatcatagtcttcagagtccatggaagaaagcagttccatcagagagcccaggagttcttcagctagggaaaatgctcactgaaaaagcaatggaagttaaagctgtaagaatattagttcccaaagctgctataactcatgatatccccaacaaaaatacaaaggttaagtctctgggacatcataaaggagaattccttggtcagtcagagggagttatagaacctaataaggaactctcagaggtaaagaatgtattggaaaagctcaagaattctgaaagaaggttactacaggacaaagaaggtctttcaaaccagctccgtgtacagacagaggtaaatcgtgagttaaaaaagttactggtggcttctgttggggatgatcttcagtatcactttgaacgtctagcccgtgagaaaaatcagcttattttagaaaatgaagccctaggtcgaaacacagctcagctttctgaacagttagaacgtatgtcaatacagtgtgatgtatggcgaagtaaattccttgcaagcagggtaatggcagatgagttaaccaactcaagagcagctttacagcgtcaaaaccgtgatgcacacggggctatacaagatctcctaagtgaacgggaacagtttcgtcaagaaatgatagctacccagaaattattggaggagctcttagtttccttgcaatggggaagagagcaaacttactcccctagtgtacaaccccacagcacagcagagctagcattaacaaatcacaagttggcaaaagcagtaaattctcatcttctgggaaatgttggcattaacaatcaaaaaaagattccatcaacagttgaattctgcagcaccccagctgagaaaatggctgaaacggttctaagaattttagatccagttacctgcaaagagagttcacctgataatccattttttgagtcttcaccaaccaccttacttgctacaaagaaaaatattggacgatttcatccctatactagatatgaaaatataactttcaattgctgcaatcactgccggggagaactgattgccctttaacagtcaatatgttggaggcatgctaagaataaacaactaaataactgtattagaaaaaaaagaaacttactaaatatcataatctgatgatatgtggtcctgaattggctactagtttaagcaaataaactgtaagtcatttatgggttagttggggaataaatggatatgggctggatattcggtaatatcattaatgaaaagcagattgcagaaatacagtatgatctcagtattttgaaattgtaaatacatgtacagacaaatacttagacagtatgcatactggtgttaacagtcacaatttctgggtgatgaaaatgtaacttgaaaccgctccatttctacaatgcacatttactgtttctgttataataaaagggtatgttagaaaaacaaaaaggaggctgggcatggtggctcatgcctctaatctcagcactttgggaggccaaggtgggcggatcacttgaggtctggagtttgagaccagcctgagcaacatggtgagaccccatctctacaaaaaaaatataaaaattagccaggtgtggtggtgcacacctgtggtcccagctacttgggaggctgaggtgggaaaatcacttgaacctgggagggtgaggttgcagtgagctgagatcatgccactgcactccagcctgggtgacagg

SEQ ID NO: 110808 - DNA, 1295 bp, Homo sapiens
  Payload ID: 1735
  Gene Symbol: BLZF1
  Gene Name: basic leucine zipper nuclear factor 1
  Uniprot ID: Q9H2G9
  ENST ID: ENST00000367807
  CDS Start-End: 424-948
ttgtttaacagctggcccggaagtttaagtgaatatgcggcttgggctccaaaagttgctgtacggtattttattttaaagtagaaatctgtccgcttttcacttacggaggccttacagtgtgtgttctgtgttacttgagtttatacgcactgcagaatttgtttaccctgctcttttggaaacgtattccggaagcgaaaccctgagtaatcggaagtggttaggagtgagagagctgctggatatgcggagggactgggcgggtcggcttccgaatggaagaggtctgtgagaagttaacctggtgataccgatccgaagagcctatcaagtgaagccccctgaaatacggagaataagaatcttagaggttgttcagcagaagtcttggagtgcattttcagtggttaaggtgaaaaaatgactactaaaaatttagaaaccaaagtcaccgttacttcatccccaatccgaggagcaggagatggaatggaaactgaggaaccacctaaatctgttgaagttacctccggagtccaatctagaaagcatcatagtcttcagagtccatggaagaaagcagttccatcagagagcccaggagttcttcagctagggaaaatgctcactgaaaaagcaatggaagttaaagctgtaagaatattagttcccaaagctgctataactcatgatatccccaacaaaaatacaaaggttaagtctctgggacatcataaaggagaattccttggtcagtcagagggagttatagaacctaataaggaactctcagaggtaaagaatgtattggaaaagctcaagaattctgaaagaaggttactacaggacaaagaaggtctttcaaaccagctccgtgtacagacagaggtaagaagagccttaatcgataaaatgagtactactctttacgtctggaccttttaaacgtgcatgttagaaaactacatttctttatgggaatgtcattcatcctagcttgtcagttctctaaaatgcttcctcttaaatttctcattctttctcagttctctagggatactttatattgggaacttatactctaaacctcattgaagatggaggtgtgaggtgctttggacaagaccaccaataagttgtaaaagtaggttacaattataaactgccagaccaaagattgaccaagtcaggcatagtaattgaccagcagtccttgttttaaggatccgtaaattccaagtagttttgcttgtgtatacgggatacttggaataaagagaatggcgatataa

SEQ ID NO: 110809 - DNA, 2749 bp, Homo sapiens
  Payload ID: 1735
  Gene Symbol: BLZF1
  Gene Name: basic leucine zipper nuclear factor 1
  Uniprot ID: Q9H2G9
  ENST ID: ENST00000367808
  CDS Start-End: 424-1626
ttgtttaacagctggcccggaagtttaagtgaatatgcggcttgggctccaaaagttgctgtacggtattttattttaaagtagaaatctgtccgcttttcacttacggaggccttacagtgtgtgttctgtgttacttgagtttatacgcactgcagaatttgtttaccctgctcttttggaaacgtattccggaagcgaaaccctgagtaatcggaagtggttaggagtgagagagctgctggatatgcggagggactgggcgggtcggcttccgaatggaagaggtctgtgagaagttaacctggtgataccgatccgaagagcctatcaagtgaagccccctgaaatacggagaataagaatcttagaggttgttcagcagaagtcttggagtgcattttcagtggttaaggtgaaaaaatgactactaaaaatttagaaaccaaagtcaccgttacttcatccccaatccgaggagcaggagatggaatggaaactgaggaaccacctaaatctgttgaagttacctccggagtccaatctagaaagcatcatagtcttcagagtccatggaagaaagcagttccatcagagagcccaggagttcttcagctagggaaaatgctcactgaaaaagcaatggaagttaaagctgtaagaatattagttcccaaagctgctataactcatgatatccccaacaaaaatacaaaggttaagtctctgggacatcataaaggagaattccttggtcagtcagagggagttatagaacctaataaggaactctcagaggtaaagaatgtattggaaaagctcaagaattctgaaagaaggttactacaggacaaagaaggtctttcaaaccagctccgtgtacagacagaggtaaatcgtgagttaaaaaagttactggtggcttctgttggggatgatcttcagtatcactttgaacgtctagcccgtgagaaaaatcagcttattttagaaaatgaagccctaggtcgaaacacagctcagctttctgaacagttagaacgtatgtcaatacagtgtgatgtatggcgaagtaaattccttgcaagcagggtaatggcagatgagttaaccaactcaagagcagctttacagcgtcaaaaccgtgatgcacacggggctatacaagatctcctaagtgaacgggaacagtttcgtcaagaaatgatagctacccagaaattattggaggagctcttagtttccttgcaatggggaagagagcaaacttactcccctagtgtacaaccccacagcacagcagagctagcattaacaaatcacaagttggcaaaagcagtaaattctcatcttctgggaaatgttggcattaacaatcaaaaaaagattccatcaacagttgaattctgcagcaccccagctgagaaaatggctgaaacggttctaagaattttagatccagttacctgcaaagagagttcacctgataatccattttttgagtcttcaccaaccaccttacttgctacaaagaaaaatattggacgatttcatccctatactagatatgaaaatataactttcaattgctgcaatcactgccggggagaactgattgccctttaacagtcaatatgttggaggcatgctaaggtacttccttattacccaagagtcattattatttgggagctggggttcttacaatgctagaaataatatcacttcctatttacataatgtatacacccaaagatattttatgtactagactccagattaccctttcttaataaatatctcagggtaaggaaagaaagaaactgtatagatatatttaaaatagagaatactttccaagcaatacatgatacttttcctaaaagactctaaaagaaaaagattctgtaactctcttttagcaccaaattattgtttatcttgctggatattttatatgaacagtgttaatttagatgcactaaagcaaaggtaggcaaactacaaccatgagtcaaacatggccacacccattcatgtgctattgtctaagctggttttgcactacaactgcagagttgaatagatgcagcagatcctttacagaaaaagttttctgacctcaattctaaagtaattgtagtagggagctggaggactttctttccctttatggtaattttttgagctacaaaagagccttgcagaaatgggtgaagggattaatcttttaaaaataaatgctatatattaggaaaataaaaaatattttagagccaagttaacaagtacttcagcaaaacatgctagttttatgcaggggattctgtattccaaatggatacaatccgacatatataaaagaaacagattcttaactattgactcttatttagcaaatgcaacagacaagaatatccaacttgatatttataaaaggtagactttttccaaaagtgtataagctcaaagaaaaaatgcaacctgtcaattaatatatactatgtaatatatattattgtgtatttatgattagccatcataaatgcccattgcttggcctttaagaataatcacaaaatatttatattaaattatacaaatttgttgcagaagtgcctgtgagagaaatcttcaaaagacaaacctggtcaaataataataattttaatgtcaatgattttttttgtctgactcatctgagttatatttagttttcaagtggcaataaatttatctaccttcttta

SEQ ID NO: 110810 - DNA, 926 bp, Homo sapiens
  Payload ID: 1735
  Gene Symbol: BLZF1
  Gene Name: basic leucine zipper nuclear factor 1
  ENST ID: ENST00000426663
  CDS Start-End: 177-926
tcggcttccgaatggaagaggtctgtgagaagttaacctggtgataccgatccgaagagcctatcaagtgaagccccctgaaatacggagaataagaatcttagaggtaaatccgaggacaagcaggttgttcagcagaagtcttggagtgcattttcagtggttaaggtgaaaaaatgactactaaaaatttagaaaccaaagtcaccgttacttcatccccaatccgaggagcaggagatggaatggaaactgaggaaccacctaaatctgttgaagttacctccggagtccaatctagaaagcatcatagtcttcagagtccatggaagaaagcagttccatcagagagcccaggagttcttcagctagggaaaatgctcactgaaaaagcaatggaagttaaagctgtaagaatattagttcccaaagctgctataactcatgatatccccaacaaaaatacaaaggttaagtctctgggacatcataaaggagaattccttggtcagtcagagggagttatagaacctaataaggaactctcagaggtaaagaatgtattggaaaagctcaagaattctgaaagaaggttactacaggacaaagaaggtctttcaaaccagctccgtgtacagacagaggtaaatcgtgagttaaaaaagttactggtggcttctgttggggatgatcttcagtatcactttgaacgtctagcccgtgagaaaaatcagcttattttagaaaatgaagccctaggtcgaaacacagctcagctttctgaacagttagaacgtatgtcaatacagtgtgatgtatggcgaagtaaattccttgcaagcagggtaatggcagatgagttaaccaactcaagagcagctttacagcgtcaaaaccgtgatgcacacggggctatacaagatctc

SEQ ID NO: 110811 - DNA, 795 bp, Homo sapiens
  Payload ID: 1735
  Gene Symbol: BLZF1
  Gene Name: basic leucine zipper nuclear factor 1
  ENST ID: ENST00000420531
  CDS Start-End: 413-795
gtttaacagctggcccggaagtttaagtgaatatgcggcttgggctccaaaagttgctgtacggtattttattttaaagtagaaatctgtccgcttttcacttacggaggccttacagtgtgtgttctgtgttacttgagtttatacgcactgcagaatttgtttaccctgctcttttggaaacgtattccggaagcgaaaccctgagtaatcggaagtggttaggagtgagagagctgctggatatgcggagggactgggcgggtcggcttccgaatggaagaggtctgtgagaagttaacctggtgataccgatccgaagagcctatcaagtgaagccccctgaaatacggagaataagaatcttagagcagaagtcttggagtgcattttcagtggttaaggtgaaaaaatgactactaaaaatttagaaaccaaagtcaccgttacttcatccccaatccgaggagcaggagatggaatggaaactgaggaaccacctaaatctgttgaagttacctccggagtccaatctagaaagcatcatagtcttcagagtccatggaagaaagcagttccatcagagagcccaggagttcttcagctagggaaaatgctcactgaaaaagcaatggaagttaaagctgtaagaatattagttcccaaagctgctataactcatgatatccccaacaaaaatacaaaggttaagtctctgggacatcataaaggagaattccttggtcagtcagagggagttatagaacctaataaggaactctcagaggtaaagaa

SEQ ID NO: 110812 - DNA, 980 bp, Homo sapiens
  Payload ID: 1736
  Gene Symbol: BATF
  Gene Name: basic leucine zipper transcription factor, ATF-like
  Uniprot ID: Q16520
  ENST ID: ENST00000286639
  CDS Start-End: 259-636
gagttaccagaaaccacaagagagagagagagcgtgcaagccccaaagcgagcgacatgtccctttggggagcagtccctctgcaccccagagtgaggaggacgcaggggtcagaggtggctacagggcaggcagaggaggcacctgtagggggtggtgggctggtggcccaggagaagtcaggaagggagcccagctggtgacaagagagcccagaggtgcctggggctgagtgtgagagcccggaagatttcagccatgcctcacagctccgacagcagtgactccagcttcagccgctctcctccccctggcaaacaggactcatctgatgatgtgagaagagttcagaggagggagaaaaatcgtattgccgcccagaagagccgacagaggcagacacagaaggccgacaccctgcacctggagagcgaagacctggagaaacagaacgcggctctacgcaaggagatcaagcagctcacagaggaactgaagtacttcacgtcggtgctgaacagccacgagcccctgtgctcggtgctggccgccagcacgccctcgccccccgaggtggtgtacagcgcccacgcattccaccaacctcatgtcagctccccgcgcttccagccctgagcttccgatgcggggagagcagagcctcgggaggggcacacagactgtggcagagctgcgcccatcccgcagaggcccctgtccacctggagacccggagacagaggcctggacaaggagtgaacacgggaactgtcacgactggaagggcgtgaggcctcccagcagtgccgcagcgtttcgaggggcgtgtgctggaccccaccactgtgggttgcaggcccaatgcagaagagtattaagaaagatgctcaagtcccatggcacagagcaaggcgggcagggaacggttatttttctaaataaatgctttaaaagaaaccagtctgacaaggcagtttctc

SEQ ID NO: 110813 - DNA, 361 bp, Homo sapiens
  Payload ID: 1736
  Gene Symbol: BATF
  Gene Name: basic leucine zipper transcription factor, ATF-like
  ENST ID: ENST00000555504
  CDS Start-End: 124-345
aggaggcacctgtagggggtggtgggctggtggcccaggagaagtcaggaagggagcccagctggtgacaagagagcccagaggtgcctggggctgagtgtgagagcccggaagatttcagccatgcctcacagctccgacagcagtgactccagcttcagccgctctcctccccctggcaaacaggactcatctgatgatgtgagaagagttcagaggagggagaaaaatcgtattgccgcccagaagagccgacagaggcagacacagaagagtattaagaaagatgctcaagtcccatggcacagagcaaggcgggcagggaacggttatttttctaaataaatgctttaaaagaaac

SEQ ID NO: 110814 - DNA, 2142 bp, Homo sapiens
  Payload ID: 1737
  Gene Symbol: BATF2
  Gene Name: basic leucine zipper transcription factor, ATF-like 2
  Uniprot ID: Q8N1L9
  ENST ID: ENST00000301887
  CDS Start-End: 132-956
gaaactgaaacttggccctctgggggcggagtggccactggggatttaaagagctgccacttccttaggcctccagagggcactgggaagtcacagctgctgagggaccactctgctcccccgcctaagccatgcacctctgtgggggcaatgggctgctgacccagacagaccccaaggagcaacaaaggcagctgaagaagcagaagaaccgggcagccgcccagcgaagccggcagaagcacacagacaaggcagacgccctgcaccagcagcacgagtctctggaaaaagacaacctcgccctgcggaaggagatccagtccctgcaggccgagctggcgtggtggagccggaccctgcacgtgcatgagcgcctgtgccccatggattgtgcctcctgctcagctccagggctcctgggctgctgggaccaggctgaggggctcctgggccctggcccacagggacaacatggctgccgggagcagctggagctgttccagaccccgggttcctgttacccagctcagccgctctctccaggtccacagcctcatgattctcccagcctcctccagtgccccctgccctcactgtcccttggccccgctgtggttgctgaacctcctgtccagctgtcccccagccctctcctgtttgcctcgcacactggttccagcctgcaggggtcttcctctaagctcagtgccctccagcccagcctcacggcccaaactgcccctccacagcccctcgagctggagcatcccaccagagggaagctggggtcctctcccgacaacccttcctctgccctggggcttgcacgtctgcagagcagggagcacaaacctgctctctcagcagccacttggcaagggctggttgtggatcccagccctcaccctctcctggcctttcctctgctctcctctgctcaagtccacttctaacctggtcttcggagctgggttggccccttctttgggctcaggaagcagccttagcacacgggcctctcctccctcactactgggtgctgccctgcgtggctgaccagctggcccaggatttcacagtcgaaaaggaagccaccactgatgcctcccactgtgacaggccctgtcaccaccaatatcttatttcaacctcacagttgacctgagaaatcgagattatcactccactttttcagacaaggaaactgaggctcagggaagccaagtgacaagtccaaggtcacgaagactttcttggagcccgaaacaccaccctctgctcctccttctcctgtcctggcccaggcatcctaggggctgaaatcctggaaaccgtgggctggtgtgagaaggtttgcatgctcagagcagagaagggctctccccactgcttcgtgattccagggccagagccatgcagtcccagaaaccccaacctagctggggcaggtccagagtccaagccctggtgggtagaggccaagcagaagccctgaagtggactcttgcttcccctagtagtgttttcagtgccaagaagctgaaactgtgagctggagttggggagaggtctggaagaggaccatctgggatttctacagcctgggtacccatagccacaccaaggcttctgggagattctgcagggtcagctttccaggctgttcccaaatagctccctgcctccccactgcccctaaagccacagcagaagagccattcatctcataaacaaaaaggaagaggaaagaatgaggaaggaccctgtgcaaggttatttgcaggcagggatgggcttgtacctgacagcacccacccctgtgtggcccccaggccctcatcaccctcagacccctcctaagcagttccctcattgctctttggactaggctgacagcaggaagagcagggcccatgaccgggtggaagttcagttttggtgtctgcttcaagagggggttttacactctgattccaggacaagcactctgaggcgggtgggggagagaaaccctggctcttcacccaggtttcacacacatgtaaatgaaacactatgttagtatctaacacactcctggatacagaacacaagtcttggcacatatgtgatggaaataaagtgttttgcaatcttttc

SEQ ID NO: 110815 - DNA, 1949 bp, Homo sapiens
  Payload ID: 1737
  Gene Symbol: BATF2
  Gene Name: basic leucine zipper transcription factor, ATF-like 2
  Uniprot ID: Q8N1L9
  ENST ID: ENST00000435842
  CDS Start-End: 196-765
agaaagaaggcgagagagaggagaccggaggtctgagctgcagccactacacaggcctggaattctaccacagggaatttgcagcacgagtctctggaaaaagacaacctcgccctgcggaaggagatccagtccctgcaggccgagctggcgtggtggagccggaccctgcacgtgcatgagcgcctgtgccccatggattgtgcctcctgctcagctccagggctcctgggctgctgggaccaggctgaggggctcctgggccctggcccacagggacaacatggctgccgggagcagctggagctgttccagaccccgggttcctgttacccagctcagccgctctctccaggtccacagcctcatgattctcccagcctcctccagtgccccctgccctcactgtcccttggccccgctgtggttgctgaacctcctgtccagctgtcccccagccctctcctgtttgcctcgcacactggttccagcctgcaggggtcttcctctaagctcagtgccctccagcccagcctcacggcccaaactgcccctccacagcccctcgagctggagcatcccaccagagggaagctggggtcctctcccgacaacccttcctctgccctggggcttgcacgtctgcagagcagggagcacaaacctgctctctcagcagccacttggcaagggctggttgtggatcccagccctcaccctctcctggcctttcctctgctctcctctgctcaagtccacttctaacctggtcttcggagctgggttggccccttctttgggctcaggaagcagccttagcacacgggcctctcctccctcactactgggtgctgccctgcgtggctgaccagctggcccaggatttcacagtcgaaaaggaagccaccactgatgcctcccactgtgacaggccctgtcaccaccaatatcttatttcaacctcacagttgacctgagaaatcgagattatcactccactttttcagacaaggaaactgaggctcagggaagccaagtgacaagtccaaggtcacgaagactttcttggagcccgaaacaccaccctctgctcctccttctcctgtcctggcccaggcatcctaggggctgaaatcctggaaaccgtgggctggtgtgagaaggtttgcatgctcagagcagagaagggctctccccactgcttcgtgattccagggccagagccatgcagtcccagaaaccccaacctagctggggcaggtccagagtccaagccctggtgggtagaggccaagcagaagccctgaagtggactcttgcttcccctagtagtgttttcagtgccaagaagctgaaactgtgagctggagttggggagaggtctggaagaggaccatctgggatttctacagcctgggtacccatagccacaccaaggcttctgggagattctgcagggtcagctttccaggctgttcccaaatagctccctgcctccccactgcccctaaagccacagcagaagagccattcatctcataaacaaaaaggaagaggaaagaatgaggaaggaccctgtgcaaggttatttgcaggcagggatgggcttgtacctgacagcacccacccctgtgtggcccccaggccctcatcaccctcagacccctcctaagcagttccctcattgctctttggactaggctgacagcaggaagagcagggcccatgaccgggtggaagttcagttttggtgtctgcttcaagagggggttttacactctgattccaggacaagcactctgaggcgggtgggggagagaaaccctggctcttcacccaggtttcacacacatgtaaatgaaacactatgttagtatctaacacactcctggatacagaacacaagtcttggcacatatgtgatggaaataaagtgttttgcaatcttt

SEQ ID NO: 110816 - DNA, 1230 bp, Homo sapiens
  Payload ID: 1737
  Gene Symbol: BATF2
  Gene Name: basic leucine zipper transcription factor, ATF-like 2
  ENST ID: ENST00000527716
  CDS Start-End: 133-885
aagaaagaaggcgagagagaggagaccggaggtctgagctgcagccactacacaggcctggaattctaccacagggaatttggtgggtgcctctaaagggctttaacctgcaattaatgacatggttgctgaatggctcctgtgggcaagagaataggtggtttgggggacacacgggttggaggcccgtgcatatcccagcagcacgagtctctggaaaaagacaacctcgccctgcggaaggagatccagtccctgcaggccgagctggcgtggtggagccggaccctgcacgtgcatgagcgcctgtgccccatggattgtgcctcctgctcagctccagggctcctgggctgctgggaccaggctgaggggctcctgggccctggcccacagggacaacatggctgccgggagcagctggagctgttccagaccccgggttcctgttacccagctcagccgctctctccaggtccacagcctcatgattctcccagcctcctccagtgccccctgccctcactgtcccttggccccgctgtggttgctgaacctcctgtccagctgtcccccagccctctcctgtttgcctcgcacactggttccagcctgcaggggtcttcctctaagctcagtgccctccagcccagcctcacggcccaaactgcccctccacagcccctcgagctggagcatcccaccagagggaagctggggtcctctcccgacaacccttcctctgccctggggcttgcacgtctgcagagcagggagcacaaacctgctctctcagcagccacttggcaagggctggttgtggatcccagccctcaccctctcctggcctttcctctgctctcctctgctcaagtccacttctaacctggtcttcggagctgggttggccccttctttgggctcaggaagcagccttagcacacgggcctctcctccctcactactgggtgctgccctgcgtggctgaccagctggcccaggatttcacagtcgaaaaggaagccaccactgatgcctcccactgtgacaggccctgtcaccaccaatatcttatttcaacctcacagttgacctgagaaatcgagattatcactccactttttcagacaaggaaactgaggctcagggaagccaagtgacaagtccaaggtcacgaagactttcttggagcccgaaacaccaccctctgctcctccttctcctgtcctg

SEQ ID NO: 110817 - DNA, 569 bp, Homo sapiens
  Payload ID: 1737
  Gene Symbol: BATF2
  Gene Name: basic leucine zipper transcription factor, ATF-like 2
  ENST ID: ENST00000534177
  CDS Start-End: 105-569
ggagtggccactggggatttaaagagctgccacttccttaggcctccagagggcactgggaagtcacagctgctgagggaccactctgctcccccgcctaagccatgcacctctgtgggggcaatgggctgctgacccagacagaccccaaggagcaacaaaggcagctgaagaagcagaagaaccgggcagccgcccagcgaagccggcagaagcacacagacaaggcagacgccctgcaccagcacgagtctctggaaaaagacaacctcgccctgcggaaggagatccagtccctgcaggccgagctggcgtggtggagccggaccctgcacgtgcatgagcgcctgtgccccatggattgtgcctcctgctcagctccagggctcctgggctgctgggaccaggctgaggggctcctgggccctggcccacagggacaacatggctgccgggagcagctggagctgttccagaccccgggttcctgttacccagctcagccgctctctccaggtccacagcctcatgattctcccagcctcctccagtgccccctgccctcactg

SEQ ID NO: 110818 - DNA, 980 bp, Homo sapiens
  Payload ID: 1738
  Gene Symbol: BATF3
  Gene Name: basic leucine zipper transcription factor, ATF-like 3
  Uniprot ID: Q9NR55
  ENST ID: ENST00000243440
  CDS Start-End: 224-607
ggggcagacgtgggacgggaaggacggctgccgggactggcgcgcggggacactgggccgacgcgtggagtagcggggagagcgggaagcctgagggggcggggccggcgcgaggccgtgggtgcggcacgaggatgccggcggcgggacagcgcccgtaggcagccccacgggcagggcgcgcgggcggggcggggcgggccgggccagaggagcgcccggcatgtcgcaagggctcccggccgccggcagcgtcctgcagaggagcgtcgcggcgcccgggaaccagccgcagccgcagccgcagcagcagagccctgaggatgatgacaggaaggtccgaaggagagaaaaaaaccgagttgctgctcagagaagtcggaagaagcagacccagaaggctgacaagctccatgaggaatatgagagcctggagcaagaaaacaccatgctgcggagagagatcgggaagctgacagaggagctgaagcacctgacagaggcactgaaggagcacgagaagatgtgcccgctgctgctctgccctatgaactttgtgccagtgcctccccggccggaccctgtggccggctgcttgccccgatgaagccggggacactcctctgcccagcaaggagccttggtcattttcatacctgggaggaaggcttttccttcacaattgtatacagggggcacctgtggccaggcctcctcctgggagctccaggaccagccagctgtgttccctgcagactgggctcagcccgacatccaacaggcgccaaactcacagagcccttgtgcagatccagcatggaggccaccctcaggagtgacttctcatccaccctggcagctagtaggttctgctgttatgcagagccatttcctctagaatttggataataaagatgcttattgtctctcccttctccagttctgggaatttacaggcacaatacacttccttttcctgg

SEQ ID NO: 110819 - DNA, 897 bp, Homo sapiens
  Payload ID: 1739
  Gene Symbol: BTF3
  Gene Name: basic transcription factor 3
  Uniprot ID: P20290
  ENST ID: ENST00000335895
  CDS Start-End: 152-640
cttgaaggaagtggccttgtgtcacttccggcctccctttagctgccatcttgcgtccccgcgtgtgtgcgcctaatctcaggtggtccacccgagaccccttgagcaccaaccctagtcccccgcgcggccccttattcgctccgacaagatgaaagaaacaatcatgaaccaggaaaaactcgccaaactgcaggcacaagtgcgcattggtgggaaaggaactgctcgcagaaagaagaaggtggttcatagaacagccacagcagatgacaaaaaacttcagttctccttaaagaagttaggggtaaacaatatctctggtattgaagaggtgaatatgtttacaaaccaaggaacagtgatccactttaacaaccctaaagttcaggcatctctggcagcgaacactttcaccattacaggccatgctgagacaaagcagctgacagaaatgctacccagcatcttaaaccagcttggtgcggatagtctgactagtttaaggagactggccgaagctctgcccaaacaatctgtggatggaaaagcaccacttgctactggagaggatgatgatgatgaagttccagatcttgtggagaattttgatgaggcttccaagaatgaggcaaactgaattgagtcaacttctgaagataaaacctgaagaagttactgggagctgctattttatattatgactgctttttaagaaatttttgtttatggatctgataaaatctagatctctaatatttttaagcccaagccccttggacactgcagctcttttcagtttttgcttatacacaattcattctttgcagctaattaagccgaagaagcctgggaatcaagtttgaaacaaagattaataaagttctttgcctagta

SEQ ID NO: 110820 - DNA, 1237 bp, Homo sapiens
  Payload ID: 1739
  Gene Symbol: BTF3
  Gene Name: basic transcription factor 3
  Uniprot ID: P20290
  ENST ID: ENST00000380591
  CDS Start-End: 220-840
gctgccatcttgcgtccccgcgtgtgtgcgcctaatctcaggtggtccacccgagaccccttgagcaccaaccctagtcccccgcgcggccccttattcgctccgacaaggtacaaaaaggctctggacggcggcgtggtaggaggacgggagcgggggcgggaagttccctgaaggagcgagacagggagggacagggcagaggaggagaggaaggcgatgcgacggacaggcgcacccgctcaggctgactctcgggggcgaggtcgagccaggggcggctgccctgggggcgaggcgacgctgtctcaacctccacctcgcggcggaacccgaggacaggagcctcagatgaaagaaacaatcatgaaccaggaaaaactcgccaaactgcaggcacaagtgcgcattggtgggaaaggaactgctcgcagaaagaagaaggtggttcatagaacagccacagcagatgacaaaaaacttcagttctccttaaagaagttaggggtaaacaatatctctggtattgaagaggtgaatatgtttacaaaccaaggaacagtgatccactttaacaaccctaaagttcaggcatctctggcagcgaacactttcaccattacaggccatgctgagacaaagcagctgacagaaatgctacccagcatcttaaaccagcttggtgcggatagtctgactagtttaaggagactggccgaagctctgcccaaacaatctgtggatggaaaagcaccacttgctactggagaggatgatgatgatgaagttccagatcttgtggagaattttgatgaggcttccaagaatgaggcaaactgaattgagtcaacttctgaagataaaacctgaagaagttactgggagctgctattttatattatgactgctttttaagaaatttttgtttatggatctgataaaatctagatctctaatatttttaagcccaagccccttggacactgcagctcttttcagtttttgcttatacacaattcattctttgcagctaattaagccgaagaagcctgggaatcaagtttgaaacaaagattaataaagttctttgcctagtatacagttttatttttttatttcattgacaccgatctgtacacagtaaaaaaaattgcttatagaaagctaatcatggcatgtaatatggctgataacctttggaatttgattaaagatttaaaatcacggtgtagtgtaa

SEQ ID NO: 110821 - DNA, 377 bp, Homo sapiens
  Payload ID: 1739
  Gene Symbol: BTF3
  Gene Name: basic transcription factor 3
  ENST ID: ENST00000507081
  CDS Start-End: 50-377
tgagcaccaaccctagtcccccgcgcggccccttattcgctccgacaagatgaaagaaacaatcatgaaccaggaaaaactcgccaaactgcaggcacaagtgcgcattggtgggaaagtgaatatgtttacaaaccaaggaacagtgatccactttaacaaccctaaagttcaggcatctctggcagcgaacactttcaccattacaggccatgctgagacaaagcagctgacagaaatgctacccagcatcttaaaccagcttggtgcggatagtctgactagtttaaggagactggccgaagctctgcccaaacaatctgtggatggaaaagcaccacttgctactggagaggatgatgatgatgaagttccag

SEQ ID NO: 110822 - DNA, 515 bp, Homo sapiens
  Payload ID: 1739
  Gene Symbol: BTF3
  Gene Name: basic transcription factor 3
  ENST ID: ENST00000509708
  CDS Start-End: 1-260
gtattgaagaggtgaatatgtttacaaaccaaggaacagtgatccactttaacaaccctaaagttcaggcatctctggcagcgaacactttcaccattacaggccatgctgagacaaagcagctgacagaaatgctacccagcatcttaaaccagcttggtgcggatagtctgactagtttaaggagactggccgaagctctgcccaaacaatatcttgtggagaattttgatgaggcttccaagaatgaggcaaactgaattgagtcaacttctgaagataaaacctgaagaagttactgggagctgctattttatattatgactgctttttaagaaatttttgtttatggatctgataaaatctagatctctaatatttttaagcccaagccccttggacactgcagctcttttcagtttttgcttatacacaattcattctttgcagctaattaagccgaagaagcctgggaatcaagtttgaaacaaagattaataaagttctttgcctag

SEQ ID NO: 110823 - DNA, 4703 bp, Homo sapiens
  Payload ID: 1740
  Gene Symbol: BTF3L4
  Gene Name: basic transcription factor 3-like 4
  Uniprot ID: Q96K17
  ENST ID: ENST00000313334
  CDS Start-End: 269-745
agccccaggatgccgcgcggccacctgcacctgccgccactagcactaagagggatgcgcaaagcaggcggggcgttggagttcagatgttcgctcccgggataggctgccccggagagggagaggcggggtcggctgtatcacgtggatctgctcccgccgccgccgccgccgccgtcgtctttctctgtctcggctgaggcagccatctttctcttgccgcgtgctggtgttggaggaccctccctgcttcagatttaccaacagcatgaatcaagaaaagttagccaaacttcaggctcaggtccggatagggggcaagggtacagctcgcagaaagaagaaggtggtacatagaacagccacagctgatgacaaaaagcttcagagttctctaaaaaaactggctgtgaataatatagctggtattgaagaggtgaacatgattaaagatgatgggacagttattcatttcaacaatcccaaagtccaagcttccctttctgctaatacctttgcaattactggtcatgcagaagccaaaccaatcacagaaatgcttcctggaatattaagtcagcttggtgctgacagtttaacaagccttaggaagttagctgaacagttcccacggcaagtcttggacagtaaagcaccaaaaccagaagacattgatgaggaagatgatgatgttccagatcttgtagaaaattttgatgaggcatcaaagaatgaagctaactaaaagtttggtttttggaagctggcatggactagatttaacaaatcagctatgtggttccaaagttttacagacatggagaacatcacctgttactagttcagtaatataaatattttgtatattaataatgctgtttgttcagcatttttcggtcatttgattttgcattttgcacttcctcccaggatatttttttggtcaaaatatgaagtattggtgcagtttgagggtgttttggtttttgattcctggtttttttgttttttgtttggggtatttttggtgtatgtatgtttatgtatgtgtgtgggtatgtgtgtatacagtggagagcaaattggaaaacagttctatttatcctcctccctccccagtagaaataaaaaaaatctttacatttgttacttttcttttccccccgtaagacacagaattaatggaaagtgagtatcttggatttcaaatctgaagagatttttaccattagtggtttgattttaatttgcttggttaactatcatatttttcatacacttctctggatttaaaatatcttgaggtattttgccactggcttcatgctggagtaatgggtaacatatctttggtatggttgccttagattaacttacctagtcagacccagaagaacttcttttactagcttgcttcctaaatgccttttttcctctccttttggtctccaaatggcctggtcagcttttggtaatattcttcctcatcttccacctagcttgagaaggatgttctccatatagagtttagcgagtgcctaatccctccttttgtaagattttgttccctcagcttgaggaacaacttcatcttcaactttttatttctccctgatgttacagtttggtagatttcaaactggaatagctagcatgtgcttgctaaataattttatgccagccttatcctgtatcctagctgttcttaacagcaggtacaaaaatgcctgtttttcagcaaggttgaaattgggaatgtccttttgaatcagaagaaaataggccatagactcatctcccagcacaaatgggcattctatgaaatggtactggccctaggaggatttcctcaaccactctcctactcttggccttgaacctacctctgggttggatcttactattgtagctgctcactataccctcctgcatgcttagaataatgctttgaggggagcactggtaaaacacagtatttatttttttacctcctttaagaggacttggaggtaagttgcattcattcactcaagtttccctcttgctgtctaatagaagcttactttttgctatatcagcatttgttacagccaatatttaaggacaaaatttagaaaatatatcatttcctggcccatcatcaaactaatacagcttaaccttgcagctaccaacttttgtgtcaagctagatatctttatttgatatctaaggtgcaagaccaacaatatattaagagatctgtagacatgaaggcaaagctcttgtattttttttcatccaaacacctcaatttattttataaattcgttcatttttcctgttatgttttatataatatatggactaaacaaaataaaataacagtgcaaaagaggagaatatttcctcttgtgcttttcttgatgttgtgtacagaatttccttttatattattcctctaccctccacctgtaaatgaatgttagtgcagtaattgtttgaaataatgcctcatccagtgttaggtcagtagctccacagtctacacagtccagaattctttctctaattgtcccaaagggggacattgtggaggcagagttagggggaaccacttcaagtggttagggacagataaataataggcagtatagcacatgaaagaaaacacacacttggaagccaggagacttgtgtcctagtcaaaactctggcattatgtgaccttggacaggtcatctaactactctgaaatttatcatcagtcaaataagattttattctgttttgttttgtttgagatggggatttgctcttgttgtccaggccgaactgcaatgttgtggtctcggctgactgcaacctccacctcccagattcaagcgattctcctgtctcagcctccacagtagctgggattttttttttttttttttgtatttttagtagagatggggttttaccatgttgcccaggccggtcttgaattcctgtcctcaggtgattcatttgcctcggcctcccaaagtgctaggattacaggcgtgagccactgcacccagcccaaatgagatgtttctaaatctaaagtttcttctgcttctgcatttctgtgaatctcatttgaaatttttcagggaagggattttatcatttgttcagagatgtctttatttttattaatacccataaaacgtttgtgtatttgcttcttcctctttctccttttgatcacattttagctacttatctagaggatctctggccaagtattcccttttattgtattgataacaattcttaatggctggcctctcttgtgtacaatgagccaatattcttttttgttctatatttttgtatcttcccctttcctgaacaaagcatatttagagtctcaaagaaatcctctccacaaagacatgttcctccctctggtgtgggtagacatagggtaagagtttggatgaaacttttgtaaattgtagtgttcttggcataaatatgaattaaatctttttttatatttaaataactagttaaatatgtgcttcttactaagattaggtattttttgccaagataacaatgataaaaacattttgggggggaaattgaccttaaaattttgggataattcaagaaatgtctgcagaaaattgatttatgatcttaatttttgtgttagtcctttgaggtttttttgtttttgtttttgttctttgtaaagcgccttatctgttttggacaagtccaaagtaaatggttgggctcttatatctgttttacccttatttttcccattaagtaatggtttaagaatatatcaagcaccttaatttgttgttaagtagctagtgcttacaggattccattaaattcactttaataagcctatgaagttcttatgaaaaacccatatctgcgatatgtttgatttgtttctttgttttaattcagtgtttaaccctaggtatgctacatacccataaataagataccatggtaagagatagtatgttatagtgggaaaagcacaagtttttagatagagatcaattctgctatctacccttacattgtaacctttctgacagggctgctgcggtgcacaacttcgggagccatcacttatttttgttgtgttccagaaggtgtcattttcatagactgcagtgtgaatagtgtcctccattaataatgcaatgatggccttgctctctgagcctcagttttatctataaaatggtacctagaagagtcatgatttcttagaatcccctaaattattaaggtgaaggtagaagatgattaaagcgtgttatctcctaagctatggcttagattttccgaagctcatggttctaggcacagaaagtctccattctacactgcatttcaacctgtgttgaacaacactccagttcagcctgtattgctatgccacatagagtttgcctgaattattatagctttcttaatagttttgtttatgatccactctctccagcccattacacaggagccagctacctaaatttcctatctgagcatgtccttacatttacttccagcatactattcatttgccatagtagagtattaagattatttgattttctttttactttctcgtagtgcccaatgtgtagtttactcaacatcataatatgtaatgtttttcaactacttactgttgaatacaaagttatctcatttaa

SEQ ID NO: 110824 - DNA, 941 bp, Homo sapiens
  Payload ID: 1740
  Gene Symbol: BTF3L4
  Gene Name: basic transcription factor 3-like 4
  ENST ID: ENST00000484036
  CDS Start-End: 73-510
ctgaggcagccatctttctcttgccgcgtgctggtgttggaggaccctccctgcttcagatttaccaacagcatgaatcaagaaaagttagccaaacttcaggctcaggtccggatagggggcaagggtacagctcgcagaaagaagaaggtggtacatagaacagccacagctgatgacaaaaagcttcagagttctctaaaaaaactggctgtgaataatatagctggtattgaagaggtgaacatgattaaagatgatgggacagttattcatttcaacaatcccaaagtccaagcttccctttctgctaatacctttgcaattactggtcatgcagaagccaaaccaatcacagaaatgcttcctggaatattaagtcagcttggtgctgacagtttaacaagccttaggaagttagctgaacagttcccacggcaagtcttggacagtaaagcaccaaaaccagaagacattgatgaggaagatgatgatgttccaggtaagtgacatttccttagacttaagattttaagcatcctgtttatctcctttcagtcattgcatagataacttttaggtttgtgttgattgtaagctcatgaatttaaattgattcacaataatgtggataggatctaatgaaaaacaacgtaagcacccaccttagaacctagaatcagaaattgtcacacaaagctctgctgcctggatttattaaattgaaatcactgtgattataaatttgcatagctattgttataacatttctgtatgaattataattgacatatgaaaatgctattcacctcagtaatttgcatagacaaaagatgaacatttccttaggattactgtcctaagcaaataattaaatcattgttagtaaaatgccaccagttcatttctgcctccttatgttttcaggctaattctggttg

SEQ ID NO: 110825 - DNA, 892 bp, Homo sapiens
  Payload ID: 1740
  Gene Symbol: BTF3L4
  Gene Name: basic transcription factor 3-like 4
  ENST ID: ENST00000477828
  CDS Start-End: 195-359
gttggagttcagatgttcgctcccgggataggctgccccggagagggagaggcggggtcggctgtatcacgtggatctgctcccgccgccgccgccgccgccgtcgtctttctctgtctcggctgaggcagccatctttctcttgccgcgtgctggtgttggaggaccctccctgcttcagatttaccaacagcatgaatcaagaaaagttagccaaacttcaggctcaggtccggatagggggcaaggttttcctcacaaattcttacctgttcttccatgttggtgaatatgaatatcagctttcttattccctgtactttttaaagcctaaggaagaactagttgtgagcaactgaagtctttgattctcttcagctgtggcaccaggctcaaggagaatattctacccatatctctgcccaacacaatctttgcaaaagtgaaagaaagaatagtacttacctcagacctgaagtgggtacagctcgcagaaagaagaaggtggtacatagaacagccacagctgatgacaaaaagcttcagagttctctaaaaaaactggctgtgaataatatagctggtattgaagaggtgaacatgattaaagatgatgggacagttattcatttcaacaatcccaaagtccaagcttccctttctgctaatacctttgcaattactggtcatgcagaagccaaaccaatcacagaaatgcttcctggaatattaagtcagcttggtgctgacagtttaacaagccttaggaagttagctgaacagttcccacggcaagtcttggacagtaaagcaccaaaaccagaagacattgatgaggaagatgatgatgttccagatcttgtagaaaattttgatgaggcatcaaagaatg

SEQ ID NO: 110826 - DNA, 794 bp, Homo sapiens
  Payload ID: 1740
  Gene Symbol: BTF3L4
  Gene Name: basic transcription factor 3-like 4
  Uniprot ID: Q96K17
  ENST ID: ENST00000489308
  CDS Start-End: 123-359
ggatctgctcccgccgccgccgccgccgccgtcgtctttctctgtctcggctgaggcagccatctttctcttgccgcgtgctggtgttggaggaccctccctgcttcagatttaccaacagcatgaatcaagaaaagttagccaaacttcaggctcaggtccggatagggggcaagggtacagctcgcagaaagaagaaggtggtacatagaacagccacagctgatgacaaaaagcttcagagttctctaaaaaaactggctgtgaataatatagctggtattgaagagtcttggacagtaaagcaccaaaaccagaagacattgatgaggaagatgatgatgttccagatcttgtagaaaattttgatgaggcatcaaagaatgaagctaactaaaagtttggtttttggaagctggcatggactagatttaacaaatcagctatgtggttccaaagttttacagacatggagaacatcacctgttactagttcagtaatataaatattttgtatattaataatgctgtttgttcagcatttttcggtcatttgattttgcattttgcacttcctcccaggatatttttttggtcaaaatatgaagtattggtgcagtttgagggtgttttggtttttgattcctggtttttttgttttttgtttggggtatttttggtgtatgtatgtttatgtatgtgtgtgggtatgtgtgtatacagtggagagcaaattggaaaacagttctatttatcctcctccctccccagtagaaataaaaaaaatctttaca

SEQ ID NO: 110827 - DNA, 2159 bp, Homo sapiens
  Payload ID: 1740
  Gene Symbol: BTF3L4
  Gene Name: basic transcription factor 3-like 4
  Uniprot ID: Q96K17
  ENST ID: ENST00000472944
  CDS Start-End: 197-499
gtctttctctgtctcggctgaggcagccatctttctcttgccgcgtgctggtgttggaggaccctccctgcttcagggtacagctcgcagaaagaagaaggtggtacatagaacagccacagctgatgacaaaaagcttcagagttctctaaaaaaactggctgtgaataatatagctggtattgaagaggtgaacatgattaaagatgatgggacagttattcatttcaacaatcccaaagtccaagcttccctttctgctaatacctttgcaattactggtcatgcagaagccaaaccaatcacagaaatgcttcctggaatattaagtcagcttggtgctgacagtttaacaagccttaggaagttagctgaacagttcccacggcaagtcttggacagtaaagcaccaaaaccagaagacattgatgaggaagatgatgatgttccagatcttgtagaaaattttgatgaggcatcaaagaatgaagctaactaaaagtttggtttttggaagctggcatggactagatttaacaaatcagctatgtggttccaaagttttacagacatggagaacatcacctgttactagttcagtaatataaatattttgtatattaataatgctgtttgttcagcatttttcggtcatttgattttgcattttgcacttcctcccaggatatttttttggtcaaaatatgaagtattggtgcagtttgagggtgttttggtttttgattcctggtttttttgttttttgtttggggtatttttggtgtatgtatgtttatgtatgtgtgtgggtatgtgtgtatacagtggagagcaaattggaaaacagttctatttatcctcctccctccccagtagaaataaaaaaaatctttacatttgttacttttcttttccccccgtaagacacagaattaatggaaagtgagtatcttggatttcaaatctgaagagatttttaccattagtggtttgattttaatttgcttggttaactatcatatttttcatacacttctctggatttaaaatatcttgaggtattttgccactggcttcatgctggagtaatgggtaacatatctttggtatggttgccttagattaacttacctagtcagacccagaagaacttcttttactagcttgcttcctaaatgccttttttcctctccttttggtctccaaatggcctggtcagcttttggtaatattcttcctcatcttccacctagcttgagaaggatgttctccatatagagtttagcgagtgcctaatccctccttttgtaagattttgttccctcagcttgaggaacaacttcatcttcaactttttatttctccctgatgttacagtttggtagatttcaaactggaatagctagcatgtgcttgctaaataattttatgccagccttatcctgtatcctagctgttcttaacagcaggtacaaaaatgcctgtttttcagcaaggttgaaattgggaatgtccttttgaatcagaagaaaataggccatagactcatctcccagcacaaatgggcattctatgaaatggtactggccctaggaggatttcctcaaccactctcctactcttggccttgaacctacctctgggttggatcttactattgtagctgctcactataccctcctgcatgcttagaataatgctttgaggggagcactggtaaaacacagtatttatttttttacctcctttaagaggacttggaggtaagttgcattcattcactcaagtttccctcttgctgtctaatagaagcttactttttgctatatcagcatttgttacagccaatatttaaggacaaaatttagaaaatatatcatttcctggcccatcatcaaactaatacagcttaaccttgcagctaccaacttttgtgtcaagctagatatctttatttgatatctaaggtgcaagaccaacaatatattaagagatctgtagacatgaaggcaaagctcttgtattttttttcatccaaacacctcaatttattttataaattcgttcatttttcctgttatgttttatataatatatggactaaacaaaataaaataacagtgcaaaagaggagaatatttcctcttgtgcttttcttg

SEQ ID NO: 110828 - DNA, 3859 bp, Homo sapiens
  Payload ID: 1741
  Gene Symbol: BIVM
  Gene Name: basic, immunoglobulin-like variable motif containing
  Uniprot ID: Q86UB2
  ENST ID: ENST00000257336
  CDS Start-End: 680-2191
agtaacgccttctccaagtggatggcggggtggacacgcgtcccggcgccccgggctccctgggatatgtagttcgcgacaggacgagcggaaatactgccaggattttaccacctctcgcccatttatttacttctcggtcaccgctttcgggggacagataaacaccacagatgcccatcaaaggggcgcacgggtctggaggcgcagctcaggtttttgcgttggtcaccctgccctccgcacgtggagagggcaggcataaagcaccttgaaaggaaggtgctgtcaatgctatccgacgacctgtcgccgggcaccgcagcatcctcgctcgctccgatgggacgagggacgccggccccagggtaacaggaggcgcctcgccggccgcgcgctggatgctgtgatccaggtccggagccgggttccgccgcggccgcagcgacccgaccccacccgacaggccagaggaatcagtttagacttgaaattcagtttttcctgaaactgatcagaagttagtgacaccttgattggatccgtttttctgtcaggagctcattttgcagctctcaagcttttatagcatgctgtaaacaattgtcaaagttgtttatcaagaaacagatagagttgcaacttgtttctagtaatagaaacttttacactgcattcaatgcctaacgttgcagaaacagaaaggtcaaatgattctggaaatggtgagcacaaatctgagagaaagtcacctgaagagaatctacaaggtgctgtaaaatctttctgcacaagtgcctcaggagcacccttgggtcccaaaggagatggtcattatccatggagttgtccagtgactcatacacgggaaaaaatttatgccatctgttcggactatgcctttctcaaccaggcgacctcaatctataaaactccaaatccatcccgctctccttgcctccctgatagtacctctttatctgctggaaataattcatcaagatacattggtatcccgactagtacatcggaaattatctacaatgaagaaaatagcttggaaaacttatccaacagcctgggcaagctacctctcgcatgggaaattgataaatctgaatttgatggggtgaccacaaattcgaaacacaaatcaggcaatgcaaagaaacaagtttccaagagaaaaacttcagataaaaagggaagatatcagaaggaatgtcctcagcattctcctcttgaagatattaaacagcggaaagtattagacctcagacgatggtactgcataagccgaccacagtataagacttcttgtggcatctcttcattaatttcttgttggaatttcttatacagcacaatgggagctggaaaccttccacctattacccaagaagaagctttacatattctgggctttcaacctccatttgaagatattaggtttggtcctttcacggggaatacaacacttatgaggtggtttagacaaattaatgaccacttccatgtaaaaggatgctcttatgttctatataagcctcatgggaagaataaaacagcaggagaaactgcttcaggggccctgtcaaagttaacccgtggattgaaagatgaatcgctggcttatatctatcattgccaaaatcattatttttgtccaattggcttcgaagcaacccctgttaaagctaataaagcattcagcaggggacctctctcaccacaggaagttgaatattggatcttaattggagaatcaagtagaaaacatcctgccattcactgtaaaaaatgggcagatattgttactgatctaaacactcaaaatccagaatacctggatatccggcacttagagaggggactgcagtatagaaaaacaaagaaggttgggggaaatttgcattgcatcatagcattccagagacttaactggcaaagatttggcctttggaactttccatttggaaccattagacaagaatcacaacctccaacacatgcccagggaattgccaaatctgagagtgaagacaatatttccaagaagcagcatgggcgtctgggccggtctttcagtgctagtttccatcaggactcggcatggaaaaagatgtctagtatccatgagagaaggaacagtggttaccagggttacagtgattacgatgggaatgattgactatgcttgctactgaacagctggcattatatatgaaactgctatatacaggactgtataaagacagtagaagattttagtaagcctacattaaataggagcagatcttgtggtataaaaaataaccttgtagttctccagatactaagcttgtatatgattatggtgggtgatttcagatatataagcagataagcacagattattgtcctttcaagttaagagtatataatctggacagaaaatttcacaaaattcaataaaattacaactgttgtctaaataagtgaaacacaaattcacttaatagcatcaagatttgaaatacttaagcatgaagtgacttttataatgactcgatccctagacatttgttacagatagttttatgcctaagaccaagatgtaaagtaccatctgcccttaaaaaaaattggggctgtcaatttctagttttcactcatggttaacacgcatttaaaattatttcatgagtctagtagttctttgatttatagcaggatcttgcttgcctcatttgtttcctggttatgttcttaggattctgactaagaggcaaaagagaaaagactcaagaaactgatcctggagatcgagaccatcctggctaacatggtgaaaccccgtctctactaaacatacaaaaaattagccgggtgtagtggtgggcacctgtagtcctagctactcgagaggctgaggcaggagaatggcgtgaacccgggaggtggagcttgcagtgagcggagatcgcgccactgcactccagcctgggcgacagggcaagactctgtctcaaaaaaaaaaaaaaaaaaaaagacggatccttttttttggtgcaaatgggtgacttagtgcattgattcagatttttaaaatttcttgatgtggtttgtaataatcaaatattgacaagaaccttaggtctcgaaagacttttataagtctagatgacgtttgccttaggggtaaagtaaaagaacaattggcaccttaagtttctatacccaaggttatctgtgaaatgagatctcctgatatttgattgctttctcagtatggagtcatatgttgataacagtactgaagatgcataagaaatgcccaagtcactcagaggacaactacccatattccagactctgagctgtttcctttttaaaaatcatatagacaattagctgtttgaagtgagtattaaatatttcagaagtgtgaatttcatgtatttgagctcctctagttgctgttggtttttcttctgctgccaacctgtgactcacaaatgactaggatctcttgttctttaattttagggtcttgttccaggactcaaatcagtaacttggtgattacaaggtgctgaatgtgttggtaaccatatcgcaatacacctcaaggaaaaggttcagatttttatttttaaaatattttcatttttttcttgaattttatatccgtttgttcactcgtacatgcctagcctacagaaggggatatatattatgaaatggtcatttttctgaagagaatattttgcttgaaatgcaaaggactgaaagagatttgtaggttgttgattttgttacttcatactggaacttttaaaaagatttcatcaaataaagttttgttttctacttttaa

SEQ ID NO: 110829 - DNA, 3198 bp, Homo sapiens
  Payload ID: 1741
  Gene Symbol: BIVM
  Gene Name: basic, immunoglobulin-like variable motif containing
  Uniprot ID: Q86UB2
  ENST ID: ENST00000448849
  CDS Start-End: 683-1528
agtaacgccttctccaagtggatggcggggtggacacgcgtcccggcgccccgggctccctgggatatgtagttcgcgacaggacgagcggaaatactgccaggattttaccacctctcgcccatttatttacttctcggtcaccgctttcgggggacagataaacaccacagatgcccatcaaaggggcgcacgggtctggaggcgcagctcaggtttttgcgttggtcaccctgccctccgcacgtggagagggcaggcataaagcaccttgaaaggaaggtgctgtcaatgctatccgacgacctgtcgccgggcaccgcagcatcctcgctcgctccgatgggacgagggacgccggccccagggtaacaggaggcgcctcgccggccgcgcgctggatgctgtgatccaggtccggagccgggttccgccgcggccgcagcgacccgaccccacccgacaggccagaggcaatgcaaagaaacaagtttccaagagaaaaacttcagataaaaagggaagatatcagaaggaatgtcctcagcattctcctcttgaagatattaaacagcggaaagtattagacctcagacgatggtactgcataagccgaccacagtataagacttcttgtggcatctcttcattaatttcttgttggaatttcttatacagcacaatgggagctggaaaccttccacctattacccaagaagaagctttacatattctgggctttcaacctccatttgaagatattaggtttggtcctttcacggggaatacaacacttatgaggtggtttagacaaattaatgaccacttccatgtaaaaggatgctcttatgttctatataagcctcatgggaagaataaaacagcaggagaaactgcttcaggggccctgtcaaagttaacccgtggattgaaagatgaatcgctggcttatatctatcattgccaaaatcattatttttgtccaattggcttcgaagcaacccctgttaaagctaataaagcattcagcaggggacctctctcaccacaggaagttgaatattggatcttaattggagaatcaagtagaaaacatcctgccattcactgtaaaaaatgggcagatattgttactgatctaaacactcaaaatccagaatacctggatatccggcacttagagaggggactgcagtatagaaaaacaaagaagccaacatttttttcttctcaggttgggggaaatttgcattgcatcatagcattccagagacttaactggcaaagatttggcctttggaactttccatttggaaccattagacaagaatcacaacctccaacacatgcccagggaattgccaaatctgagagtgaagacaatatttccaagaagcagcatgggcgtctgggccggtctttcagtgctagtttccatcaggactcggcatggaaaaagatgtctagtatccatgagagaaggaacagtggttaccagggttacagtgattacgatgggaatgattgactatgcttgctactgaacagctggcattatatatgaaactgctatatacaggactgtataaagacagtagaagattttagtaagcctacattaaataggagcagatcttgtggtataaaaaataaccttgtagttctccagatactaagcttgtatatgattatggtgggtgatttcagatatataagcagataagcacagattattgtcctttcaagttaagagtatataatctggacagaaaatttcacaaaattcaataaaattacaactgttgtctaaataagtgaaacacaaattcacttaatagcatcaagatttgaaatacttaagcatgaagtgacttttataatgactcgatccctagacatttgttacagatagttttatgcctaagaccaagatgtaaagtaccatctgcccttaaaaaaaattggggctgtcaatttctagttttcactcatggttaacacgcatttaaaattatttcatgagtctagtagttctttgatttatagcaggatcttgcttgcctcatttgtttcctggttatgttcttaggattctgactaagaggcaaaagagaaaagactcaagaaactgatcctggagatcgagaccatcctggctaacatggtgaaaccccgtctctactaaacatacaaaaaattagccgggtgtagtggtgggcacctgtagtcctagctactcgagaggctgaggcaggagaatggcgtgaacccgggaggtggagcttgcagtgagcggagatcgcgccactgcactccagcctgggcgacagggcaagactctgtctcaaaaaaaaaaaaaaaaaaaaagacggatccttttttttggtgcaaatgggtgacttagtgcattgattcagatttttaaaatttcttgatgtggtttgtaataatcaaatattgacaagaaccttaggtctcgaaagacttttataagtctagatgacgtttgccttaggggtaaagtaaaagaacaattggcaccttaagtttctatacccaaggttatctgtgaaatgagatctcctgatatttgattgctttctcagtatggagtcatatgttgataacagtactgaagatgcataagaaatgcccaagtcactcagaggacaactacccatattccagactctgagctgtttcctttttaaaaatcatatagacaattagctgtttgaagtgagtattaaatatttcagaagtgtgaatttcatgtatttgagctcctctagttgctgttggtttttcttctgctgccaacctgtgactcacaaatgactaggatctcttgttctttaattttagggtcttgttccaggactcaaatcagtaacttggtgattacaaggtgctgaatgtgttggtaaccatatcgcaatacacctcaaggaaaaggttcagatttttatttttaaaatattttcatttttttcttgaattttatatccgtttgttcactcgtacatgcctagcctacagaaggggatatatattatgaaatggtcatttttctgaagagaatattttgcttgaaatgcaaaggactgaaagagatttgtaggttgttgattttgttacttcatactggaacttttaaaaagatttcatcaaataaagttttgttttctacttttaatt

SEQ ID NO: 110830 - DNA, 1974 bp, Homo sapiens
  Payload ID: 1742
  Gene Symbol: BSG
  Gene Name: basigin (Ok blood group)
  Uniprot ID: P35613
  ENST ID: ENST00000333511
  CDS Start-End: 71-1228
gctttttatagcggccgcgggcggcggcggcagcggttggaggttgtaggaccggcgaggaataggaatcatggcggctgcgctgttcgtgctgctgggattcgcgctgctgggcacccacggagcctccggggctgccggcttcgtccaggcgccgctgtcccagcagaggtgggtggggggcagtgtggagctgcactgcgaggccgtgggcagcccggtgcccgagatccagtggtggtttgaagggcagggtcccaacgacacctgctcccagctctgggacggcgcccggctggaccgcgtccacatccacgccacctaccaccagcacgcggccagcaccatctccatcgacacgctcgtggaggaggacacgggcacttacgagtgccgggccagcaacgacccggatcgcaaccacctgacccgggcgcccagggtcaagtgggtccgcgcccaggcagtcgtgctagtcctggaacccggcacagtcttcactaccgtagaagaccttggctccaagatactcctcacctgctccttgaatgacagcgccacagaggtcacagggcaccgctggctgaaggggggcgtggtgctgaaggaggacgcgctgcccggccagaaaacggagttcaaggtggactccgacgaccagtggggagagtactcctgcgtcttcctccccgagcccatgggcacggccaacatccagctccacgggcctcccagagtgaaggctgtgaagtcgtcagaacacatcaacgagggggagacggccatgctggtctgcaagtcagagtccgtgccacctgtcactgactgggcctggtacaagatcactgactctgaggacaaggccctcatgaacggctccgagagcaggttcttcgtgagttcctcgcagggccggtcagagctacacattgagaacctgaacatggaggccgaccccggccagtaccggtgcaacggcaccagctccaagggctccgaccaggccatcatcacgctccgcgtgcgcagccacctggccgccctctggcccttcctgggcatcgtggctgaggtgctggtgctggtcaccatcatcttcatctacgagaagcgccggaagcccgaggacgtcctggatgatgacgacgccggctctgcacccctgaagagcagcgggcagcaccagaatgacaaaggcaagaacgtccgccagaggaactcttcctgaggcaggtggcccgaggacgctccctgctccacgtctgcgccgccgccggagtccactcccagtgcttgcaagattccaagttctcacctcttaaagaaaacccaccccgtagattcccatcatacacttccttcttttttaaaaaagttgggttttctccattcaggattctgttccttaggtttttttccttctgaagtgtttcacgagagcccgggagctgctgccctgcggccccgtctgtggctttcagcctctgggtctgagtcatggccgggtgggcggcacagccttctccactggccggagtcagtgccaggtccttgccctttgtggaaagtcacaggtcacacgaggggccccgtgtcctgcctgtctgaagccaatgctgtctggttgcgccatttttgtgcttttatgtttaattttatgagggccacgggtctgtgttcgactcagcctcagggacgactctgacctcttggccacagaggactcacttgcccacaccgagggcgaccccgtcacagcctcaagtcactcccaagccccctccttgtctgtgcatccgggggcagctctggagggggtttgctggggaactggcgccatcgccgggactccagaaccgcagaagcctccccagctcacccctggaggacggccggctctctatagcaccagggctcacgtgggaacccccctcccacccaccgccacaataaagatcgcccccacctccaccc

SEQ ID NO: 110831 - DNA, 1616 bp, Homo sapiens
  Payload ID: 1742
  Gene Symbol: BSG
  Gene Name: basigin (Ok blood group)
  Uniprot ID: P35613
  ENST ID: ENST00000353555
  CDS Start-End: 58-867
gccgcgggcggcggcggcagcggttggaggttgtaggaccggcgaggaataggaatcatggcggctgcgctgttcgtgctgctgggattcgcgctgctgggcacccacggagcctccggggctgccggcacagtcttcactaccgtagaagaccttggctccaagatactcctcacctgctccttgaatgacagcgccacagaggtcacagggcaccgctggctgaaggggggcgtggtgctgaaggaggacgcgctgcccggccagaaaacggagttcaaggtggactccgacgaccagtggggagagtactcctgcgtcttcctccccgagcccatgggcacggccaacatccagctccacgggcctcccagagtgaaggctgtgaagtcgtcagaacacatcaacgagggggagacggccatgctggtctgcaagtcagagtccgtgccacctgtcactgactgggcctggtacaagatcactgactctgaggacaaggccctcatgaacggctccgagagcaggttcttcgtgagttcctcgcagggccggtcagagctacacattgagaacctgaacatggaggccgaccccggccagtaccggtgcaacggcaccagctccaagggctccgaccaggccatcatcacgctccgcgtgcgcagccacctggccgccctctggcccttcctgggcatcgtggctgaggtgctggtgctggtcaccatcatcttcatctacgagaagcgccggaagcccgaggacgtcctggatgatgacgacgccggctctgcacccctgaagagcagcgggcagcaccagaatgacaaaggcaagaacgtccgccagaggaactcttcctgaggcaggtggcccgaggacgctccctgctccacgtctgcgccgccgccggagtccactcccagtgcttgcaagattccaagttctcacctcttaaagaaaacccaccccgtagattcccatcatacacttccttcttttttaaaaaagttgggttttctccattcaggattctgttccttaggtttttttccttctgaagtgtttcacgagagcccgggagctgctgccctgcggccccgtctgtggctttcagcctctgggtctgagtcatggccgggtgggcggcacagccttctccactggccggagtcagtgccaggtccttgccctttgtggaaagtcacaggtcacacgaggggccccgtgtcctgcctgtctgaagccaatgctgtctggttgcgccatttttgtgcttttatgtttaattttatgagggccacgggtctgtgttcgactcagcctcagggacgactctgacctcttggccacagaggactcacttgcccacaccgagggcgaccccgtcacagcctcaagtcactcccaagccccctccttgtctgtgcatccgggggcagctctggagggggtttgctggggaactggcgccatcgccgggactccagaaccgcagaagcctccccagctcacccctggaggacggccggctctctatagcaccagggctcacgtgggaacccccctcccacccaccgccacaataaagatcgcccccacctccaccctca

SEQ ID NO: 110832 - DNA, 1605 bp, Homo sapiens
  Payload ID: 1742
  Gene Symbol: BSG
  Gene Name: basigin (Ok blood group)
  Uniprot ID: P35613
  ENST ID: ENST00000346916
  CDS Start-End: 239-856
agttagcccttcgcgttcggcttagtctgcggtcctcttgcattgcgactccgagtttaacttccaacacacactttcaacctccaagagacgcccccacctgtgtcgccccaatagcgacttttctcaccgtggtcgccgcggaacttcaagggtccttcctacccgcgttgctgagagtctgggtttacgcgtcacctcgggcgggacccgatcctccgctcctgaggcccccacaatgaagcagtcggacgcgtctccccaagaaagggtggactccgacgaccagtggggagagtactcctgcgtcttcctccccgagcccatgggcacggccaacatccagctccacgggcctcccagagtgaaggctgtgaagtcgtcagaacacatcaacgagggggagacggccatgctggtctgcaagtcagagtccgtgccacctgtcactgactgggcctggtacaagatcactgactctgaggacaaggccctcatgaacggctccgagagcaggttcttcgtgagttcctcgcagggccggtcagagctacacattgagaacctgaacatggaggccgaccccggccagtaccggtgcaacggcaccagctccaagggctccgaccaggccatcatcacgctccgcgtgcgcagccacctggccgccctctggcccttcctgggcatcgtggctgaggtgctggtgctggtcaccatcatcttcatctacgagaagcgccggaagcccgaggacgtcctggatgatgacgacgccggctctgcacccctgaagagcagcgggcagcaccagaatgacaaaggcaagaacgtccgccagaggaactcttcctgaggcaggtggcccgaggacgctccctgctccacgtctgcgccgccgccggagtccactcccagtgcttgcaagattccaagttctcacctcttaaagaaaacccaccccgtagattcccatcatacacttccttcttttttaaaaaagttgggttttctccattcaggattctgttccttaggtttttttccttctgaagtgtttcacgagagcccgggagctgctgccctgcggccccgtctgtggctttcagcctctgggtctgagtcatggccgggtgggcggcacagccttctccactggccggagtcagtgccaggtccttgccctttgtggaaagtcacaggtcacacgaggggccccgtgtcctgcctgtctgaagccaatgctgtctggttgcgccatttttgtgcttttatgtttaattttatgagggccacgggtctgtgttcgactcagcctcagggacgactctgacctcttggccacagaggactcacttgcccacaccgagggcgaccccgtcacagcctcaagtcactcccaagccccctccttgtctgtgcatccgggggcagctctggagggggtttgctggggaactggcgccatcgccgggactccagaaccgcagaagcctccccagctcacccctggaggacggccggctctctatagcaccagggctcacgtgggaacccccctcccacccaccgccacaataaagatcgcccccacctccaccctca

SEQ ID NO: 110833 - DNA, 545 bp, Homo sapiens
  Payload ID: 1742
  Gene Symbol: BSG
  Gene Name: basigin (Ok blood group)
  ENST ID: ENST00000573216
  CDS Start-End: 64-545
atagcggccgcgggcggcggcggcagcggttggaggttgtaggaccggcgaggaataggaatcatggcggctgcgctgttcgtgctgctgggattcgcgctgctgggcacccacggagcctccggggctgaagaccttggctccaagatactcctcacctgctccttgaatgacagcgccacagaggtcacagggcaccgctggctgaaggggggcgtggtgctgaaggaggacgcgctgcccggccagaaaacggagttcaaggtggactccgacgaccagtggggagagtactcctgcgtcttcctccccgagcccatgggcacggccaacatccagctccacgggcctcccagagtgaaggctgtgaagtcgtcagaacacatcaacgagggggagacggccatgctggtctgcaagtcagagtccgtgccacctgtcactgactgggcctggtacaagatcactgactctgaggacaaggccctcatgaacggctccgagagcaggttcttcgtgagttcctcgcagggccggtcagagct

SEQ ID NO: 110834 - DNA, 559 bp, Homo sapiens
  Payload ID: 1742
  Gene Symbol: BSG
  Gene Name: basigin (Ok blood group)
  ENST ID: ENST00000573784
  CDS Start-End: 307-559
gtgcatttgtgcaggagactgagaagggtttcttctgagcagaaagcttagcctggggcttactggccagagctgcctgcagcctgggaagcagccggcacagtcttcactaccgtagaagaccttggctccaagatactcctcacctgctccttgaatgacagcgccacagaggtcacagggcaccgctggctgaaggggggcgtggtgctgaaggaggacgcgctgcccggccagaaaacggagttcaaggtggactccgacgaccagtggggagagtactcctgcgtcttcctccccgagcccatgggcacggccaacatccagctccacgggcctcccagagtgaaggctgtgaagtcgtcagaacacatcaacgagggggagacggccatgctggtctgcaagtcagagtccgtgccacctgtcactgactgggcctggtacaagatcactgactctgaggacaaggccctcatgaacggctccgagagcaggttcttcgtgagttcctcgcagggccggtcagagctacacattgagaacctgaacatggagg

SEQ ID NO: 110835 - DNA, 544 bp, Homo sapiens
  Payload ID: 1742
  Gene Symbol: BSG
  Gene Name: basigin (Ok blood group)
  ENST ID: ENST00000576984
  CDS Start-End: 387-544
gaaaccccacttttgctggggactgactcgtgaagaccacaaggtctgggcaacacagccttggcccgtgtggggtggacactgctgtttgctctgtgaattcgtgactgtgtttgcctctcctgaaacttgcttcaggggcgtctgcgggttggtggggcacagccgggtgggccggcacagtcttcactaccgtagaagaccttggctccaagatactcctcacctgctccttgaatgacagcgccacagaggtcacagggcaccgctggctgaaggggggcgtggtgctgaaggaggacgcgctgcccggccagaaaacggagttcaaggtggactccgacgaccagtggggagagtactcctgcgtcttcctccccgagcccatgggcacggccaacatccagctccacgggcctcccagagtgaaggctgtgaagtcgtcagaacacatcaacgagggggagacggccatgctggtctgcaagtcagagtccgtgccacctgtcactgactgggcctggtacaagatcactgactctga

SEQ ID NO: 110836 - DNA, 1795 bp, Homo sapiens
  Payload ID: 1742
  Gene Symbol: BSG
  Gene Name: basigin (Ok blood group)
  Uniprot ID: P35613
  ENST ID: ENST00000545507
  CDS Start-End: 516-1046
cccgccagtgtagccacattcctgcccctttccagttagcccttcgcgttcggcttagtctgcggtcctcttgcattgcgactccgagtttaacttccaacacacactttcaacctccaagagacgcccccacctgtgtcgccccaatagcgacttttctcaccgtggtcgccgcggaacttcaagggtccttcctacccgcgttgctgagagtctgggtttacgcgtcacctcgggcgggacccgatcctccgctcctgaggcccccacaatgaagcagtcggacgcgtctccccaagaaagccggcacagtcttcactaccgtagaagaccttggctccaagatactcctcacctgctccttgaatgacagcgccacagaggtcacagggcaccgctggctgaaggggggcgtggtgctgaaggaggacgcgctgcccggccagaaaacggagttcaaggtggactccgacgaccagtggggagagtactcctgcgtcttcctccccgagcccatgggcacggccaacatccagctccacgggcctcccagagtgaaggctgtgaagtcgtcagaacacatcaacgagggggagacggccatgctggtctgcaagtcagagtccgtgccacctgtcactgactgggcctggtacaagatcactgactctgaggacaaggccctcatgaacggctccgagagcaggttcttcgtgagttcctcgcagggccggtcagagctacacattgagaacctgaacatggaggccgaccccggccagtaccggtgcaacggcaccagctccaagggctccgaccaggccatcatcacgctccgcgtgcgcagccacctggccgccctctggcccttcctgggcatcgtggctgaggtgctggtgctggtcaccatcatcttcatctacgagaagcgccggaagcccgaggacgtcctggatgatgacgacgccggctctgcacccctgaagagcagcgggcagcaccagaatgacaaaggcaagaacgtccgccagaggaactcttcctgaggcaggtggcccgaggacgctccctgctccacgtctgcgccgccgccggagtccactcccagtgcttgcaagattccaagttctcacctcttaaagaaaacccaccccgtagattcccatcatacacttccttcttttttaaaaaagttgggttttctccattcaggattctgttccttaggtttttttccttctgaagtgtttcacgagagcccgggagctgctgccctgcggccccgtctgtggctttcagcctctgggtctgagtcatggccgggtgggcggcacagccttctccactggccggagtcagtgccaggtccttgccctttgtggaaagtcacaggtcacacgaggggccccgtgtcctgcctgtctgaagccaatgctgtctggttgcgccatttttgtgcttttatgtttaattttatgagggccacgggtctgtgttcgactcagcctcagggacgactctgacctcttggccacagaggactcacttgcccacaccgagggcgaccccgtcacagcctcaagtcactcccaagccccctccttgtctgtgcatccgggggcagctctggagggggtttgctggggaactggcgccatcgccgggactccagaaccgcagaagcctccccagctcacccctggaggacggccggctctctatagcaccagggctcacgtgggaacccccctcccacccaccgccacaataaagatcgcccccacctccaccctca

SEQ ID NO: 110837 - DNA, 1329 bp, Homo sapiens
  Payload ID: 1742
  Gene Symbol: BSG
  Gene Name: basigin (Ok blood group)
  ENST ID: ENST00000618006
  CDS Start-End: 17-586
gcgaggaataggaatcatggcggctgcgctgttcgtgctgctgggattcgcgctgctgggcacccacggagcctccggggctgggcctcccagagtgaaggctgtgaagtcgtcagaacacatcaacgagggggagacggccatgctggtctgcaagtcagagtccgtgccacctgtcactgactgggcctggtacaagatcactgactctgaggacaaggccctcatgaacggctccgagagcaggttcttcgtgagttcctcgcagggccggtcagagctacacattgagaacctgaacatggaggccgaccccggccagtaccggtgcaacggcaccagctccaagggctccgaccaggccatcatcacgctccgcgtgcgcagccacctggccgccctctggcccttcctgggcatcgtggctgaggtgctggtgctggtcaccatcatcttcatctacgagaagcgccggaagcccgaggacgtcctggatgatgacgacgccggctctgcacccctgaagagcagcgggcagcaccagaatgacaaaggcaagaacgtccgccagaggaactcttcctgaggcaggtggcccgaggacgctccctgctccacgtctgcgccgccgccggagtccactcccagtgcttgcaagattccaagttctcacctcttaaagaaaacccaccccgtagattcccatcatacacttccttcttttttaaaaaagttgggttttctccattcaggattctgttccttaggtttttttccttctgaagtgtttcacgagagcccgggagctgctgccctgcggccccgtctgtggctttcagcctctgggtctgagtcatggccgggtgggcggcacagccttctccactggccggagtcagtgccaggtccttgccctttgtggaaagtcacaggtcacacgaggggccccgtgtcctgcctgtctgaagccaatgctgtctggttgcgccatttttgtgcttttatgtttaattttatgagggccacgggtctgtgttcgactcagcctcagggacgactctgacctcttggccacagaggactcacttgcccacaccgagggcgaccccgtcacagcctcaagtcactcccaagccccctccttgtctgtgcatccgggggcagctctggagggggtttgctggggaactggcgccatcgccgggactccagaaccgcagaagcctccccagctcacccctggaggacggccggctctctatagcaccagggctcacgtgggaacccccctcccacccaccgccacaataaagatcgcccccacctcca

SEQ ID NO: 110838 - DNA, 960 bp, Homo sapiens
  Payload ID: 1742
  Gene Symbol: BSG
  Gene Name: basigin (Ok blood group)
  ENST ID: ENST00000614867
  CDS Start-End: 13-180
ggaataggaatcatggcggctgcgctgttcgtgctgctgggattcgcgctgctgggcacccacggagcctccggggctgccggcacagtcttcactaccgtagaagaccttggctccaagatactcctcacctgctccttgaatgacagcgccacagagcagcgggcagcaccagaatgacaaaggcaagaacgtccgccagaggaactcttcctgaggcaggtggcccgaggacgctccctgctccacgtctgcgccgccgccggagtccactcccagtgcttgcaagattccaagttctcacctcttaaagaaaacccaccccgtagattcccatcatacacttccttcttttttaaaaaagttgggttttctccattcaggattctgttccttaggtttttttccttctgaagtgtttcacgagagcccgggagctgctgccctgcggccccgtctgtggctttcagcctctgggtctgagtcatggccgggtgggcggcacagccttctccactggccggagtcagtgccaggtccttgccctttgtggaaagtcacaggtcacacgaggggccccgtgtcctgcctgtctgaagccaatgctgtctggttgcgccatttttgtgcttttatgtttaattttatgagggccacgggtctgtgttcgactcagcctcagggacgactctgacctcttggccacagaggactcacttgcccacaccgagggcgaccccgtcacagcctcaagtcactcccaagccccctccttgtctgtgcatccgggggcagctctggagggggtttgctggggaactggcgccatcgccgggactccagaaccgcagaagcctccccagctcacccctggaggacggccggctctctatagcaccagggctcacgtgggaacccccctcccacccaccgccacaataaagatcgcccccacctcca

SEQ ID NO: 110839 - DNA, 689 bp, Homo sapiens
  Payload ID: 1742
  Gene Symbol: BSG
  Gene Name: basigin (Ok blood group)
  ENST ID: ENST00000613627
  CDS Start-End: 26-689
gtaggaccggcgaggaataggaatcatggcggctgcgctgttcgtgctgctgggattcgcgctgctgggcacccacggagcctccggggctgtcttcactaccgtagaagaccttggctccaagatactcctcacctgctccttgaatgacagcgccacagaggtcacagggcaccgctggctgaaggggggcgtggtgctgaaggaggacgcgctgcccggccagaaaacggagttcaaggtggactccgacgaccagtggggagagtactcctgcgtcttcctccccgagcccatgggcacggccaacatccagctccacgggcctcccagagtgaaggctgtgaagtcgtcagaacacatcaacgagggggagacggccatgctggtctgcaagtcagagtccgtgccacctgtcactgactgggcctggtacaagatcactgactctgaggacaaggccctcatgaacggctccgagagcaggttcttcgtgagttcctcgcagggccggtcagagctacacattgagaacctgaacatggaggccgaccccggccagtaccggtgcaacggcaccagctccaagggctccgaccaggccatcatcacgctccgcgtgcgcagccacctggccgccctctggcccttcctgggcatcgtggctgaggtgctggtgctggtcacca

SEQ ID NO: 110840 - DNA, 4610 bp, Homo sapiens
  Payload ID: 1743
  Gene Symbol: BNC1
  Gene Name: basonuclin 1
  Uniprot ID: Q01954
  ENST ID: ENST00000345382
  CDS Start-End: 87-3071
ggcgggggcggccatcgtgctgcgcagcctgggcgcttggggagccgcccacttcgccgggtcgcgccccgacggccggagcgtggatgcggcggcgcccgccgagccggggcggacgcggggcggcccgggcccgggagacgcgccggcagccccggcaccgcagcggtcgcaggatggccgaggctatcagctgtactctgaactgtagttgccaaagtttcaaacccgggaaaataaaccaccgtcagtgtgaccaatgcaagcatggatgggtggcccacgctctaagtaagctaaggatcccccccatgtatccaacaagccaggtggagattgtccagtccaatgtagtgtttgatattagcagcctcatgctctatgggacccaggccatccccgttcgcctaaaaatcctactggaccggctcttcagtgtgttgaagcaagatgaggttctccagatcctccatgccttggactggacacttcaggattatatccgtggatacgtactgcaggatgcatcaggaaaggtgttggatcactggagcatcatgaccagtgaggaagaagtggccaccttgcagcagttccttcgttttggagagaccaaatctatagttgaactcatggcaattcaagagaaagaagagcaatccatcatcataccaccttccacagcaaatgtagatatcagggctttcatcgagagctgcagtcacaggagttctagcctccccactcctgtggacaaaggaaaccccagcagtatacacccctttgagaacctcataagcaacatgactttcatgctgcctttccagttcttcaaccctctgcctcctgcactgatagggtcattgcccgaacaatatatgttggagcagggtcatgaccaaagtcaggaccccaaacaggaagtccatgggcccttccctgacagcagcttcttaacttccagttccacaccatttcaggttgaaaaagatcagtgtttaaactgtccggatgctattactaaaaaagaagacagcacccatttaagtgactccagctcatacaacattgtcactaagtttgaaaggacacagttatcccctgaggccaaagtgaagcctgagaggaatagccttggtacaaagaagggccgggtgttctgcactgcatgtgagaagaccttctatgacaaaggcaccctcaaaatccactacaatgccgtccacttgaagatcaagcataagtgcaccatcgaagggtgtaacatggtgttcagctccctaaggagccggaatcgccatagcgccaaccccaaccctcggctgcacatgccaatgaacagaaataaccgggacaaagacctcaggaacagcctgaacctggccagctctgagaactacaagtgcccaggtttcacagtgacgtccccagactgtaggcctcctcccagctaccctggttcaggagaggattccaaaggccaaccagccttcccaaacattgggcaaaatggtgtgctttttcccaacctaaagacagtccagccagtccttcctttctaccgcagtccagccacgcctgccgaggtagcaaacacgcctgggatactcccttccctcccgctgttgtcctcttcaatcccagaacagctcatttcaaacgaaatgccatttgatgcccttcccaagaagaaatccaggaagtccagtatgcctatcaaaatagagaaagaagctgtggaaatagctaatgagaaaagacacaacctcagctcagatgaagacatgcccctacaggtggtcagtgaagatgagcaggaggcctgcagtcctcagtcacacagagtatctgaggagcagcatgtacagtcaggaggcttagggaagcctttccctgaaggggagaggccctgccatcgtgaatcagtaattgagtccagtggagccatcagccaaacccctgagcaggccacacacaattcagagagggagactgagcagacaccagcattgatcatggtgccaagggaggtcgaggatggtggccatgaacactacttcacacctgggatggaaccccaagttcctttttctgactacatggaactgcagcagcgcctgctggctgggggactcttcagtgctttgtccaacaggggaatggcttttccttgtcttgaagattctaaagaactggagcacgtgggtcagcatgcattagcaaggcagatagaagaaaatcgcttccagtgtgacatctgcaagaagacctttaaaaatgcttgtagtgtgaaaattcatcacaagaatatgcatgtcaaagaaatgcacacatgcacagtggagggctgtaatgctacctttccctcccgcaggagcagagacagacacagctcaaacctaaacctccaccaaaaagcattgagccaggaagcattggagagtagtgaagatcatttccgtgcagcttaccttctgaaagatgtggctaaggaagcctatcaggatgtggcttttacacagcaagcctcccagacatctgtcatcttcaaaggaacaagtcgaatgggcagtctggtttacccaataacgcaagtccacagtgccagcctggagagctacaactctggccccttgagcgagggcaccatcctggatttgagcactacctcgagcatgaagtcagagagtagcagccattcttcctgggactctgacggggtgagtgaggaaggcactgtgcttatggaggacagtgatgggaactgtgaagggtcgagccttgtccctggggaagatgagtaccccatctgtgtcctgatggagaaggctgaccagagccttgctagcctgccttctgggttgcccataacctgtcatctctgccaaaagacatacagtaacaaagggacctttagggcccactacaaaactgtgcacctccggcagctccacaaatgcaaagtaccaggctgcaacaccatgttttcgtctgttcgcagtcgaaacagacacagccagaatcccaacctgcacaaaagcctggcctcatctccaagtcacctccagtaacaagatggcaaaccaagtatgctcagataagcttttttcataattcaggaataaagtagtccatagaaatgtttctgtttcatatcatttggggcgagtcaggcaaaagtatttgatttgactttatagttttccacagcacaatgagcaaaagacaaacctcgtgggaagatgacactggggcagcccttcctattatttttcttagcccaagaggtctttcactgatacaaggaaaacttgcagaaatgtgatttttcccagatttgtttacatgttccctgggacagatccaggtctgcagatcgacaccagtgggcccaggacctgggggtggctttaaatgaggcttgcagtgttaaaggtcttggataagaagggtcctggggaagaagactctgtggacaagataccagtccccaaaacagcattttcagttccttcttcaattagtttgaaatccagacctgagtttggaagactgattttttgagaccatccctgtgtttggagtggataattgtccctcccctcagccctgcaccagaggtctcatatgttaccccagggagttctcagaggattgggttggcctctaacatgttccttgttaattcttgttctgtaacatgcattcaagaagctaggggaaaaatatctcatgcacttaaataatggtcttcaatttaatttaaaaatattttgacaatatttaatttgtgcttatgtggtgtttggtgtgagtgcagatattgcactgtgtcacctctggatctctgctcagaagcagaacaagtgatgacctaaatgtcaaaatcactgctcgttttcatttggtgaacttcaaactctgttctttttggtcacctgtggaatgaatgcaagcatgattttggcaggaacatttgtacatattctgccgtagataatgtggttctgatggttgttgtgtattttcagtatcactggatccctcagtcttcaccgttttataaacgtataagattaggatgaacttttgaatttacttggtaggaaaaaaagtaggacattattgccatattgtatgtcttaatatttaacttattcggaaatatattccacactgttacatacattttccatggtagaaaggaagttcagtcagtcctgtggaatgaaaccatctcctaaaattcagcatttgcagcattctaaaagcctgtgtaggtacaaggacattgattttgtattcagaattcaagttaactatcttttaaattcgtggttgatgtaagtaataaaaaacattcttaaagttgagggttataagagagattatttctgtggtctaaaggttaaaaagccaacaacctgttaccaattatttcagctttttttgttttaataagtgtgacaacttaaaacttgtttctatttaaagtgaaatgtatctttcaactgtttagttacccagctgtttaatattccagtcttcccaaagtgaaaagatttgtatacaaatgttttctatgatttaataaaaatatatggcacacc

SEQ ID NO: 110841 - DNA, 3169 bp, Homo sapiens
  Payload ID: 1743
  Gene Symbol: BNC1
  Gene Name: basonuclin 1
  ENST ID: ENST00000569704
  CDS Start-End: 108-3071
gccggagttcctcgggatttgtcagccagatgtgacaagattgtggcgaggcgagtgaaggagatctgatattaatcagcgcgtagctccgagccaaactttcacaaatgcggtgtagaaacatgttcttctcatttaaggcatctctttgtggctgcggggctgccaccgctccgagtctgacagctatcagctgtactctgaactgtagttgccaaagtttcaaacccgggaaaataaaccaccgtcagtgtgaccaatgcaagcatggatgggtggcccacgctctaagtaagctaaggatcccccccatgtatccaacaagccaggtggagattgtccagtccaatgtagtgtttgatattagcagcctcatgctctatgggacccaggccatccccgttcgcctaaaaatcctactggaccggctcttcagtgtgttgaagcaagatgaggttctccagatcctccatgccttggactggacacttcaggattatatccgtggatacgtactgcaggatgcatcaggaaaggtgttggatcactggagcatcatgaccagtgaggaagaagtggccaccttgcagcagttccttcgttttggagagaccaaatctatagttgaactcatggcaattcaagagaaagaagagcaatccatcatcataccaccttccacagcaaatgtagatatcagggctttcatcgagagctgcagtcacaggagttctagcctccccactcctgtggacaaaggaaaccccagcagtatacacccctttgagaacctcataagcaacatgactttcatgctgcctttccagttcttcaaccctctgcctcctgcactgatagggtcattgcccgaacaatatatgttggagcagggtcatgaccaaagtcaggaccccaaacaggaagtccatgggcccttccctgacagcagcttcttaacttccagttccacaccatttcaggttgaaaaagatcagtgtttaaactgtccggatgctattactaaaaaagaagacagcacccatttaagtgactccagctcatacaacattgtcactaagtttgaaaggacacagttatcccctgaggccaaagtgaagcctgagaggaatagccttggtacaaagaagggccgggtgttctgcactgcatgtgagaagaccttctatgacaaaggcaccctcaaaatccactacaatgccgtccacttgaagatcaagcataagtgcaccatcgaagggtgtaacatggtgttcagctccctaaggagccggaatcgccatagcgccaaccccaaccctcggctgcacatgccaatgaacagaaataaccgggacaaagacctcaggaacagcctgaacctggccagctctgagaactacaagtgcccaggtttcacagtgacgtccccagactgtaggcctcctcccagctaccctggttcaggagaggattccaaaggccaaccagccttcccaaacattgggcaaaatggtgtgctttttcccaacctaaagacagtccagccagtccttcctttctaccgcagtccagccacgcctgccgaggtagcaaacacgcctgggatactcccttccctcccgctgttgtcctcttcaatcccagaacagctcatttcaaacgaaatgccatttgatgcccttcccaagaagaaatccaggaagtccagtatgcctatcaaaatagagaaagaagctgtggaaatagctaatgagaaaagacacaacctcagctcagatgaagacatgcccctacaggtggtcagtgaagatgagcaggaggcctgcagtcctcagtcacacagagtatctgaggagcagcatgtacagtcaggaggcttagggaagcctttccctgaaggggagaggccctgccatcgtgaatcagtaattgagtccagtggagccatcagccaaacccctgagcaggccacacacaattcagagagggagactgagcagacaccagcattgatcatggtgccaagggaggtcgaggatggtggccatgaacactacttcacacctgggatggaaccccaagttcctttttctgactacatggaactgcagcagcgcctgctggctgggggactcttcagtgctttgtccaacaggggaatggcttttccttgtcttgaagattctaaagaactggagcacgtgggtcagcatgcattagcaaggcagatagaagaaaatcgcttccagtgtgacatctgcaagaagacctttaaaaatgcttgtagtgtgaaaattcatcacaagaatatgcatgtcaaagaaatgcacacatgcacagtggagggctgtaatgctacctttccctcccgcaggagcagagacagacacagctcaaacctaaacctccaccaaaaagcattgagccaggaagcattggagagtagtgaagatcatttccgtgcagcttaccttctgaaagatgtggctaaggaagcctatcaggatgtggcttttacacagcaagcctcccagacatctgtcatcttcaaaggaacaagtcgaatgggcagtctggtttacccaataacgcaagtccacagtgccagcctggagagctacaactctggccccttgagcgagggcaccatcctggatttgagcactacctcgagcatgaagtcagagagtagcagccattcttcctgggactctgacggggtgagtgaggaaggcactgtgcttatggaggacagtgatgggaactgtgaagggtcgagccttgtccctggggaagatgagtaccccatctgtgtcctgatggagaaggctgaccagagccttgctagcctgccttctgggttgcccataacctgtcatctctgccaaaagacatacagtaacaaagggacctttagggcccactacaaaactgtgcacctccggcagctccacaaatgcaaagtaccaggctgcaacaccatgttttcgtctgttcgcagtcgaaacagacacagccagaatcccaacctgcacaaaagcctggcctcatctccaagtcacctccagtaacaagatggcaaaccaagtatgctcagataagcttttttcataattcaggaataaagtagtccatagaaatgtttctgtttcatatcatttggggcgag

SEQ ID NO: 110842 - DNA, 4607 bp, Homo sapiens
  Payload ID: 1743
  Gene Symbol: BNC1
  Gene Name: basonuclin 1
  ENST ID: ENST00000618086
  CDS Start-End: 89-3070
gcggcgggggcggccatcgtgctgcgcagcctgggcgcttggggagccgcccacttcgccgggtcgcgccccgacggccggagcgtggatgcggcggcgcccggagccggggcggacgcggggcggccgggcccgggagacgcgccggcagccccggcaccgcagcggtcgcaggatggccgaggctatcagctgtactctgaactgtagttgccaaagtttcaaacccgggaaaataaaccaccgtcagtgtgaccaatgcaagcatggatgggtggcccacgctctaagtaagctaaggatcccccccatgtatccaacaagccaggtggagattgtccagtccaatgtagtgtttgatattagcagcctcatgctctatgggacccaggccatccccgttcgcctaaaaatcctactggaccggctcttcagtgtgttgaagcaagatgaggttctccagatcctccatgccttggactggacacttcaggattatatccgtggatacgtactgcaggatgcatcaggaaaggtgttggatcactggagcatcatgaccagtgaggaagaagtggccaccttgcagcagttccttcgttttggagagaccaaatctatagttgaactcatggcaattcaagagaaagaagagcaatccatcatcataccaccttccacagcaaatgtagatatcagggctttcatcgagagctgcagtcacaggagttctagcctccccactcctgtggacaaaggaaaccccagcagtatacacccctttgagaacctcataagcaacatgactttcatgctgcctttccagttcttcaaccctctgcctcctgcactgatagggtcattgcccgaacaatatatgttggagcagggtcatgaccaaagtcaggaccccaaacaggaagtccatgggcccttccctgacagcagcttcttaacttccagttccacaccatttcaggttgaaaaagatcagtgtttaaactgtccggatgctattactaaaaaagaagacagcacccatttaagtgactccagctcatacaacattgtcactaagtttgaaaggacacagttatcccctgaggccaaagtgaagcctgagaggaatagccttggtacaaagaagggccgggtgttctgcactgcatgtgagaagaccttctatgacaaaggcaccctcaaaatccactacaatgccgtccacttgaagatcaagcataagtgcaccatcgaagggtgtaacatggtgttcagctccctaaggagccggaatcgccatagcgccaaccccaaccctcggctgcacatgccaatgaacagaaataaccgggacaaagacctcaggaacagcctgaacctggccagctctgagaactacaagtgcccaggtttcacagtgacgtccccagactgtaggcctcctcccagctaccctggttcaggagaggattccaaaggccaaccagccttcccaaacattgggcaaaatggtgtgctttttcccaacctaaagacagtccagccagtccttcctttctaccgcagtccagccacgcctgccgaggtagcaaacacgcctgggatactcccttccctcccgctgttgtcctcttcaatcccagaacagctcatttcaaacgaaatgccatttgatgcccttcccaagaagaaatccaggaagtccagtatgcctatcaaaatagagaaagaagctgtggaaatagctaatgagaaaagacacaacctcagctcagatgaagacatgcccctacaggtggtcagtgaagatgagcaggaggcctgcagtcctcagtcacacagagtatctgaggagcagcatgtacagtcaggaggcttagggaagcctttccctgaaggggagaggccctgccatcgtgaatcagtaattgagtccagtggagccatcagccaaacccctgagcaggccacacacaattcagagagggagactgagcagacaccagcattgatcatggtgccaagggaggtcgaggatggtggccatgaacactacttcacacctgggatggaaccccaagttcctttttctgactacatggaactgcagcagcgcctgctggctgggggactcttcagtgctttgtccaacaggggaatggcttttccttgtcttgaagattctaaagaactggagcacgtgggtcagcatgcattagcaaggcagatagaagaaaatcgcttccagtgtgacatctgcaagaagacctttaaaaatgcttgtagtgtgaaaattcatcacaagaatatgcatgtcaaagaaatgcacacatgcacagtggagggctgtaatgctacctttccctcccgcaggagcagagacagacacagctcaaacctaaacctccaccaaaaagcattgagccaggaagcattggagagtagtgaagatcatttccgtgcagcttaccttctgaaagatgtggctaaggaagcctatcaggatgtggcttttacacagcaagcctcccagacatctgtcatcttcaaaggaacaagtcgaatgggcagtctggtttacccaataacgcaagtccacagtgccagcctggagagctacaactctggccccttgagcgagggcaccatcctggatttgagcactacctcgagcatgaagtcagagagtagcagccattcttcctgggactctgacggggtgagtgaggaaggcactgtgcttatggaggacagtgatgggaactgtgaagggtcgagccttgtccctggggaagatgagtaccccatctgtgtcctgatggagaaggctgaccagagccttgctagcctgccttctgggttgcccataacctgtcatctctgccaaaagacatacagtaacaaagggacctttagggcccactacaaaactgtgcacctccggcagctccacaaatgcaaagtaccaggctgcaacaccatgttttcgtctgttcgcagtcgaaacagacacagccagaatcccaacctgcacaaaagcctggcctcatctccaagtcacctccagtaacaagatggcaaaccaagtatgctcagataagcttttttcataattcaggaataaagtagtccatagaaatgtttctgtttcatatcatttggggcgagtcaggcaaaagtatttgatttgactttatagttttccacagcacaatgagcaaaagacaaacctcgtgggaagatgacactggggcagcccttcctattatttttcttagcccaagaggtctttcactgatacaaggaaaacttgcagaaatgtgatttttcccagatttgtttacatgttccctgggacagatccaggtctgcagatcgacaccagtgggcccaggacctgggggtggctttaaatgaggcttgcagtgttaaaggtcttggataagaagggtcctggggaagaagactctgtggacaagataccagtccccaaaacagcattttcagttccttcttcaattagtttgaaatccagacctgagtttggaagactgattttttgagaccatccctgtgtttggagtggataattgtccctcccctcagccctgcaccagaggtctcatatgttaccccagggagttctcagaggattgggttggcctctaacatgttccttgttaattcttgttctgtaacatgcattcaagaagctaggggaaaaatatctcatgcacttaaataatggtcttcaatttaatttaaaaatattttgacaatatttaatttgtgcttatgtggtgtttggtgtgagtgcagatattgcactgtgtcacctctggatctctgctcagaagcagaacaagtgatgacctaaatgtcaaaatcactgctcgttttcatttggtgaacttcaaactctgttctttttggtcacctgtggaatgaatgcaagcatgattttggcaggaacatttgtacatattctgccgtagataatgtggttctgatggttgttgtgtattttcagtatcactggatccctcagtcttcaccgttttataaacgtataagattaggatgaacttttgaatttacttggtaggaaaaaaagtaggacattattgccatattgtatgtcttaatatttaacttattcggaaatatattccacactgttacatacattttccatggtagaaaggaagttcagtcagtcctgtggaatgaaaccatctcctaaaattcagcatttgcagcattctaaaagcctgtgtaggtacaaggacattgattttgtattcagaattcaagttaactatcttttaaattcgtggttgatgtaagtaataaaaaacattcttaaagttgagggttataagagagattatttctgtggtctaaaggttaaaaagccaacaacctgttaccaattatttcagctttttttgttttaataagtgtgacaacttaaaacttgtttctatttaaagtgaaatgtatctttcaactgtttagttacccagctgtttaatattccagtcttcccaaagtgaaaagatttgtatacaaatgttttctatgatttaataaaaatatatggcaca

SEQ ID NO: 110843 - DNA, 1211 bp, Homo sapiens
  Payload ID: 1744
  Gene Symbol: BNC2
  Gene Name: basonuclin 2
  ENST ID: ENST00000380666
  CDS Start-End: 328-1211
gctccaagaccggcccagacctctcgtttcatcttgccatgtcacgagtcaatgctgtgtcgtcttttcaaaaatctgcctgatttagacaagaaagaaaagtactttcatgttgcagccgcagtcccctgctaacttgtcagcagcaggatatgattcacttgggcccagaagaatggaacagagaggcgggttaggcggttcaataaagcccacggacagtcagaagaggcagaagtggatgtgagagaaagagagacacagagagacagagagccaaagagggcaagagacttgactttaagagactcctgtactgacaactccatgcagttcggaaccagaacgactacggctgaaccagggttcatggggacatggcaaaacgctgatactaacctcttattcagaatgtcccaacaggccatccgttgcacactggtaaactgcacatgtgaatgttttcagccagggaagattaacctgaggacttgtgatcagtgtaaacatggctgggtggcacatgccttggataagctcagcacgcagcacctgtaccaccccacccaagtggagattgtgcagtccaacgtcgtgtttgacatcagcagcctgatgctctatgggacacaagcagtgcctgtgcggctaaagatcctgctggaccgtctcttcagcgtcctgaagcaagaggaggtactgcacatactgcacggccttggctggactctgcgggactatgtccgaggatacatccttcaggatgctgctggcaaggtgctggaccgctgggccatcatgtctcgagaagaggaaatcatcacccttcagcagtttctgcggtttggagaaaccaaatccattgtggagctgatggcaattcaggagaaagaagggcaggccgtggctgtaccatcttcaaagacagactcagatataaggactttcattgagagcaataatcgcaccaggagtcccagcctccttgctcacttagagaacagcaatccttccagcattcatcacttcgaaaacatcccaaacagccttgcatttctgcttccattccagtacataaaccctgtctcagcaccactgctagggttgcctccaaatgggctactgttagagcaaccagggttgaggctgcgggaacccagcctttcaactcagaatgaatataatgagagcagcgaatccgaagtttctcc

SEQ ID NO: 110844 - DNA, 3361 bp, Homo sapiens
  Payload ID: 1744
  Gene Symbol: BNC2
  Gene Name: basonuclin 2
  ENST ID: ENST00000380667
  CDS Start-End: 84-3182
cggcggccgaggggctggtccaggcgcggccgctaagaggagaccaagaggcgggggctgcacttgacaaccagcatgccgagatggcacaccttgggcccaccccacctccacatagccttaattacaaatcagaggacaggcttagtgagcaagactggccagcatatttcaaggtcccatgttgtggggttgatacatctcaaattgaggccatccgttgcacactggtaaactgcacatgtgaatgttttcagccagggaagattaacctgaggacttgtgatcagtgtaaacatggctgggtggcacatgccttggataagctcagcacgcagcacctgtaccaccccacccaagtggagattgtgcagtccaacgtcgtgtttgacatcagcagcctgatgctctatgggacacaagcagtgcctgtgcggctaaagatcctgctggaccgtctcttcagcgtcctgaagcaagaggaggtactgcacatactgcacggccttggctggactctgcgggactatgtccgaggatacatccttcaggatgctgctggcaaggtgctggaccgctgggccatcatgtctcgagaagaggaaatcatcacccttcagcagtttctgcggtttggagaaaccaaatccattgtggagctgatggcaattcaggagaaagaagggcaggccgtggctgtaccatcttcaaagacagactcagatataaggactttcattgagagcaataatcgcaccaggagtcccagcctccttgctcacttagagaacagcaatccttccagcattcatcacttcgaaaacatcccaaacagccttgcatttctgcttccattccagtacataaaccctgtctcagcaccactgctagggttgcctccaaatgggctactgttagagcaaccagggttgaggctgcgggaacccagcctttcaactcagaatgaatataatgagagcagcgaatccgaagtttctcccacaccttataagaatgatcaaacacccaatagaaatgccctgaccagcattactaatgtggagcccaaaaccgagccagcctgtgtctctcccattcagaattctgccccagtcagtgatctaaccaaaactgaacacccaaaaagctcattccggattcatcggatgagaaggatggggtcagcctctaggaaaggaagagtgttctgtaatgcatgtgggaagacattctatgacaaaggtactctcaaaattcattacaatgctgttcacctgaagatcaaacatcgatgcaccattgaaggttgcaacatggtctttagctccctccgaagtcgtaatcgccacagtgcaaaccccaatcctcgccttcacatgcctatgctaaggaataaccgagataaagatttaattcgggccacctcaggagctgccacccctgtcatagcaagtacaaaatcaaatctggcactcacaagccctggccgacccccaatgggttttaccactccccctctagaccctgtcttgcaaaatcctctccctagccagctagtattttctgggctaaagactgtacaaccagttcctccattttatagaagtttactcactccaggggaaatggtgagtcctccaacctccctcccaaccagtcccatcattccaaccagtggtaccatagagcagcaccccccgccaccctctgagccagtagtgccagcagtgatgatggccacccatgagcccagtgctgacctggcacccaagaaaaagcccaggaagtcaagcatgcctgtgaagattgagaaggaaattattgataccgccgatgagtttgatgatgaagatgatgaccccaatgatggtggagctgtggtcaatgacatgagccatgacaatcattgtcactcccaagaggagatgagcccaggcatgtctgtgaaggacttttctaagcataacaggacccggtgcatttcaaggactgaaataaggagggccgacagcatgacttctgaagaccaagaacctgagcgggactatgagaacgagtctgagtcttcggagcccaaactgggcgaggaatccatggaaggggatgagcacattcacagcgaagtgagtgaaaaagtcctgatgaatagtgagaggcctgatgagaaccacagtgagccctctcaccaggacgtcatcaaggtgaaggaagaatttacagaccccacttacgacatgttttacatgagccagtatggactgtacaatggtgggggtgccagcatggccgccttgcatgagagctttacatcgtctctgaattatggcagccctcaaaagttctccccagaaggtgacctatgttctagcccagaccccaaaatctgttatgtgtgcaagaagagtttcaaaagctcctacagtgtgaaacttcactacaggaacgttcacttgaaagagatgcacgtctgcacagtggctggttgcaatgctgcattcccctctcgccgaagccgagacagacacagtgccaacataaacctacatcgtaaactgttgaccaaagaactcgatgacatgggcctggactcgtcgcagccctcccttagcaaggacctccgcgatgaatttttggtgaagatatatggtgcccagcaccccatggggctcgatgtcagggaagacgcctcctctcccgcagggactgaagactcccacctgaacgggtatgggagaggcatggcagaggactacatggtccttgacttgagcaccacctccagcctccagtccagcagcagtatccattcctccagagaatccgacgcaggcagcgatgaggggattcttctcgatgacattgacggggcgagtgacagtggggagtcggcacacaaggccgaggcccctgccctccctggcagcctaggggctgaagtttcaggatctcttatgttcagcagcttgtctgggagcaatggtgggatcatgtgcaacatttgccacaaaatgtacagcaacaaggggaccctgagagtgcactacaaaactgtgcatttgagagaaatgcacaagtgcaaagtcccaggttgcaatatgatgttttcctctgtacgaagccgaaatcggcacagtcagaaccctaatctccacaaaaacattcccttcacttcagtagattagtctcagaatggacactacaaatgccagctctcaccagatggcctacgtgtttgaactgccatagtcagtgtgcgcttatgtacttggggtgtgtgtgtgtgtgtgtgtgtgtgtgcatttatgtatgctctgtggctacatatacacacacgtatttccttgagataaacaagataaac

SEQ ID NO: 110845 - DNA, 12844 bp, Homo sapiens
  Payload ID: 1744
  Gene Symbol: BNC2
  Gene Name: basonuclin 2
  Uniprot ID: Q6ZN30
  ENST ID: ENST00000380672
  CDS Start-End: 59-3358
gcggccgctaagaggagaccaagaggcgggggctgcacttgacaaccagcatgccgagatggcacaccttgggcccaccccacctccacatagccttaattacaaatcagaggacaggcttagtgagcaagactggccagcatatttcaaggtcccatgttgtggggttgatacatctcaaattgagtcagaagaggcagaagtggatgtgagagaaagagagacacagagagacagagagccaaagagggcaagagacttgactttaagagactcctgtactgacaactccatgcagttcggaaccagaacgactacggctgaaccagggttcatggggacatggcaaaacgctgatactaacctcttattcagaatgtcccaacaggccatccgttgcacactggtaaactgcacatgtgaatgttttcagccagggaagattaacctgaggacttgtgatcagtgtaaacatggctgggtggcacatgccttggataagctcagcacgcagcacctgtaccaccccacccaagtggagattgtgcagtccaacgtcgtgtttgacatcagcagcctgatgctctatgggacacaagcagtgcctgtgcggctaaagatcctgctggaccgtctcttcagcgtcctgaagcaagaggaggtactgcacatactgcacggccttggctggactctgcgggactatgtccgaggatacatccttcaggatgctgctggcaaggtgctggaccgctgggccatcatgtctcgagaagaggaaatcatcacccttcagcagtttctgcggtttggagaaaccaaatccattgtggagctgatggcaattcaggagaaagaagggcaggccgtggctgtaccatcttcaaagacagactcagatataaggactttcattgagagcaataatcgcaccaggagtcccagcctccttgctcacttagagaacagcaatccttccagcattcatcacttcgaaaacatcccaaacagccttgcatttctgcttccattccagtacataaaccctgtctcagcaccactgctagggttgcctccaaatgggctactgttagagcaaccagggttgaggctgcgggaacccagcctttcaactcagaatgaatataatgagagcagcgaatccgaagtttctcccacaccttataagaatgatcaaacacccaatagaaatgccctgaccagcattactaatgtggagcccaaaaccgagccagcctgtgtctctcccattcagaattctgccccagtcagtgatctaaccaaaactgaacacccaaaaagctcattccggattcatcggatgagaaggatggggtcagcctctaggaaaggaagagtgttctgtaatgcatgtgggaagacattctatgacaaaggtactctcaaaattcattacaatgctgttcacctgaagatcaaacatcgatgcaccattgaaggttgcaacatggtctttagctccctccgaagtcgtaatcgccacagtgcaaaccccaatcctcgccttcacatgcctatgctaaggaataaccgagataaagatttaattcgggccacctcaggagctgccacccctgtcatagcaagtacaaaatcaaatctggcactcacaagccctggccgacccccaatgggttttaccactccccctctagaccctgtcttgcaaaatcctctccctagccagctagtattttctgggctaaagactgtacaaccagttcctccattttatagaagtttactcactccaggggaaatggtgagtcctccaacctccctcccaaccagtcccatcattccaaccagtggtaccatagagcagcaccccccgccaccctctgagccagtagtgccagcagtgatgatggccacccatgagcccagtgctgacctggcacccaagaaaaagcccaggaagtcaagcatgcctgtgaagattgagaaggaaattattgataccgccgatgagtttgatgatgaagatgatgaccccaatgatggtggagctgtggtcaatgacatgagccatgacaatcattgtcactcccaagaggagatgagcccaggcatgtctgtgaaggacttttctaagcataacaggacccggtgcatttcaaggactgaaataaggagggccgacagcatgacttctgaagaccaagaacctgagcgggactatgagaacgagtctgagtcttcggagcccaaactgggcgaggaatccatggaaggggatgagcacattcacagcgaagtgagtgaaaaagtcctgatgaatagtgagaggcctgatgagaaccacagtgagccctctcaccaggacgtcatcaaggtgaaggaagaatttacagaccccacttacgacatgttttacatgagccagtatggactgtacaatggtgggggtgccagcatggccgccttgcatgagagctttacatcgtctctgaattatggcagccctcaaaagttctccccagaaggtgacctatgttctagcccagaccccaaaatctgttatgtgtgcaagaagagtttcaaaagctcctacagtgtgaaacttcactacaggaacgttcacttgaaagagatgcacgtctgcacagtggctggttgcaatgctgcattcccctctcgccgaagccgagacagacacagtgccaacataaacctacatcgtaaactgttgaccaaagaactcgatgacatgggcctggactcgtcgcagccctcccttagcaaggacctccgcgatgaatttttggtgaagatatatggtgcccagcaccccatggggctcgatgtcagggaagacgcctcctctcccgcagggactgaagactcccacctgaacgggtatgggagaggcatggcagaggactacatggtccttgacttgagcaccacctccagcctccagtccagcagcagtatccattcctccagagaatccgacgcaggcagcgatgaggggattcttctcgatgacattgacggggcgagtgacagtggggagtcggcacacaaggccgaggcccctgccctccctggcagcctaggggctgaagtttcaggatctcttatgttcagcagcttgtctgggagcaatggtgggatcatgtgcaacatttgccacaaaatgtacagcaacaaggggaccctgagagtgcactacaaaactgtgcatttgagagaaatgcacaagtgcaaagtcccaggttgcaatatgatgttttcctctgtacgaagccgaaatcggcacagtcagaaccctaatctccacaaaaacattcccttcacttcagtagattagtctcagaatggacactacaaatgccagctctcaccagatggcctacgtgtttgaactgccatagtcagtgtgcgcttatgtacttggggtgtgtgtgtgtgtgtgtgtgtgtgtgcatttatgtatgctctgtggctacatatacacacacgtatttccttgagataaacaagataaacactaggtgcttttgaatttttttcacttccctttatagttttgggaaaggagtgggatctttgatttcagggtgaaaacagagtacccctttaaacacacacacacacacatgcacatacacacacacacacacacacacacacagtgtgcaactagccccagttttgacagaataattcttggtcttccccaaagagacaatttgttgtacccatgactgttgcctgcaaaaataaaagggaaaaaaaagaaaaaagaaacaaaaaggaacttcttatagttgtcttttgtgaactttaaggttttgaaagaatcttcaattaaagcatggcagattcacctgtaaatatttagccttgaggggccattgatgtaaaacaattgtattgatggttgtttaacttttttgtttaatttttacagttacatccagctgttagatatgcaggaaaagatagtttgctggctagctctattcatttatgttagcattaatgcacatttttaaaaaaagaaaaaaacatggtcttgtttttactacctgttagatatagtgctaaagaggtgctggcatgctttacagcacagatctgattttttaaaatgtcctgtactagtacataaatcccgtcatgcactttttttcatacactacaaggggatgtgtaataaccatgcttcttttttatccttaaactattgccatacttcagtaagtgtcttttttaaaaaaaattcacttgtataaaaatggtctggtcagtatagggcacaaatgccaaacaaagtattagtgttaacacaaaactgccaactttgcacaagtttccagaaaagaaaatacaattagtcactcaacataaccacaggccaatttgttggccaccagaaaaccgctttttaaaaaaacacttggtgattctttcaagtgccgaatgttattagaatcaacattgcatccttcttgcttatacgttaagttacataaaaggaaaacaaaattatgtggtgtgaaacagccaaggcatttattcttcagaggcaggataatatttcaggatacaaaagcccaaattacccgctacggaacaaagatgaatacagtaaaagagtcgaacactcatttccaaggccctaacccttatcctttaaaaagaaatcctctgaactgggtcggtctgttgtatggctgtctaatttgttgcaaattctgcagtcgtactataattcaggcctgtttggtagacaaaatcaaaaggcatttaacagcagcagtacttggaagctttgaaaacatgtgctaaacttgaatggagcaacactcctttctgaaaagccagaagaagggggttttaaagcaggatctctcaatgttcagtgttttgtgtttccccacacgatttgtcagagagaaatgaaagcaagcctgaaaccaagcaattgagagtgagaaagaggagagagactattctccaaaccttttttgttttgttttgtttccgatgtttacacatgttgcctgagctggttaaccacatcggcagcctcagctaccacaacatactgactaaatgatgatatttactcaagttcagtctgcagccaaaaccattagggtgtgcattgcagactgttttgttgtcttttttttttcttttttcctttttttttaagtggaggggaaaagaagagataaacaaggaatattttgtcaaacagtacacaataatttaaagagaatgtatttcttttttgcatttaatggcctcagacatttctttcatcagtctaaaagttagaaatatccctttattttaacttttatgtcgtttccatttttcatgtttttgtaattattttttctatgttcacatcagcattcacttccgttaaatttgccaaaggaaactgttaatatgtttctgttgttattattcctgtaggatttattgtacctcacagtatttattgtttcccaaaataagcatcattagttggggattcagtatttttgttgtgaaaatttcagaaacaatagattcttaaagataagctagctatgtctaggagctttatcttttcacctccttcagaggatgctatggggtccattttaattcttcatttgttctacggggaggaaagaccaaaagtatttgcagtacaaaagaaactatatcaaacactatgttaaatgacaagtgtttatggtaaaaagctgaggaattagtaataatcgtttttgttttcttgtactttgaattccccaaagtcttaattgctttattttggtgttgtgttaaattgaacagacagatgttttcctttgttttataccatataagactctgtacagtatgtttgtgaaagattgaactagaataatgaaagtttgtttgcaaacattttggtcctctcagcgttctctgtgttgtgctgttgccccattaccaaatggttagattcaaaaagggtgggaaaagatttttaatatcccaacaaaacattatagaaactctggcttttgcagtgtgcatagactacatgtagttttatgaaaataaatacacatttttatttcagcaactttgaaaagttacactcagttgagttactagaactcatcttgtacaacagcaatgtttagtctgtttaatttaatgtcaaataaaaggtcagatagccctcgtgagtgaattacatagctgtcggcagtcacatcagcaaatgcaccaggcttagaacaaatgtttgttacttgctgcaaaccaagctaatgtgtatagccagttagaaaaagtccagaagtaatgagattctagaagtagagtttcccttgcttggaaacatgaatgtgttcacctgtgttttgtcagagaagtggcaataagtcctggacagctgacactttttaagtatctcccctatttgctactacttttgtgcctcaagtgcccagtcgttacggtggccttctaaatgagtaaataacattttccaatataaagcctatttgcttaaaagggacaggggagtggatggatgtagtacatgcaatggaaaatcataaaatgtacaattcttctgtttccaaagtattgctcgttcttgagtgtgtgcctgagtgtcttgttttgacttaactagaattctagttaagatggtgatcccatggcttatttgcaaacaggaaggataaagagatcagcgttttagtcatggagctcatctttgcccattcctactcatttgctttttcataggagttttttgttgttaaacagtttctctcaagccacatgcattctatgctggctgaaaattaatagtgatgtagatgttcatccgacaagcttttccccatgtgattggttttagccagagtttatcacaggtacaaaattaggcggtatgactgtgcatgttctctagctgatgttgaaacttgtactgtcttgatcatttaaaactatgtttttgtaaatatcaggtttagtccgctttcgggaatatctgcatgctatggaaagagagaaaaaaaggatagataatgaggaatttggtttaaaagtgtgataaaaatccttggcattctttgttctgatattaattgtatttaaataagtcaacccaatgtaactcattccagatcttagtccagctgccctgttcagcctgatgccttttaaaggtttaaaggtgttaatgttttccttttcaacatggcaaacattttttaaaacctttttggcacaatggtgccactgtcctcatagtgttatttctttggtcatgaattttcaggcccttccagtaagaggagaaaggcacttaactggttaacagccccattattatacattgctctaaggaaaaaaaaaaaaaaaaaactttgaatatatcaagaatgggctattccagaggcttctcctcaggagaaactatgcactaggttcccaccaaatacaatgtgacctttttttcccctttctctgtacacaccccagatatgtgccaagcaaatgagaatgagggccgttgacaattaaagcataaagaagctagtcaccagattgagatggacatgctgctaactgctgacagcttgacctgagcagtcctaacttgtatctggtctgttagcattgggttagattgactaacagagtaaataaaattcacctgtcataagacacgctacatctgctatcatcaagaaacaaatcatccagaagaaactttttttcatcctgtggtcacacccttttcttaagagcttcttttttaaaattatgacaaacgaatttcattctttaaaatcacttatcttctcccaaacttgaagtatttaaattaggtggttttgcttttccctctcattgtttattttttggggatggatctaaatgagtaagatgagcaataaaagataccagaaagactggagggatcacagtgttttcatcagaactaagtagagggtcggttcctgccctggttttggggtagctagaaaaggaaatcatgaatgcactggaaatgttggctcgagagaaaagactggcatagctctgcctcgcagtgggtgagagcgtattgatcgtagggacctgcagagttcctatgaccaggtgagtcggctctgaggaaggggttaggaaagcaagtacagctgcatgaaatagctgaagttcctttggggtcaggaagagccgacaattgtggggttttggttgcttttgctttgtttttgagtgggaagtgttgctggaatcccctgagaaccgaaagatgccaggggtcagcaaggctatagaaaaggccagtggtaacacctcgttttcatcctaacagaggagtaggtgcgaatggcaccagcatggatcgttcctttcttgatcattactcatgcttgccactgtagcaacacaacaaagccatgattgtaattaatactaggctaaagaccttgatcaaaatgggagctcatttactgttctatgaggtatgtaagtaacttctcttcacattttccctcagagataaaccacacgtggtagtcttgtttgcgttagtactaaggtcatgtttgatctgtcccagacgagtcgcatatttcctgtagctggagtgttgctcaccataaatggtcattttcaaaaagtattgtgtaattccagctgtacaactgaccagtgagttatctgtcatcactgttgcccacatacccgtccttccttgtgtagtttcatcatcctcatccttcccacatcttgcgcaaaatgattttctgtgctcattcggcaataactatgttattcggcatactgtctttttggcatttgttgaaaaatccaaatgcttttaatccaaaagattaatccaaatcttttttaatccaaatgattttaatccaaatccaaataacaggaggttaaaaaaaaaaaaaaaactaagcatttttacatgtacactgaattggatcagcattattgttcattataatgctatatatatttttggagcaacatactatagttgtcataaaactatctttattcttctcctctaaagtgctgttgtaaattcatttgacctttactgcaggaaaaaaaaaaatcttttttatataggatatgaagaccaaggctcagtctgtaacaaatagtggaccattacaaaagaggaaagaaaaaagccagggctgagcagcaagaagcttcagttcaatttcacctcgtatctttctaataacatacttgtcactttattaccttccagtaatgtgaacgctgctgacaagactgtcacactaacagcagacaacaccctctctgcttcagcccagctctcctggctacttattgccctggccctgaagggacacaaactaatagtgtgctttccagttcagcacttggccatcaaatataaaaggatgcgtaattgcctgtttatccccttgtgaaggagaaattgactacaagggctaggctttcccatcgagttccctgatgtacacacacatccacaatcagtcagtctctctctctctctctctctctctctctctctctctctctctctcccctctctctctccttccctcttattctcccctcctaacatacaagcacatacacacacctactgtatctgtgggaagcccaaggctgcctctcgatgccctctccagctattaagtggacagtaacaagatgacttcttaaataaagggtcagtagagagatgctgtctgtgacggcatcctttgcttctttgaaaacttaagtgttaacaattccatcttgagagtaatgggtgtggccctataattagagcaaattttcctgcaagtcagtggcataagtaagattatattgccccctaatctgtagggaaaagattaaaatatttttcttccccttcaaaaagtgcacatgttgtaaactggttacgcacagtggtcatttttttttcttatccttggcatcaaaccatggacgtaggtgtacaaatgcatctttcaatgacccctccaaatccatagtgtaacatgatagattaacttttgtcaaactggactgacaatctaaaaaagatggcgtcaggcttttgactttaatcgttaaaacaaggaccaccctatgagtaaaaggtaaattctccactttgaagaactttggtaagtacaagtacagggagctttagaaaatcgagtgatggggaccaaaggtacaaaggaagaatacatgaaaatgttatattccaaaatgccctgagcccaaagattggctgctatttttgtatattgaaatactcaaatgatggttggaaagtgactagttagtgactaaatgaagtgcaagatctatcaagcgtcttctttctgggactaggggatgccatgcttccttccaaccttcccgcagcgcatctcagagaagatagttggccccattacaaacagtcacatttcagtaagatattagtcagccaggtaagacacgtgcaggtatcggtatcatcttccatatgaactttagcaaggagagaacagcagcagatttagggatagacaatgtaacaggtctatgttgacaaatctgtgctaaataatttcatgaaccagtgtggggactgggaagaaaagcactttgagcaaggactcttgggttcgagcaaaggcaattagttgacatgatacttcttaagttcctcagtatgtatatgttacaatcgtttatcagacatcttaatagaatcctaattgaaaaaccagttgccaaaattgcacaagttctgctcgctgatactagctttctccccttaactctaaaataccagggatgcttaaggacgtttgtaatagtttttttaatgctttgtttcacttttttaaaaaagaatctttgaagggaaggaagagcagaaagaagtattttaagaaaaatggagagaagtagatagtattgaaagtatatttcttgaagagagagtatctaagtgctataccaagattttatagggcttcctgttgccaaatgtgatgttgagataatgcacagctaagatggcaaatccatcaattattaactggctctgcccacttctgtcatggaatgcaaggattgagaggtgactctggggagaccctgggtgtgtgagagagctccattcatctggccctggatatgtttttcaaaagagagggagaaagcgccagtccctgcaaggtgaactgacctggcactgtttcagtgggagcctcactgcctgccttttccatgctaggagacaaagcatcctctaccccatctgtgaatcggtgctgtggccactgcgagaagcatgattcatgaggtatgatgctcttgagctcccagacaatgtgctgagttaataggttcacttgagatgtatacaccaaggctgtttctttttttaaatctagtccccaatttggagtatttttgcatgtttttgtacagagtaatccattcctctcattgtgtatcttaatctcctctgacttttccattgtctttctcaatcccaccctttgctcttcggatctcaccaaccccccttaaaaaataaatcatgtttgagcaagaaggtagaacacgccctccctcatcttggttttaattgctttggaaacgtgttctaccctgtccagggtttgcataacgtgaattaagtgaatgagatgttctagtattatatcttaacctgataagactatctaagatttctagtatatggtgcatttgctttcctgtgcaaactttggttcagctgccctgcagagaatctcaccattttcctgccagtgccagtataaagaatgcaggagagctaaacctgggtacatgaaggtcagaggggtgaggacggtcgagaaatggggagaagacttgggcttgagacgacctgggcttttcatgtgtagctcactcagcagtatgaggatgactgacacaccagtgggtggtttccaagtgaggcaaatgcccatttcccctctcccctcacaccttgcctggcttcttccatgaagtccttgctgcttttctgcctccccaaaggtgaggggaaggggctggttggggatctgggaaagccagttctctgttctctcctgctggtgatggactaggccttttagaactagcaagatccctcacacagctgggagaacacacacctttcttactccagacccattggtgtgtctccagtaacaaaattattggactcagcctccatatttgacagcaaaagtggccagagggagttgaaatatcttgaagaaaaggaattttcactaagatatgtcctctccctctcccagagtttagctgtttattccttttttttgtttatattgttctcatctgcataaaaccagtctcttgcaataagcctgccgcagaatcaaagtctgtacttcaaaaggtaactgcaccaagggatgggacagtgtgcatcaccctgatctaatcattgtgacgttggtagcttcctaaatactgtatgtaccttgaacaagggttttatttttgttttgttctgttttgctttttgtttttattggtaggctaaggtaattaaattttttaatttgctgttactttggttgtattttctgtactataactgcctacagtatgtcttttgcataaaatgcataagggtttggggatgtaaatggaattttattcatattttgtccaaatacctcttgtaatttgtatcaaaattcttgtacaatttttatattaaagatttatcagtcactga

SEQ ID NO: 110846 - DNA, 2106 bp, Homo sapiens
  Payload ID: 1744
  Gene Symbol: BNC2
  Gene Name: basonuclin 2
  ENST ID: ENST00000411752
  CDS Start-End: 1-984
ccctctgagccagtagtgccagcagtgatgatggccacccatgagcccagtgctgacctggcacccaagaaaaagcccaggaagtcaagcatgcctgtgaagattgagaaggaaattattgataccgccgatgagtttgatgatgaagatgatgaccccaatgatggtggagctgtggtcaatgacatgagccatgacaatcattgtcactcccaagaggagatgagcccaggcatgtctgtgaaggacttttctaagcataacaggacccggtgcatttcaaggactgaaataaggagggccgacagcatgacttctgaagaccaagaacctgagcgggactatgagaacgagtctgagtcttcggagcccaaactgggcgaggaatccatggaaggggatgagcacattcacagcgaagtgagtgaaaaagtcctgatgaatagtgagaggcctgatgagaaccacagtgagccctctcaccaggacgtcatcaaggtgaaggaagaatttacagaccccacttacgacatgttttacatgagccagtatggactgtacaatggtgggggtgccagcatggccgccttgcatgagagctttacatcgtctctgaattatggcagccctcaaaagttctccccagaaggtgacctatgttctagcccagaccccaaaatctgttatgtgtgcaagaagagtttcaaaagctcctacagtgtgaaacttcactacaggaacgttcacttgaaagagatgcacgtctgcacagtggctggttgcaatgctgcattcccctctcgccgaagccgagacagaaacagaaatttacggatggaaagaaccataggtccaggacatcgagacagcctgcatctccgaagaggaaattctaaccggcctggaacctgctgtcttcatacgggagattctcttgaagagagcgtgatagtcagaattagctgcaaaagattagaaagctgatcttattgtcacaagacacagtgccaacataaacctacatcgtaaactgttgaccaaagaactcgatgacatgggcctggactcgtcgcagccctcccttagcaaggacctccgcgatgaatttttggtgaagatatatggtgcccagcaccccatggggctcgatgtcagggaagacgcctcctctcccgcagggactgaagactcccacctgaacgggtatgggagaggcatggcagaggactacatggtccttgacttgagcaccacctccagcctccagtccagcagcagtatccattcctccagagaatccgacgcaggcagcgatgaggggattcttctcgatgacattgacggggcgagtgacagtggggagtcggcacacaaggccgaggcccctgccctccctggcagcctaggggctgaagtttcaggatctcttatgttcagcagcttgtctgggagcaatggtgggatcatgtgcaacatttgccacaaaatgtacagcaacaaggggaccctgagagtgcactacaaaactgtgcatttgagagaaatgcacaagtgcaaagtcccaggttgcaatatgatgttttcctctgtacgaagccgaaatcggcacagtcagaaccctaatctccacaaaaacattcccttcacttcagtagattagtctcagaatggacactacaaatgccagctctcaccagatggcctacgtgtttgaactgccatagtcagtgtgcgcttatgtacttggggtgtgtgtgtgtgtgtgtgtgtgtgtgcatttatgtatgctctgtggctacatatacacacacgtatttccttgagataaacaagataaacactaggtgcttttgaatttttttcacttccctttatagttttgggaaaggagtgggatctttgatttcagggtgaaaacagagtacccctttaaacacacacacacacacatgcacatacacacacacacacacacacacacacagtgtgcaactagccccagttttgacagaataattcttggtcttccccaaagagacaatttgttgtacccatgactgttgcctgcaaaaataaaagggaaaaaaaagaaaaaagaaacaaaaa

SEQ ID NO: 110847 - DNA, 3673 bp, Homo sapiens
  Payload ID: 1744
  Gene Symbol: BNC2
  Gene Name: basonuclin 2
  ENST ID: ENST00000418777
  CDS Start-End: 1-2583
tcagaagaggcagaagtggatgtgagagaaagagagacacagagagacagagagccaaagagggcaagagacttgactttaagagactcctgtactgacaactccatgcagttcggaaccagaacgactacggctgaaccagggttcatggggacatggcaaaacgctgatactaacctcttattcagaatgtcccaacaggccatccgttgcacactggtaaactgcacatgtgaatgttttcagccagggaagattaacctgaggacttgtgatcagtgtaaacatggctgggtggcacatgccttggataagctcagcacgcagcacctgtaccaccccacccaagtggagattgtgcagtccaacgtcgtgtttgacatcagcagcctgatgctctatgggacacaagcagtgcctgtgcggctaaagatcctgctggaccgtctcttcagcgtcctgaagcaagaggaggtactgcacatactgcacggccttggctggactctgcgggactatgtccgaggatacatccttcaggatgctgctggcaaggtgctggaccgctgggccatcatgtctcgagaagaggaaatcatcacccttcagcagtttctgcggtttggagaaaccaaatccattgtggagctgatggcaattcaggagaaagaagggcaggccgtggctgtaccatcttcaaagacagactcagatataaggactttcattgagagcaataatcgcaccaggagtcccagcctccttgctcacttagagaacagcaatccttccagcattcatcacttcgaaaacatcccaaacagccttgcatttctgcttccattccagtacataaaccctgtctcagcaccactgctagggttgcctccaaatgggctactgttagagcaaccagggttgaggctgcgggaacccagcctttcaactcagaatgaatataatgagagcagcgaatccgaagtttctcccacaccttataagaatgatcaaacacccaatagaaatgccctgaccagcattactaatgtggagcccaaaaccgagccagcctgtgtctctcccattcagaattctgccccagtcagtgatctaaccaaaactgaacacccaaaaagctcattccggattcatcggatgagaaggatggggtcagcctctaggaaaggaagagtgttctgtaatgcatgtgggaagacattctatgacaaaggtactctcaaaattcattacaatgctgttcacctgaagatcaaacatcgatgcaccattgaaggttgcaacatggtctttagctccctccgaagtcgtaatcgccacagtgcaaaccccaatcctcgccttcacatgcctatgctaaggaataaccgagataaagatttaattcgggccacctcaggagctgccacccctgtcatagcaagtacaaaatcaaatctggcactcacaagccctggccgacccccaatgggttttaccactccccctctagaccctgtcttgcaaaatcctctccctagccagctagtattttctgggctaaagactgtacaaccagttcctccattttatagaagtttactcactccaggggaaatggtgagtcctccaacctccctcccaaccagtcccatcattccaaccagtggtaccatagagcagcaccccccgccaccctctgagccagtagtgccagcagtgatgatggccacccatgagcccagtgctgacctggcacccaagaaaaagcccaggaagtcaagcatgcctgtgaagattgagaaggaaattattgataccgccgatgagtttgatgatgaagatgatgaccccaatgatggtggagctgtggtcaatgacatgagccatgacaatcattgtcactcccaagaggagatgagcccaggcatgtctgtgaaggacttttctaagcataacaggacccggtgcatttcaaggactgaaataaggagggccgacagcatgacttctgaagaccaagaacctgagcgggactatgagaacgagtctgagtcttcggagcccaaactgggcgaggaatccatggaaggggatgagcacattcacagcgaagtgagtgaaaaagtcctgatgaatagtgagaggcctgatgagaaccacagtgagccctctcaccaggacgtcatcaaggtgaaggaagaatttacagaccccacttacgacatgttttacatgagccagtatggactgtacaatggtgggggtgccagcatggccgccttgcatgagagctttacatcgtctctgaattatggcagccctcaaaagttctccccagaaggtgacctatgttctagcccagaccccaaaatctgttatgtgtgcaagaagagtttcaaaagctcctacagtgtgaaacttcactacaggaacgttcacttgaaagagatgcacgtctgcacagtggctggttgcaatgctgcattcccctctcgccgaagccgagacagaaacagaaatttacggatggaaagaaccataggtccaggacatcgagacagcctgcatctcctgccaacataaacctacatcgtaaactgttgaccaaagaactcgatgacatgggcctggactcgtcgcagccctcccttagcaaggacctccgcgatgaatttttggtgaagatatatggtgcccagcaccccatggggctcgatgtcagggaagacgcctcctctcccgcagggactgaagactcccacctgaacgggtatgggagaggcatggcagaggactacatggtccttgacttgagcaccacctccagcctccagtccagcagcagtatccattcctccagagaatccgacgcaggcagcgatgaggggattcttctcgatgacattgacggggcgagtgacagtggggagtcggcacacaaggccgaggcccctgccctccctggcagcctaggggctgaagtttcaggatctcttatgttcagcagcttgtctgggagcaatggtgggatcatgtgcaacatttgccacaaaatgtacagcaacaaggggaccctgagagtgcactacaaaactgtgcatttgagagaaatgcacaagtgcaaagtcccaggttgcaatatgatgttttcctctgtacgaagccgaaatcggcacagtcagaaccctaatctccacaaaaacattcccttcacttcagtagattagtctcagaatggacactacaaatgccagctctcaccagatggcctacgtgtttgaactgccatagtcagtgtgcgcttatgtacttggggtgtgtgtgtgtgtgtgtgtgtgtgtgcatttatgtatgctctgtggctacatatacacacacgtatttccttgagataaacaagataaacactaggtgcttttgaatttttttcacttccctttatagttttgggaaaggagtgggatctttgatttcagggtgaaaacagagtacccctttaaacacacacacacacacatgcacatacacacacacacacacacacacacacagtgtgcaactagccccagttttgacagaataattcttggtcttccccaaagagacaatttgttgtacccatgactgttgcctgcaaaaataaaagggaaaaaaaagaaaaaagaaacaaaaa

SEQ ID NO: 110848 - DNA, 4841 bp, Homo sapiens
  Payload ID: 1744
  Gene Symbol: BNC2
  Gene Name: basonuclin 2
  Uniprot ID: Q6ZN30
  ENST ID: ENST00000484726
  CDS Start-End: 113-2824
gagagaaaggccgagacggagggagccagcggcggccgaggggctggtccaggcgcggccgctaagaggagaccaagaggcgggggctgcacttgacaaccagcatgccgagatggcacaccttgggcccaccccacctccacatagccttaattacaaatcagaggacaggcttagtgagcaagactggccagcatatttcaaggtcccatgttgtggggttgatacatctcaaattgagtcagaagaggcagaagtggatgtgagagaaagagagacacagagagacagagagccaaagagggcaagagacttgactttaagagactcctgtactgacaactccatgcagttcggaaccagaacgactacggctgaaccagggttcatggggacatggcaaaacgctgatactaacctcttattcagaatgtcccaacaggccatccgttgcacactggtaaactgcacatgtgaatgttttcagccagggaagattaacctgaggacttgtgatcagtgtaaacatggctgggtggcacatgccttggataagctcagcacgcagcacctgtaccaccccacccaagtggagattgtgcagtccaacgtcgtgtttgacatcagcagcctgatgctctatgggacacaagcagtgcctgtgcggctaaagatcctgctggaccgtctcttcagcgtcctgaagcaagaggaggtactgcacatactgcacggccttggctggactctgcgggactatgtccgaggatacatccttcaggatgctgctggcaaggtgctggaccgctgggccatcatgtctcgagaagaggaaatcatcacccttcagcagtttctgcggtttggagaaaccaaatccattgtggagctgatggcaattcaggagaaagaagggcaggccgtggctgtaccatcttcaaagacagactcagatataaggactttcattgagagcaataatcgcaccaggagtcccagcctccttgctcacttagagaacagcaatccttccagcattcatcacttcgaaaacatcccaaacagccttgcatttctgcttccattccagtacataaaccctgtctcagcaccactgctagggttgcctccaaatgggctactgttagagcaaccagggttgaggctgcgggaacccagcctttcaactcagaatgaatataatgagagcagcgaatccgaagtttctcccacaccttataagaatgatcaaacacccaatagaaatgccctgaccagcattactaatgtggagcccaaaaccgagccagcctgtgtctctcccattcagaattctgccccagtcagtgatctaaccaaaactgaacacccaaaaagctcattccggattcatcggatgagaaggatggggtcagcctctaggaaaggaagagtgttctgtaatgcatgtgggaagacattctatgacaaaggtactctcaaaattcattacaatgctgttcacctgaagatcaaacatcgatgcaccattgaaggttgcaacatggtctttagctccctccgaagtcgtaatcgccacagtgcaaaccccaatcctcgccttcacatgcctatgctaaggaataaccgagataaagatttaattcgggccacctcaggagctgccacccctgtcatagcaagtacaaaatcaaatctggcactcacaagccctggccgacccccaatgggttttaccactccccctctagaccctgtcttgcaaaatcctctccctagccagctagtattttctgggctaaagactgtacaaccagttcctccattttatagaagtttactcactccaggggaaatggtgagtcctccaacctccctcccaaccagtcccatcattccaaccagtggtaccatagagcagcaccccccgccaccctctgagccagtagtgccagcagtgatgatggccacccatgagcccagtgctgacctggcacccaagaaaaagcccaggaagtcaagcatgcctgtgaagattgagaaggaaattattgataccgccgatgagtttgatgatgaagatgatgaccccaatgatggtggagctgtggtcaatgacatgagccatgacaatcattgtcactcccaagaggagatgagcccaggcatgtctgtgaaggacttttctaagcataacaggacccggtgcatttcaaggactgaaataaggagggccgacagcatgacttctgaagaccaagaacctgagcgggactatgagaacgagtctgagtcttcggagcccaaactgggcgaggaatccatggaaggggatgagcacattcacagcgaagtgagtgaaaaagtcctgatgaatagtgagaggcctgatgagaaccacagtgagccctctcaccaggacgtcatcaaggtgaaggaagaatttacagaccccacttacgacatgttttacatgagccagtatggactgtacaatggtgggggtgccagcatggccgccttgcatgagagctttacatcgtctctgaattatggcagccctcaaaagttctccccagaaggtgacctatgttctagcccagaccccaaaatctgttatgtgtgcaagaagagtttcaaaagctcctacagtgtgaaacttcactacaggaacgttcacttgaaagagatgcacgtctgcacagtggctggttgcaatgctgcattcccctctcgccgaagccgagacagatactgggagaagagcaatgagcaaaacggtctccttgtatcatggggagagactctgtcaagcctaaagtgagcctcggatcttcctaatgacctcctgctggcccagctggatgcaagacaagctcgtttaagcctctgctgacctttcactcctccactacaagaactgcaccactcatttccaccgtcttcagaactgtgcaccaaatagaccacaaagcttcatggctgacgaatgatttccttttcatgatgcaaagagatttttacaaatttctattgatgagagttaacattaagtctcttgtggcattataacctctgttgcacaaatacaatgcttctatataactcttatttttaccttccttataaaggaacaatctactgttcttgccagcattatcttgaaaattcaggccaaaatatctgagcagaatgcacatactgagtgcaccggtggtatttttcatgaagagaccactttgaaagggtcttcctgatttccacctccctcagaatctatctgaccttctcacagactttattggtgtgaatctttcttatatttaaccatttatttgagatgctcatttttgtagcccatcttttctttttaaaaaacatgggctggtttctacccagaagagggtggtaagactgtacatgtacgttaacattcacttgtataactcagcaaaagattagaaagctgatcttattgtcacaagacacagtgccaacataaacctacatcgtaaactgttgaccaaagaactcgatgacatgggcctggactcgtcgcagccctcccttagcaaggacctccgcgatgaatttttggtgaagatatatggtgcccagcaccccatggggctcgatgtcagggaagacgcctcctctcccgcagggactgaagactcccacctgaacgggtatgggagaggcatggcagaggactacatggtccttgacttgagcaccacctccagcctccagtccagcagcagtatccattcctccagagaatccgacgcaggcagcgatgaggggattcttctcgatgacattgacggggcgagtgacagtggggagtcggcacacaaggccgaggcccctgccctccctggcagcctaggggctgaagtttcaggatctcttatgttcagcagcttgtctgggagcaatggtgggatcatgtgcaacatttgccacaaaatgtacagcaacaaggggaccctgagagtgcactacaaaactgtgcatttgagagaaatgcacaagtgcaaagtcccaggttgcaatatgatgttttcctctgtacgaagccgaaatcggcacagtcagaaccctaatctccacaaaaacattcccttcacttcagtagattagtctcagaatggacactacaaatgccagctctcaccagatggcctacgtgtttgaactgccatagtcagtgtgcgcttatgtacttggggtgtgtgtgtgtgtgtgtgtgtgtgtgcatttatgtatgctctgtggctacatatacacacacgtatttccttgagataaacaagataaacactaggtgcttttgaatttttttcacttccctttatagttttgggaaaggagtgggatctttgatttcagggtgaaaacagagtacccctttaaacacacacacacacacatgcacatacacacacacacacacacacacacacagtgtgcaactagccccagttttgacagaataattcttggtcttccccaaagagacaatttgttgtacccatgactgttgcctgcaaaaataaaagggaaaaaaaagaaaaaagaaacaaaaaggaacttcttatagttgtcttttgtgaactttaaggttttgaaagaatcttcaattaaagcatggcagattcacctgtaaatatttagccttgaggggccattgatgtaaaacaattgtattgatggttgtttaacttttttgtttaatttttacagttacatccagctgttagatatgcaggaaaagatagtttgctggctagctctattcatttatgttagcattaatgcacatttttaaaaaaaga

SEQ ID NO: 110849 - DNA, 3750 bp, Homo sapiens
  Payload ID: 1744
  Gene Symbol: BNC2
  Gene Name: basonuclin 2
  ENST ID: ENST00000545497
  CDS Start-End: 496-2685
agacggagggagccagcggcggccgaggggctggtccaggcgcggccgctaagaggagaccaagaggcgggggctgcacttgacaaccagcatgccgagatgtcagaagaggcagaagtggatgtgagagaaagagagacacagagagacagagagccaaagagggcaagagacttgactttaagagactcctgtactgacaactccatgcagttcggaaccagaacgactacggctgaaccagggttcatggggacatggcaaaacgctgatactaacctcttattcagaatgtcccaacaggccatccgttgcacactggtaaactgcacatgtgaatgttttcagccagggaagattaacctgaggacttgtgatcagtgtaaacatggctgggtggcacatgccttggataagctcagcacgcagcacctgtaccaccccacccaagtggagattgtgcagtccaacgtcgtgtttgacatcagcagcctgatgctctatgggacacaagcagtgcctgtgcggctaaagatcctgctggaccgtctcttcagcgtcctgaagcaagaggaggtactgcacatactgcacggccttggctggactctgcgggactatgtccgaggatacatccttcaggatgctgctggcaaggtgctggaccgctgggccatcatgtctcgagaagaggaaatcatcacccttcagcagtttctgcggtttggagaaaccaaatccattgtggagctgatggcaattcaggagaaagaagggcaggccgtggctgtaccatcttcaaagacagactcagatataaggactttcattgagagcaataatcgcaccaggagtcccagcctccttgctcacttagagaacagcaatccttccagcattcatcacttcgaaaacatcccaaacagccttgcatttctgcttccattccagtacataaaccctgtctcagcaccactgctagggttgcctccaaatgggctactgttagagcaaccagggttgaggctgcgggaacccagcctttcaactcagaatgaatataatgagagcagcgaatccgaagtttctcccacaccttataagaatgatcaaacacccaatagaaatgccctgaccagcattactaatgtggagcccaaaaccgagccagcctgtgtctctcccattcagaattctgccccagtcagtgatctaaccaaaactgaacacccaaaaagctcattccggattcatcggatgagaaggatggggtcagcctctaggaaaggaagagtgttctgtaatgcatgtgggaagacattctatgacaaaggtactctcaaaattcattacaatgctgttcacctgaagatcaaacatcgatgcaccattgaaggttgcaacatggtctttagctccctccgaagtcgtaatcgccacagtgcaaaccccaatcctcgccttcacatgcctatgctaaggaataaccgagataaagatttaattcgggccacctcaggagctgccacccctgtcatagcaagtacaaaatcaaatctggcactcacaagccctggccgacccccaatgggttttaccactccccctctagaccctgtcttgcaaaatcctctccctagccagctagtattttctgggctaaagactgtacaaccagttcctccattttatagaagtttactcactccaggggaaatggtgagtcctccaacctccctcccaaccagtcccatcattccaaccagtggtaccatagagcagcaccccccgccaccctctgagccagtagtgccagcagtgatgatggccacccatgagcccagtgctgacctggcacccaagaaaaagcccaggaagtcaagcatgcctgtgaagattgagaaggaaattattgataccgccgatgagtttgatgatgaagatgatgaccccaatgatggtggagctgtggtcaatgacatgagccatgacaatcattgtcactcccaagaggagatgagcccaggcatgtctgtgaaggacttttctaagcataacaggacccggtgcatttcaaggactgaaataaggagggccgacagcatgacttctgaagaccaagaacctgagcgggactatgagaacgagtctgagtcttcggagcccaaactgggcgaggaatccatggaaggggatgagcacattcacagcgaagtgagtgaaaaagtcctgatgaatagtgagaggcctgatgagaaccacagtgagccctctcaccaggacgtcatcaaggtgaaggaagaatttacagaccccacttacgacatgttttacatgagccagtatggactgtacaatggtgggggtgccagcatggccgccttgcatgagagctttacatcgtctctgaattatggcagccctcaaaagttctccccagaaggtgacctatgttctagcccagaccccaaaatctgttatgtgtgcaagaagagtttcaaaagctcctacagtgtgaaacttcactacaggaacgttcacttgaaagagatgcacgtctgcacagtggctggttgcaatgctgcattcccctctcgccgaagccgagacagaaacagaaatttacggatggaaagaaccataggtccaggacatcgagacagcctgcatctcctgccaacataaacctacatcgtaaactgttgaccaaagaactcgatgacatgggcctggactcgtcgcagccctcccttagcaaggacctccgcgatgaatttttggtgaagatatatggtgcccagcaccccatggggctcgatgtcagggaagacgcctcctctcccgcagggactgaagactcccacctgaacgggtatgggagaggcatggcagaggactacatggtccttgacttgagcaccacctccagcctccagtccagcagcagtatccattcctccagagaatccgacgcaggcagcgatgaggggattcttctcgatgacattgacggggcgagtgacagtggggagtcggcacacaaggccgaggcccctgccctccctggcagcctaggggctgaagtttcaggatctcttatgttcagcagcttgtctgggagcaatggtgggatcatgtgcaacatttgccacaaaatgtacagcaacaaggggaccctgagagtgcactacaaaactgtgcatttgagagaaatgcacaagtgcaaagtcccaggttgcaatatgatgttttcctctgtacgaagccgaaatcggcacagtcagaaccctaatctccacaaaaacattcccttcacttcagtagattagtctcagaatggacactacaaatgccagctctcaccagatggcctacgtgtttgaactgccatagtcagtgtgcgcttatgtacttggggtgtgtgtgtgtgtgtgtgtgtgtgtgcatttatgtatgctctgtggctacatatacacacacgtatttccttgagataaacaagataaacactaggtgcttttgaatttttttcacttccctttatagttttgggaaaggagtgggatctttgatttcagggtgaaaacagagtacccctttaaacacacacacacacacatgcacatacacacacacacacacacacacacacagtgtgcaactagccccagttttgacagaataattcttggtcttccccaaagagacaatttgttgtacccatgactgttgcctgcaaaaataaaaggg

SEQ ID NO: 110850 - DNA, 545 bp, Homo sapiens
  Payload ID: 1744
  Gene Symbol: BNC2
  Gene Name: basonuclin 2
  ENST ID: ENST00000603313
  CDS Start-End: 181-545
agctgttaaactgagcaaaggcaagcttggggagtcacaatctatgcataaatgatagggatatctgtgcagaagtcagaagaggcagaagtggatgtgagagaaagagagacacagagagacagagagccaaagagggcaagagacttgactttaagagactcctgtactgacaactccatgcagttcggaaccagaacgactacggctgaaccagggttcatggggacatggcaaaacgctgatactaacctcttattcagaatgtcccaacaggccatccgttgcacactggtaaactgcacatgtgaatgttttcagccagggaagattaacctgaggacttgtgatcagtgtaaacatggctgggtggcacatgccttggataagctcagcacgcagcacctgtaccaccccacccaagtggagattgtgcagtccaacgtcgtgtttgacatcagcagcctgatgctctatgggacacaagcagtgcctgtgcggctaaagatcctgctggaccgtctcttcagcgtcctgaagcaaga

SEQ ID NO: 110851 - DNA, 1008 bp, Homo sapiens
  Payload ID: 1744
  Gene Symbol: BNC2
  Gene Name: basonuclin 2
  ENST ID: ENST00000603713
  CDS Start-End: 274-1008
aaatgatagggatatctgtgcagaaggtgcgaaagaagctctgaccccctccctcccccaaatctcccccttcccaaatgaaatgcacagttcagccagcttcttaactacactacactcctgctactggctgccaagaggctcaaaaaatccaccttcacttttcagtcagaagaggcagaagtggatgtgagagaaagagagacacagagagacagagagccaaagagggcaagagacttgactttaagagactcctgtactgacaactccatgcagttcggaaccagaacgactacggctgaaccagggttcatggggacatggcaaaacgctgatactaacctcttattcagaatgtcccaacaggccatccgttgcacactggtaaactgcacatgtgaatgttttcagccagggaagattaacctgaggacttgtgatcagtgtaaacatggctgggtggcacatgccttggataagctcagcacgcagcacctgtaccaccccacccaagtggagattgtgcagtccaacgtcgtgtttgacatcagcagcctgatgctctatgggacacaagcagtgcctgtgcggctaaagatcctgctggaccgtctcttcagcgtcctgaagcaagaggaggtactgcacatactgcacggccttggctggactctgcgggactatgtccgaggatacatccttcaggatgctgctggcaaggtgctggaccgctgggccatcatgtctcgagaagaggaaatcatcacccttcagcagtttctgcggtttggagaaaccaaatccattgtggagctgatggcaattcaggagaaagaagggcaggccgtggctgtaccatcttcaaagacagactcagatataaggactttcattgagagcaataatcgcaccaggagtcccagcctccttgctcacttagagaacagcaatccttccagcattcatcacttcgaaaacatcccaaacagccttgcatttctgctt

SEQ ID NO: 110852 - DNA, 662 bp, Homo sapiens
  Payload ID: 1744
  Gene Symbol: BNC2
  Gene Name: basonuclin 2
  ENST ID: ENST00000468187
  CDS Start-End: 1-330
tcagaagaggcagaagtggatgtgagagaaagagagacacagagagacagagagccaaagagggcaagagacttgactttaagagactcctgtactgacaactccatgcagttcggaaccagaacgactacggctgaaccagggttcatggggacatggcaaaacgctgatactaacctcttattcagaatgtcccaacaggccatccgttgcacactggtaaactgcacatgtgaatgttttcagccagggaagattaacctgaggacttgtgatcagtgtaaacatggctgggtggcacatgaaaccctgaaatcgtgtctccaatgacttctgctcagaggtgaaacacagcattctttccggctgccttatactgtgcagtgtcctgggtgtggggcaatgaggaagtgacttgggttttctagtgtgtaattttcctctgaaatgcatggaacagcaacaaaactaccaagatacattgcccagaatggtttcatggtagcactgaatgcattctacctgtcattatgtcaataaaaaaatttttaatatctgctgctaaaaaataaccaaatgccaaaatcatgtattctctctaaaacagatttttagaaatttgttgacctcctttcttgaataaattatccttgttaacagca

SEQ ID NO: 110853 - DNA, 688 bp, Homo sapiens
  Payload ID: 1744
  Gene Symbol: BNC2
  Gene Name: basonuclin 2
  ENST ID: ENST00000486514
  CDS Start-End: 196-688
ggggccgcggcgagggcgcgcgcgggcgggcggggaggcggaggcggcgagagcggaggcccggaggaactcggagggggagggagagaaaggccgagacggagggagccagcggcggccgaggggctggtccaggcgcggccgctaagaggagaccaagaggcgggggctgcacttgacaaccagcatgccgagatgtcagaagaggcagaagtggatgtgagagaaagagagacacagagagacagagagccaaagagggcaagagacttgactttaagagactcctgtactgacaactccatgcagttcggaaccagaacgactacggctgaaccagggttcatggggacatggcaaaacgctgatactaacctcttattcagaatgtcccaacaggccatccgttgcacactggtaaactgcacatgtgaatgttttcagccagggaagattaacctgaggacttgtgatcagtgtaaacatggctgggtggcacatgccttggataagctcagcacgcagcacctgtaccaccccacccaagtggagattgtgcagtccaacgtcgtgtttgacatcagcagcctgatgctctatgggacacaagcagtgcctgtgcggctaaagatcctgctggaccgtctcttcagcgtcctgaagcaagaggaggtactgcacatactgc

SEQ ID NO: 110854 - DNA, 745 bp, Homo sapiens
  Payload ID: 1744
  Gene Symbol: BNC2
  Gene Name: basonuclin 2
  ENST ID: ENST00000471301
  CDS Start-End: 328-459
ccactagcatgaagctgatttgctgtgatggtcacttagaagggtttcgctttttcctaaactgtggctgtttaaagtcttggagtctggacaattaacagctgaagaaaatatgacaagacacacgcaaagaggttgggagatagagaggaggagtgcgccagaaaggagctgagctgccttcttgtgtaaactgcctgagagcgggccccctcccctggcctccgtccctgtccccccttccccaaggctgtgttctgctgtctgcccgaaggccaggactgatctgttaaccttgcaccactggctgggaggccgctgcagctcatggccatccgttgcacactggtaaactgcacatgtgaatgttttcagccagggaagattaacctgaggacttgtgatcagtgtaaacatggctgggtggcacatgaaaccctgaaatcgtgtctccaatgacttctgctcagaggtgaaacacagcattctttccggctgccttatactgtgcagtgtcctgggtgtggggcaatgaggaagtgacttgggttttctagtgtgtaattttcctctgaaatgcatggaacagcaacaaaactaccaagatacattgcccagaatggtttcatggtagcactgaatgcattctacctgtcattatgtcaataaaaaaatttttaatatctgctgctaaaaaataaccaaatgccaaaatcatgtattctctctaaaacagatttttaga

SEQ ID NO: 110855 - DNA, 561 bp, Homo sapiens
  Payload ID: 1744
  Gene Symbol: BNC2
  Gene Name: basonuclin 2
  ENST ID: ENST00000613349
  CDS Start-End: 440-561
tagagggagctattctttttgttgttgttcctgggaatatttcttatattaagggagtccaaaatagatgatgacttgaagttagtggtttcctttacttttaattttacagttaagggttcagcacggttttaaatattccttaagtatttgaaagatggccttagtgaatatgaggagttcaatttagtactgttcacattcacttgtttgagatgatttgccagttgacaatgtggcttttatggttattgtaagatggcatacttcaactgtattatttatagtcttctaaacaacctacgatccccaaatatccaatactaaattgcagtcagaagaggcagaagtggatgtgagagaaagagagacacagagagacagagagccaaagagggcaagagacttgactttaagagactcctgtactgacaactccatgcagttcggaaccagaacgactacggctgaaccagggttcatggggacatggcaaaacgctgatactaacctcttattcagaatgtcccaacaggccatccgttgcacactggtaaactg

SEQ ID NO: 110856 - DNA, 687 bp, Homo sapiens
  Payload ID: 1744
  Gene Symbol: BNC2
  Gene Name: basonuclin 2
  ENST ID: ENST00000617779
  CDS Start-End: 566-687
tagagggagctattctttttgttgttgttcctgggaatatttcttatattaagggagtccaaaatagatgatgacttgaagttagtggtttcctttacttttaattttacagttaagggttcagcacggttttaaatattccttaagtatttgaaagatggccttagtgaatatgaggagttcaatttagtactgttcacattcacttgtttgagatgatttgccagttgacaatgtggcttttatggttattgtaagatggcatacttcaactgtattatttatagtcttctaaacaacctacgatccccaaatatccaatactaaattgcaggcacaccttgggcccaccccacctccacatagccttaattacaaatcagaggacaggcttagtgagcaagactggccagcatatttcaaggtcccatgttgtggggttgatacatctcaaattgagtcagaagaggcagaagtggatgtgagagaaagagagacacagagagacagagagccaaagagggcaagagacttgactttaagagactcctgtactgacaactccatgcagttcggaaccagaacgactacggctgaaccagggttcatggggacatggcaaaacgctgatactaacctcttattcagaatgtcccaacaggccatccgttgcacactggtaaactg

SEQ ID NO: 110857 - DNA, 15955 bp, Homo sapiens
  Payload ID: 1745
  Gene Symbol: BSN
  Gene Name: bassoon presynaptic cytomatrix protein
  Uniprot ID: Q9UPA5
  ENST ID: ENST00000296452
  CDS Start-End: 115-11895
gagccgagctgggagatggcggcggcagcggcggcgccgagagtgtgagcaccgcccgggagccgccggcccgggcgcagcgcgaccccgaccccgcccgcccgcctgcccgccatgggcaacgaggtcagcctggagggcggcgctggcgacgggccgctgccgcccggcggcgccggccccggcccgggccccggccccggccccggcgcaggaaagccgccttcagcaccggccggtggcggacagctccccgcggcgggagcagcgcggtcgaccgcggtaccaccggtccctggccccggccccggccccggtcccggccctggcccgggcagcacttcccggagactggaccccaaggaacccctgggtaaccagagagcagcttccccaactccgaagcaggcttctgctaccactcctggccatgagagcccccgagagacaagggcacagggaccagcaggccaggaggctgatggtccccgcaggacgctgcaggtagacagcaggacacagagatcagggcggtccccctcagtgtcaccggacagaggcagcacccccacatcaccctactccgtccctcagatcgccccccttcccagcagcacgctgtgtcccatatgcaagacttcggacctcacgtcgacccccagccagccaaacttcaacacctgcacccagtgtcacaacaaggtctgcaaccagtgtgggttcaaccccaaccctcatctcacccaggtgaaggagtggctctgtctgaactgtcagatgcagagggctctgggaatggacatgaccactgcacctcgctccaagagccagcagcagctgcactccccagccctgtctcctgcccactccccggccaaacagcccctggggaagccagaccaagagagatctcggggcccaggaggaccacagcctgggtcccgccaggctgagacagccagggccacctcagtgccggggcctgcccaagcagctgcccctccagaggtggggagggtgtctcctcagccccctcaacccaccaagccttccacagctgagcccaggccacctgcaggagaggccccggccaaaagtgccaccgcagtgcccgctgggcttggtgccactgagcagacccaggagggcctcactggtaagctcttcggccttggcgcgtcactgctaacccaggcgagcaccctcatgtctgtgcagcccgaggctgacacccagggccagcctgcccccagcaaggggacacctaagatcgtcttcaatgatgccagcaaggaggctggcccaaaacccttgggctcagggcccgggcctgggccagcacctggagccaaaactgagcctggggctagaatgggtcctggatctggacctggagccctgccgaaaactgggggaacaaccagtccaaagcatggcagagcagaacatcaggcagcatcgaaggctgctgccaagccaaagaccatgccgaaggaaagggccatctgcccactgtgccaagccgagctcaacgtgggcagcaagagcccagccaactataacacatgcaccacctgcaggctccaggtgtgcaacctgtgtggcttcaacccaacaccccacctggtggagaaaacagagtggctctgtctgaactgccaaaccaagcggctactggagggcagcctaggagagccgacccccctgccgccgcccacctcacagcagccccctgtaggggcccctcaccgtgcatctggaacatcccctctgaagcagaaagggccacaggggctgggccagccttcaggccccctgcctgccaaggccagccctctatccaccaaggccagccctctgcccagcaaggccagcccccaggccaagcccctcagggcttctgaacccagcaagaccccaagcagtgtccaggaaaagaagacccgagtccccactaaagctgagcccatgccgaagccacctccagagactaccccaacccctgcgactcctaaagtaaagagtggggtgaggagggctgaacctgccacccctgtcgtcaaggctgttccagaagcccccaagggtggggaggcggaggacctggtgggcaagccttactctcaggatgcgtctcggagcccacagagcctcagtgacacaggctattcctctgacggcatctctagctcccagagtgagatcacaggagtcgtgcagcaggaggtggaacagctggacagtgcaggggtgacagggccacatccacccagcccctccgagatccacaaggtggggagcagcatgcggcctttgctgcaggcccagggcctggccccaagtgagcggagcaagccactctccagcggtactggcgaggagcagaagcagcggccccactccttgtccatcacgcctgaggcctttgactctgatgaggagctggaggatatcctggaggaagacgaagactctgctgagtggaggcgccggagagagcagcaggacactgccgagtcctcagacgactttggcagccaattgaggcacgactatgtggaggacagcagtgagggtggcctgtcccctcttccaccccagcccccagcccgggcagcagaactgactgatgaggatttcatgcgacggcagattctcgagatgagcgccgaggaagacaacctggaggaggatgacactgccacctccgggcgtggcctggccaaacatggcacccagaaaggtggccccagacccaggcctgagcctagccaagaaccagcagcactgcccaagaggcgcctgccccacaatgccaccacgggctatgaggagctgctccctgagggaggctcagcagaggctaccgatggcagtgggaccctgcagggtgggctccgtcgcttcaagaccattgagctcaacagcacgggaagttatggtcatgagttggacctgggccaaggcccagaccccagtctggaccgggagcctgagctggagatggagagcctaacgggctcccctgaggaccgctcccgtggtgagcactcctctacattgcctgcctccacacccagctacacctcgggcacctctcccacctctctgtcctccctagaggaggacagtgacagcagccccagccgcaggcagcgtctagaagaagcaaagcagcagcgcaaggcccggcaccgctcccacgggcccctgctacccaccatcgaggactcctcagaggaggaggagctgcgggaggaagaggagctgcttcgtgagcaagagaagatgcgggaggtggagcagcagcgcatccgcagcacggcccgcaagacccggcgggacaaggaagaactgcgggcccagcggaggcgagagcgctccaagacaccacccagtaacttgtcacccatcgaggatgcctccccgacggaggagctgaggcaggcggccgagatggaggagctacaccgctcctcctgctctgagtactcaccctcaccctcccttgactctgaggctgaggccttggatggtggccctagccggctttacaagtcaggcagtgagtacaacctgcccaccttcatgtccctctactcaccaaccgagacaccctccggcagctccaccactcccagttccggacggccgctcaagagcgctgaggaggcttatgaggagatgatgcgcaaagctgagctgctccagaggcagcaaggccaggcagcaggggcccggggaccccatggcggcccctctcagcccacaggcccccggggcctgggctccttcgaatatcaagacactacagaccgtgagtatggccaggctgctcagcctgccgcagagggcacgccagccagcctgggagcagccgtgtacgaagaaatccttcagacatcacagagcatagtccgcatgcggcaggcctcctcacgagacctggcttttgctgaggacaaaaagaaggagaagcagtttctaaatgctgagagtgcatacatggacccaatgaagcaaaatggtggcccccttacccctggtaccagtcccacccagctcgctgcccctgtgtccttctctacccccacctcctcagacagcagcgggggccgagttattcccgatgtccgtgtcactcagcattttgcaaaggagactcaggaccccctcaagctgcacagctctcctgcctcccccagctcagcctccaaggagataggcatgcccttttcccagggccctgggaccccagccaccacagctgtggctccttgtccagctgggctgccacgaggatatatgactccagcctccccagcaggctccgagcgtagtccttcaccatcttccacagcccacagctatggacacagcccaaccactgcaaactatgggtcccaaactgaggatctaccccaggcccccagtggccttgctgcagctggacgagctgctagagagaagcccttgagtgcgagtgacggtgagggtggcactcctcagccttcccgggcatattcctactttgcaagctccagcccacctctctccccgtcttccccctcagagagtcccacattctcccctggcaagatgggcccaagggccacagcagagttctctacacagacgccaagtccagcccctgcctcagacatgccacggagccctggtgcccccactccatcacctatggtagcccagggtacacaaacaccacatcgacccagcacgcctcgcctggtgtggcaggagtcctctcaagaggctccctttatggtcatcacgctggcatctgacgcctccagccagaccaggatggtacatgccagtgcctccacctccccgctctgctcacctactgaaacccagcccaccacccatggctacagccagacaacacctccgagtgtgtctcagctgcccccagagccacctgggccacctggctttccacgggtgcccagtgctggtgcagatgggcccctggcactatatggctggggtgccctccctgctgagaacatctccctgtgccggatctcctctgtccctgggacgtctagggttgagccaggccccaggacccctggcactgcagtggtagacctccgtacagctgtcaagcccactcccatcatcctcactgaccagggcatggacctcacctctcttgctgtggaagcgaggaagtatggtcttgccctggatccaatcccaggacggcagtcgaccgccgtgcagcccttggttatcaacctcaatgcccaggagcataccttccttgctactgccaccaccgtgagcatcaccatggcctcgtctgtgttcatggctcaacaaaagcagcctgtggtctatggagacccctaccagagccgccttgactttggccagggtgggggtagccctgtgtgcctggcccaggtcaaacaagtagagcaggctgtccagacagccccataccgaagtgggccccggggaagacccagggaggccaagtttgccagatataacctacccaaccaagtagctcctctggccagaagagacgttttgatcactcagatgggcaccgcccagagcattggcctcaagccaggcccagtgccagagccaggtgccgagccccaccgggccacccctgcagagctgcggtcacatgctctgccaggtgccaggaagccacacacagtggtggtgcagatgggagagggcacagcaggcactgtgaccacactgctcccagaggagcctgcgggtgccctggaccttaccgggatgaggcctgagagccagctggcatgctgtgacatggtctacaagctcccctttggcagcagctgcactggcaccttccacccggcccccagtgtgcctgagaagagcatggcagatgctgccccacctggccaaagcagcagccccttctatggtccccgggaccctgagcctcctgagcccccaacctaccgggcacagggggtggtggggcctgggccccatgaggagcagaggccctacccacaaggcctgcctggtaggctgtactcctccatgtctgacaccaatttggctgaggctggcctcaactaccatgcccagaggatcgggcagctcttccagggtcctggacgagactcggctatggacctcagctcactgaagcactcctacagcctgggctttgcggatggacgctacctagggcagggcttgcagtatggctcagtcacggacctgcgtcatcctacagaccttttggctcacccgcttcccatgcggcgctatagctcagtgtcgaacatctactcagaccacaggtacggcccacggggagatgcagttggcttccaggaggccagcctggcccagtacagtgccaccacagcccgtgaaatcagtcgcatgtgcgctgccctcaactccatggaccagtatggtgggcggcatggcagtggtggtggtggccctgaccttgtgcagtaccagccccagcacgggcccgggctcagtgctccacagagtctggttcccctcagacctggactccttggtaaccccacctttccagagggccacccaagtcctgggaacttggcccagtatgggcctgcagcaggccaaggaacagcagtcagacagctgctgccgtccacagccactgtacgtgcagctgatggcatgatctactcgactatcaataccccaattgctgcaacactgcccatcaccacccagcctgcctcagtcctgcggcccatggtgcgtggtggcatgtacaggccttacgcatctggtggaatcacagccgtgccactcaccagtctgacacgtgtgcccatgattgccccccgggtacctcttggacccacagggctgtaccgctatcctgcaccaagtagatttcccattgcttccagtgttccacctgcagaagggcctgtctatctggggaaacctgctgctgccaaggcccctggggctgggggcccttcaaggccagagatgccagtaggggctgcacgggaagagcctcttcccacaaccacccctgctgccatcaaggaggctgcaggagccccagctcctgccccactagctggccagaagccaccagcagatgctgctcctgggggtggcagtggggccctcagccggccagggttcgagaaagaggaagcatcacaggaggagaggcagcggaagcaacaggagcagctgctccagctagagcgggagcgggtggagttggagaagctgcgacaacttcggctgcaagaggagctagagcgggaacgtgtggagctgcagaggcaccgtgaggaggagcagctgctggtgcagcgggagttgcaggagctgcagaccatcaagcaccatgtgctgcagcagcagcaagaggaacgccaggctcaatttgcactgcagcgggaacagctagcgcagcagcgtctgcagctggagcagatccagcagctgcagcagcagctgcagcagcagctagaggagcagaagcagcggcagaaggctccctttcctgcagcctgtgaggcacctggccgagggcctcccctagcggctgctgagttggcccagaatggccagtattggcccccccttacacatgcagccttcattgccatggcagggcctgaaggacttgggcagcctcgtgagcctgtgctgcaccggggtctccccagctctgcctcagacatgtcactgcaaacggaggagcagtgggaggccagccgtagtggcatcaagaagcggcactccatgccacgcctgcgggatgcctgtgagctagagtctgggactgagccctgtgtggtcaggaggattgccgacagcagcgtgcagacagacgatgaggatggggagagccgctacctcttgagtcggcgacgccgggcacggcggagtgctgactgcagtgtgcagacggacgacgaagacagtgctgagtgggagcagccagtgcgccgccgcaggtctcgtcttccccgccactcagactcaggctctgacagcaagcacgatgccactgcctcatcatccagtgctgctgccactgtgagggccatgagcagcgtgggcatccagaccatcagtgactgctccgtgcagacggagcctgaccagctgcccagggtctctccagccatccacatcacagctgccaccgatcccaaggtggagatcgtcaggtacatatcggcgccagagaagactgggcgtggggagagcctggcctgccagacggagccagatgggcaggcccagggtgtagccgggccgcagcttgtagggccaactgccatcagcccctacctgcctggcatccagatcgtcaccccagggcctctgggcagatttgaaaaaaagaagccagatcccctggagattgggtaccaggcccacctgcctccggagtctctctcacagcttgtgagccgccagcctcccaagtcccctcaggtcctctactcaccagtctcacccctgtcccctcaccggctcctggacacctcctttgcttccagtgagaggctgaacaaagctcacgtgagtccccagaagcacttcacggctgacagcgctctccgccagcagacgctgcctcgccccatgaagaccctgcagcggtccctgtctgaccctaagcccctcagccccaccgccgaagagtctgccaaagagagattctccctctaccagcaccaggggggactgggtagccaggtgtcggcgttgccacccaacagcctggtccgcaaggtgaagcggacactgcccagcccccctccagaggaggctcaccttcccctggctggccaggcctccccacagctgtatgcagccagcctgctgcagcgagggctgacggggcccaccactgtccctgctaccaaggccagcctgctccgggagctggaccgggacctgcggctggtggagcatgagtccaccaaactgcgcaagaagcaggcagagctggatgaggaggagaaggagattgacgccaagctcaagtacctggagttgggtatcacacaacgcaaagagtctttggccaaagaccggggtggccgtgactacccacccttgcgtggtcttggcgagcatcgtgactacctatcggacagtgagctcaaccagctgcggctccagggctgcaccactcccgctggccagtttgtggacttccctgccactgccgctgctcctgccaccccctctggtcccactgccttccagcagccccgcttccagcctccagccccacagtattctgcaggcagtggtgggccaactcagaacggattcccagcccaccaggcccccacctaccctggccccagcacgtacccagctcctgcctttcctcctggtgccagttacccagctgagcctggcctgccaaaccagcaggctttccgccccacaggccactatgcaggccaaacacccatgccaaccacacagagcaccctttttccagtccccgctgatagccgtgccccactgcagaagccacgccagacatcgctagccgacttggagcagaaggtgcccaccaactatgaggtgatcgccagccccgttgtgcccatgtcttcagccccatctgaaaccagctacagtggcccagcagtgagcagcggctatgagcagggcaaggtccctgaggtgccccgggctggtgaccgtggcagtgtgagccagagcccagcccccacctacccctctgactcacactataccagtctggagcagaacgttcctcgaaactacgtaatgattgatgacatcagtgaactgaccaaggacagcacctctactgctcctgatagccaacggctggagcccctggggccaggcagcagtgggcgtccagggaaggagcctggagaaccaggtgtccttgacgggcccacactgccctgctgctatgccagaggagaagaggaatctgaggaggactcatacgatccccgcgggaagggtggccacctccggagcatggagagcaatggtcgaccagccagtacccactactatggtgacagtgactacaggcatggggctcgagtagagaagtatggtccagggcccatggggcccaagcatccctccaagagcctggctccagctgccatctcctcaaagcgcagcaagcaccggaagcagggcatggagcaaaagatatccaagttctcgcctattgaagaggccaaagacgtagagtcagacctggcgtcctaccccccacctgcagtcagcagcagcctggtctctcggggcaggaagttccaggatgaaatcacctatgggctcaagaagaacgtgtatgagcagcaaaaatactatgggatgtccagccgggacgcagtggaggacgaccgcatttatggcgggagcagccggtcccgggcaccttctgcatacagtggggagaagctgtccagccacgacttcagtggctggggcaaggggtacgaaagggaacgggaggctgtggagcgacttcaaaaagcgggccccaagccctcatccctaagtatggcccacagccgggtacgaccccccatgcggagccaggcctctgaagaggagagccccgtcagtcctttggggaggccccgccctgccggagggcccctccctcccggcggggatacctgcccacagttctgctccagccactccatgcctgatgtccaggaacatgtcaaggacggacctcgggcccacgcatataagcgtgaggagggctacatcctggatgattcccattgcgtggtttccgacagcgaagcgtatcacctgggccaggaggagacggactggtttgataagccccgggatgcccgctctgaccggttcaggcaccacgggggccatgcagtttcctcctcctcccagaagcgaggccctgccaggcacagctaccatgactacgatgaaccccctgaggagggcctgtggcctcatgatgagggtggcccaggccgccatgcctcagccaaggaacaccggcacggtgaccacgggcggcactcaggccgccacactggtgaggagccgggacggcgtgctgccaaaccacacgctcgggacctgggtcgccatgaggcccggccccactctcagcccagctctgctccagctatgccgaagaagggtcagcctgggtatcccagctctgctgagtactcacagccatcccgtgcttcatccgcataccatcatgcctctgacagcaagaagggctcccggcaagcccactccgggcccgctgcactgcagtcaaaggcagaaccccaggcgcagccgcagctgcaaggtcggcaggcagctccaggaccacagcagtcacagtcaccatcatccaggcaaataccctctggggcagcatcacgccagccacagacacagcagcagcagcaaggtcttgggctgcagcccccacagcaggctctgacacaggctcggctgcagcaacagagccagccaaccacccggggctcagcccctgctgccagccagcctgcagggaagcctcagccaggccccagcacagccacaggtcctcaaccagcaggaccgccacgggcagaacagacaaatggctctaaagggacagccaaagcaccgcaacaggggagggctcctcaggcccagccagcaccaggacctggacctgcaggtgtgaaggctggagccaggcctggaggaaccccaggggctcccgccggccagccaggtgccgatggggagagcgtgttctccaagatcctccctggcggggcagccgagcaagctggcaaactgacggaagctgtctctgcttttggcaaaaaattttcctcattctggtgaccatgcccagcatggctcttgaagaaatgaagagaggtatcattgctgtggaaaaatctctggagtcagaggcctgggcgcagctctggactctgcgtataacacatctacaatctggcaaacccttggcccaaagactcaccaggtgggacgtggcaggcaggcctcagttgaggacgtgatgttttctcacagcagctgcctgggtgaagcatctgctggacaagtcggaccactggccaggggacctttgattgtctttccagagatgctgctctctgcagggcaccaccttcaaggcacagcccttgttgggagggagaaccctctccagaaaccctgccaccatggtgtcttgccgtacttcccacagccgcctttttgcggcctggccggccaggcttcccgtgcgttatacacagagtttgggcacacactgccctccctccgagatgccagaagtttttccacagccttggagaggggctttgactgagggctgggggccctgggctccgtttccttcacattccagctggcccggatccctctgtggcacagggccctgcccgtcacatgccctctgggtgacatcggagcagacctccatgtggccaggggttgggagaactttacaaacattaggacctaacactgtctcatcgctgaaataagaggccatagcaccgaaaagcagcgtgggcgccggctgaggcttctcccagcccgtgggtggcagcgtgctagcacactgccaccatctcaaagccatccccctagccatcgtgagcatcccagcggcaccgccattgtctcaaccagccggctcctcgtctgtacacctggggatttcttttgatttcaagaacagccttaatcattccagtttgatttacgtgtatacctcataaacatttttcttttgtttctctctccccctttctctcttctcttggctcactcccttgcctctccccctccaccaccaccttgtgactgatggtttggtttcctctctgctctgcccctgctcagcacagggagaatgttgacttagaagcaatagggggcagcaggccaccaagagcacaaccccagggcgaggtctggggaggcctcccagcccgcctctgtttactgtgcaattccagtcgttcttaagccatcaccagtgggtgtactcagagcagaggggccaggacttctgccagccaagggaaaggcccagagccctgtgcgggggaatgtggcactgtctatccatccggtggactgggcagcattcctccccagggctcttcccttgggggcctcctttcatctggggcacagccacaagtctcatctctaacgttctatgcaatgaaatataaaccctcaatgacaactgttaatatttaataaattccatgttatgtataaggagttaattgcaaacatgcaattgagaaactggatagatacactcataaaacccccacccctccccaccccacccctgctcccattgtgtgtgtgaaattctcagtctgtggcatgtttgacctgtggcaggactcgctgctgccaggtgagtcaccgcctgtcctgcagtggagcatgcacagctcgcagcctctttgcacgatttcatccattttaaatgcttgaccctcttgcttggagttctttttgcctcagaacctctccttcaggagcacttctagctgacttctgcacaagctagtgaggacctgccagaattgttgcctgagcgtgccaggctgcagggcaggcagtaaaaggcccccacataccctgcagttttctctgtccaggacagcaggtaaaaaggaatccccagagcagacgcaatggtaggagcctgcacaggatgtgtgtgtatggacattctgaaggtttgctgtaggatatctgtctgtctgtcattttcccttcctaccccaaccctgagccagaggcatctgacagccctttcccagagggcaccacgcaagggcagagctgggcggcatccacagccagagaggcagaggcaagagcagagccaggctgtgcccgagggaccccagctcttgactgcacctgtttcatgcctctcctctgtggctaggaggctcaaaggactgtgagccaggagatctgggctggagctagggggtcaatggatgctcaggaagagctgggcctttggcacttgtggtgagaacagttgacagtggtcatctggaactgttcatataaacagtggcttcaagctaagtttcttgtgaagtttctcaatagcaaatcttacagaaggtcctgtgtgaccctctctgcatctgtccccaggacctatgctccctgctcacccccttctccaaagcccaagcgtcccgctgctcatcagcttttttaccattgagccaggagtgcggcaggcagtacctgcctgacccttcaaggcctgaccttcgtccagagtgctctggtttgcaccatgcatttctcaggggtccgcatttctcatgcttttctataagatctacacaccccttcagagagggctcctcgctcacctctggtagctatggatgggacaggaagctgccaacctttgtgttggacttaacacccttgcctttctgggacttggcctcaccccacccatggaatacctgcctcatcccaaagatcaggtatgggctgaatgcagccatctgagcaagggctgagggaagccatcacctaacacctctggccacccaggaccaggtctgtgtggggatgtgccttggagaccaaggcaatagtcctttccactacaggccaggggatgggacaagaagtagggaacaggcagggaaatgttaggaggtcagcctccagcaggcctagtctcaggctctaaagtactgacttttcagcaaatttcctttctggccaagccctctgagtttgaaattctgacatctgccactcctcatcccccactgtacccacaggatacatcatcgcccctctgtgaaggtggctggagcaggcctctggtccatggactgtccttcctggcccttgcatggatgcagttgtgactctggggacaatgcagccagaagctgagggaccagcacttggtgccttggaaagtagagagcaacagacacatctccaaatgggcaaggagtctctagcatgcagcccaggccttctccatacccctctccccagcatcatgagcaagggcattgcctcctctctctgctcacttcagggcccagtgcactcacttcacagtgacagccctcccctacaatccttgggcagagcatgtggtctgagggcccacagtgaaagaacagcagtggtggcaactatgccttgccttctggagcctgtagggagttttccaggcaggtcctttgccaggacagcatggtcctgccctgttgtcccgtctgctctcctcttacccacccccatgctgtaaatacttgtcatcatggactccaacagggttagagggacaggcctaatcaactgaaactcctcggagatgccatctctgtctccctgggtgccagcagccctgctgccatgtgcactggggtggcactggagagccatggcagtcgtgagatattgtatgtgtatgcacatgatcatgtgtgtatgtgcgtgcgtgcgtgcgtgtgtgtgtgtgtgtgtgtttctgcctcattcagtttctggggtcaaatcagctccttctctccaagtgcactaccctggagagtggtggccactcaataccttttcctctagctttcatgtcttgtttttgctttccccttcctcctccctctctccctttctttccttctctccttctttatttgaggggggaagagtgctgtacaaagtcaaacaaacaagtttacagttgtaagtgcaatgacccgagtcctccacatgaccttgtgaattgtgtgctgtccttctgtgctctgtgagaactcgtggtacttcagtgtccctccccctgtattgtgacaaggtaattctgtggtatcagaataaaaggacttgatataaacaa

SEQ ID NO: 110858 - DNA, 2339 bp, Homo sapiens
  Payload ID: 1746
  Gene Symbol: BSPRY
  Gene Name: B-box and SPRY domain containing
  Uniprot ID: Q5W0U4
  ENST ID: ENST00000374183
  CDS Start-End: 40-1248
acctgcgacaggtggagcgcacggggcgggcgcacggccatgtccgccgagggcgcggagccggggccggggtccgggtccgggcccgggccggggccactctgccccgaacacggccaggctctgagctggttctgcggctccgagcgacggcccgtgtgcgccgcctgcgcggggttgggcggtcgctgccgggggcaccgcatccgccgggcggaggagcgcgccgaggagctgcggaacaagattgtggaccagtgtgagaggctgcagttacagagtgctgccatcaccaagtatgtggcggacgtcctgccggggaagaatcaaagagcagtgagcatggccagtgcagcgagggaactggttatccagcggttgagtctggtgaggagtctttgcgagagcgaggagcagcggttactggaacaggtgcatggcgaagaggagcgggcccaccagagcatcctgacacagcgggtgcactgggccgaggcgctgcagaaacttgacaccatccgcactggcctggtgggcatgcttactcacctggatgacctccagctgattcagaaggagcaagagattttcgagaggaccgaagaagcagagggcattttggatccccaggagtcggaaatgttaaactttaatgagaagtgcactcggagcccactactgacccaactctgggcaacggcggttcttgggtctctctcaggcacagaggacatacggatcgatgagaggacagtcagccccttcctgcaattgtcagatgatcgaaagaccctgaccttcagcaccaagaagtcaaaggcctgtgcagatggcccggagcgcttcgaccactggcccaatgccctggctgccacctccttccagaatgggctccatgcctggatggtgaatgtccagaacagttgtgcctataaggtgggcgtggcttcaggccacctgccccgcaagggttctggcagtgactgccgtctgggccacaatgccttctcctgggtcttctctcgctatgatcaggagtttcgtttctcacacaatgggcagcacgagcccctggggctgctgcggggcccagcccagctgggtgtagtgctggacttgcaggttcaggagctgctcttctatgagccagcctccggcacagtgctctgtgcccatcatgtgtccttcccggggcccctcttcccagtctttgctgtggccgatcagaccatttctatcgtccgctgacctctggccacaggaagccaggtccaccgcccaccaccctttcaggccatgtttctactcagtgtgcttttcccaaatgatgtgtgtggtgtttctaagagaaacagggcccataaccagtgggcagctttaggagggatggggatctgtttcagatctaggcataacctgtaaatcacaggtgtccaaacttttggcttccctgggccacatttgaagaagaattttcttgggccacataaaatacactaacgatagctgatgagctaaaaaaaaaaaaaaagtctgtgtataatttttgtgatatctgccaccacagataagcaaaaaagtccttgcattcaaagggttggagattgctgctttgagtgctgggtacctgtggggaacctactactccctgggccttagtctcccaaatccaccatgcatctgcccctctgagggtgtcttcactttgtctctggcatctagcatggtgcctggtgcatagtgagcatgcaataaatatttggcaggtgagtggatggatagatggataggtgaatgtaggtggacaggtgactgggtggatgttgtggtctctggagaagcactgccattcagcctcctgctccagctgttcacatgcagaaatgctctcttcacaggcagagaagcctgtggctaaagtttccacatcccattaactcagtgcttttgtctttttcatgacatggcacatagagaaaatatttttttctagcacacaagagcaacctgaaaggctgctcctggccagaggactctgtcccgggggaccgtgtcctcccccatgtcctgcctaggccctcagaggaccaggggatcatgtctccaggtaacccgactgtagcccctgctggctgagctccagcctgtgcccactgataatagcagggacggccttttctcttagagcagctgataagtttccctacctgatggccccctctgacataaactgcacacctggggtgatggcttaaagccagaaagagctgagggagttaagagggccaaccttagggcacgtgggcattattaaaggtcttaaaagcattgaagattta

SEQ ID NO: 110859 - DNA, 383 bp, Homo sapiens
  Payload ID: 1747
  Gene Symbol: BBIP1
  Gene Name: BBSome interacting protein 1
  Uniprot ID: A8MTZ0
  ENST ID: ENST00000436562
  CDS Start-End: 40-252
ggggcaacagctgagccgtctgggaagggatgcatctatatggcagaagtgaagtcaatgttccgggaagttcttccaaagcaagggccactgtttgtggaagatataatgacaatggtgctgtgtaaacccaaacttttacccttaaaatctctgactctggaaaaactagagaaaatgcatcaagcagcacagaatacaattcgccaacaagaaatggcagaaaaggatcaacggcaaataacccactgaatgataactgagcactttagggaacaacctgccttatctactatttaacaataactagaaaatatgcttctgtgtgctgaaagtagtatgtgttatcaataaaattgatagtattcatagaaatacaaaaa

SEQ ID NO: 110860 - DNA, 492 bp, Homo sapiens
  Payload ID: 1747
  Gene Symbol: BBIP1
  Gene Name: BBSome interacting protein 1
  Uniprot ID: A8MTZ0
  ENST ID: ENST00000423273
  CDS Start-End: 94-297
ggggcaacagctgagccgtctgggaagggatgcatcttttcttctgtatgcttgagtcaagaactctaagtcatcttggtaataccgggttggatgcttaaagctgcagcaaaaagaccagaactttcagggccactgtttgtggaagatataatgacaatggtgctgtgtaaacccaaacttttacccttaaaatctctgactctggaaaaactagagaaaatgcatcaagcagcacagaatacaattcgccaacaagaaatggcagaaaaggatcaacggcaaataacccactgaatgataactgagcactttagggaacaacctgccttatctactatttaacaataactagaaaatatgcttctgtgtgctgaaagtagtatgtgttatcaataaaattgatagtattcatagaaatacaaaaatatccaagattgatgaaatttgtattgtgaatgtaaacactctggtttgtattgaacataaaca

SEQ ID NO: 110861 - DNA, 727 bp, Homo sapiens
  Payload ID: 1747
  Gene Symbol: BBIP1
  Gene Name: BBSome interacting protein 1
  Uniprot ID: A8MTZ0
  ENST ID: ENST00000447005
  CDS Start-End: 111-323
agggtgacgtagatttttttccttcgccagtctcaccgttacccggggcaacagctgagccgtctgggaagggatgcatctgaaaaaacactatatccaacaactcagatatggcagaagtgaagtcaatgttccgggaagttcttccaaagcaagggccactgtttgtggaagatataatgacaatggtgctgtgtaaacccaaacttttacccttaaaatctctgactctggaaaaactagagaaaatgcatcaagcagcacagaatacaattcgccaacaagaaatggcagaaaaggatcaacggcaaataacccactgaatgataactgagcactttagggaacaacctgccttatctactatttaacaataactagaaaatatgcttctgtgtgctgaaagtagtatgtgttatcaataaaattgatagtattcatagaaatacaaaaatatccaagattgatgaaatttgtattgtgaatgtaaacactctggtttgtattgaacataaacagttaaactatgaaccaagttttatggggtttaagtcatgtttttagaattgcaaattaaattatttgttcaccattcctattgctatcttttatagataacattcttgggatcttttatagcattcttgggcacaagggattaaatacaacttttatatacagaggatctttacatgtttattaaatctgaatttgaagatacattcca

SEQ ID NO: 110862 - DNA, 812 bp, Homo sapiens
  Payload ID: 1747
  Gene Symbol: BBIP1
  Gene Name: BBSome interacting protein 1
  Uniprot ID: A8MTZ0
  ENST ID: ENST00000454061
  CDS Start-End: 138-449
agggtgacgtagatttttttccttcgccagtctcaccgttacccggggcaacagctgagccgtctgggaagggatgcatcttttcttctgtatgcttgagtcaagaactctaagtcatcttggtaataccgggttggatgcttaaagctgcagcaaaaagaccagaactttcagggcttctcaaatttaataactatggaatcttatcagaaagtccattaacatctcaaagaacaacgtggttattgtatcaatcaccatcctttataccaggatttgcatatccttcaagatgcctgaagacaatcggaggggtatacaagcaagcgaggaaaaaacactatatccaacaactcagatatggcagaagtgaagtcaatgttccgggaagttcttccaaagcaagggccactgtttgtggaagatataatgacaatggtgctgtgtaaacccaaacttttacccttaaaatctctgactctggaaaaactagagaaaatgcatcaagcagcacagaatacaattcgccaacaagaaatggcagaaaaggatcaacggcaaataacccactgaatgataactgagcactttagggaacaacctgccttatctactatttaacaataactagaaaatatgcttctgtgtgctgaaagtagtatgtgttatcaataaaattgatagtattcatagaaatacaaaaatatccaagattgatgaaatttgtattgtgaatgtaaacactctggtttgtattgaacataaacagttaaactatgaaccaagttttatggggtttaagtcatgttttt

SEQ ID NO: 110863 - DNA, 616 bp, Homo sapiens
  Payload ID: 1747
  Gene Symbol: BBIP1
  Gene Name: BBSome interacting protein 1
  ENST ID: ENST00000398289
  CDS Start-End: 119-256
tccttcgccagtctcaccgttacccggggcaacagctgagccgtctgggaagggatgcatcttttcttctgtatgcttgagtcaagaactctaagtcatcttggtaataccgggttggatgcttaaagctgcagcaaaaagaccagaactttcaggaaaaaacactatatccaacaactcagatatggcagaagtgaagtcaatgttccgggaagttcttccaaagcaagagaagggatctcaatgtgttgcctaggctggtctcaaacccctgggctcaaacaaacaatccaacccctttggcatcccaaagtgctgggataacagggccactgtttgtggaagatataatgacaatggtgctgtgtaaacccaaacttttacccttaaaatctctgactctggaaaaactagagaaaatgcatcaagcagcacagaatacaattcgccaacaagaaatggcagaaaaggatcaacggcaaataacccactgaatgataactgagcactttagggaacaacctgccttatctactatttaacaataactagaaaatatgcttctgtgtgctgaaagtagtatgtgttatcaataaaattgatagtattcatagaa

SEQ ID NO: 110864 - DNA, 2119 bp, Homo sapiens
  Payload ID: 1747
  Gene Symbol: BBIP1
  Gene Name: BBSome interacting protein 1
  Uniprot ID: A8MTZ0
  ENST ID: ENST00000448814
  CDS Start-End: 211-489
tcggaagttactgttgaagctaaggcggccataactgataatggcaaaaggagattcctggcttcctgtttccagggtgacgtagatttttttccttcgccagtctcaccgttacccggggcaacagctgagccgtctgggaagggatgcatcttttcttctgtatgcttgagtcaagaactctaagtcatcttggtaataccgggttggatgcttaaagctgcagcaaaaagaccagaactttcaggaaaaaacactatatccaacaactcagatatggcagaagtgaagtcaatgttccgggaagttcttccaaagcaagggccactgtttgtggaagatataatgacaatggtgctgtgtaaacccaaacttttacccttaaaatctctgactctggaaaaactagagaaaatgcatcaagcagcacagaatacaattcgccaacaagaaatggcagaaaaggatcaacggcaaataacccactgaatgataactgagcactttagggaacaacctgccttatctactatttaacaataactagaaaatatgcttctgtgtgctgaaagtagtatgtgttatcaataaaattgatagtattcatagaaatacaaaaatatccaagattgatgaaatttgtattgtgaatgtaaacactctggtttgtattgaacataaacagttaaactatgaaccaagttttatggggtttaagtcatgtttttagaattgcaaattaaattatttgttcaccattcctattgctatcttttatagataacattcttgggatcttttatagcattcttgggcacaagggattaaatacaacttttatatacagaggatctttacatgtttattaaatctgaatttgaagatacattccaatcttgcataaagtgtttgttgggcttttacattacgtaattaaaaaacaaaattttttaaccaattttatgtgccatgtcacgtttaatgctatcttgtgtgaccagatcccaccagtaatgacaaaactgtcttaaacctcatttttttttttttttgagacaagagtttcactcttgttgcccaaacgagagcaatggcaccatctcgactcactgcaacctctgcctcccaggttcaagcaattctcctgcctcagcctcccaagtagctgggattacacgcatgcgccaccatgcctggctacttttgtatttttaatagagacagggtttcttcatgttggtcaagctggtcatgaactcccaacctcaagtgatccgcccacctcggcctcccaaagtgctgggattacaggcatgagccaccgtgcccagcccttaaatctcatttttaagaaaccctcacctattctgtagtcagctaagcttttaattacattaattttaagcacttgagaataaaatgactgcatttatcatccaagtgtcaaacaattaaaaacctaaaaatggtaactatatataagctgaggtaatatgggcttgataaagcccatgaggtaaatatgaacactaaacttggttttaattctaacagactatatctaaacctgtaagcagtatactcctaacagtaccctcataaattctgaatataattcttgtttgctgcagtcaatatttggcagtttaaattagcacagacgttgaggccttgctgagttattaggctatgtaaaagaggttaaaaatatgatcattctttattgttaattggtaatattttctcatacattaggtaaatgtcaagctttgggtctctggagtataactttttgtaacattagccattatttggtaacagaatttaaggatgatggaatgatggaaggtattacatatttctaaaacttaattaagctctaggtcagataacaatggagtaaagtgatacctgcatttttttccccagtgtaatcttaatttactattgtatttttcacttaaaattttgtagggaaaaaaagttttcaagggaacactaagattaaattgactaggttcaaatatgcttccttatgagattcaaaatttactgtgtgaaattaaagtttaagagacctaaaaaaatgtactcccaataaagaatcaatactgcttca

SEQ ID NO: 110865 - DNA, 569 bp, Homo sapiens
  Payload ID: 1747
  Gene Symbol: BBIP1
  Gene Name: BBSome interacting protein 1
  Uniprot ID: A8MTZ0
  ENST ID: ENST00000605742
  CDS Start-End: 149-427
acttccgaattgggtcatggcggaagggtgttaatagcctggccgcccgtgccccagggaatgcttatttttgaccttagttgcaaagtgagtttcttctgtatgcttgagtcaagaactctaagtcatcttggtaataccgggttggatgcttaaagctgcagcaaaaagaccagaactttcaggaaaaaacactatatccaacaactcagatatggcagaagtgaagtcaatgttccgggaagttcttccaaagcaagggccactgtttgtggaagatataatgacaatggtgctgtgtaaacccaaacttttacccttaaaatctctgactctggaaaaactagagaaaatgcatcaagcagcacagaatacaattcgccaacaagaaatggcagaaaaggatcaacggcaaataacccactgaatgataactgagcactttagggaacaacctgccttatctactatttaacaataactagaaaatatgcttctgtgtgctgaaagtagtatgtgttatcaataaaattgatagtattcatagaaatacaaaaatatccaagatt

SEQ ID NO: 110866 - DNA, 1454 bp, Homo sapiens
  Payload ID: 1748
  Gene Symbol: BCS1L
  Gene Name: BC1 (ubiquinol-cytochrome c reductase) synthesis-like
  Uniprot ID: Q9Y276
  ENST ID: ENST00000359273
  CDS Start-End: 138-1397
gaaaggacccggggcggggccgaacgcagcttccccaaggtgcaggcgcggtgaaaccatcgagacggagggccagagagtcacggcggttttcgtaacaccccagggcctgtaaggtttggtgtttccctttcaagatgccactttcagactttattctggctctgaaggacaatccctactttggggctggatttgggctggtgggtgtgggcacagccctggccctggcccggaagggtgtccaactgggcctggtggcattccggcgccattacatgatcacactggaagtccctgctcgagacaggagctatgcctggttgcttagctggctcacccgccacagtacccgtactcagcacctcagtgtcgagacttcgtaccttcagcatgagagtggccgcatttccactaagtttgaatttgtccccagccctggaaaccattttatctggtatcgggggaaatggattcgggtagaacgaagtcgagagatgcagatgatagacttgcagacggggactccttgggaatctgtcaccttcacggccctgggcactgaccgaaaggttttcttcaacatcctggaggaagctcgagagctagccttgcagcaggaggaagggaagaccgtgatgtacacagctgtgggctctgaatggcgtccctttggctatccacgccgccggcgaccactgaattctgtggttctacaacagggtctggctgaccgaattgtcagagacgtccaggaattcatcgataaccccaagtggtacactgacagaggcattccttacagacgtggctacctgctttatgggccccctggttgcggaaagagcagttttatcacagccctggctggggaactggagcacagcatctgcctgctgagcctcacggactccagcctctctgatgaccgactcaaccacctgctgagcgtggccccgcagcagagcctggtactcctggaggatgtggatgctgcttttctcagtcgagacttggctgtggagaacccagtaaagtaccaaggcctaggtcgcctcaccttcagtggactgctcaatgccttggatggtgtggcttccaccgaggcccgcatcgtgttcatgaccaccaaccacgttgacaggctggaccctgccctgatacgcccggggcgagtggacctgaaggagtacgtgggctactgctcacactggcagctgacccagatgttccagaggttctatccagggcaggcaccttccttagctgagaactttgcagaacatgtccttcgagctacaaaccagatcagtcctgcccaggtgcagggctacttcatgctgtataaaaatgaccctgtaggggcaattcacaatgctgagtctctgaggaggtgatcaggctgggctcagctcagctctcctcctctagctcaataaacatctgccacacta

SEQ ID NO: 110867 - DNA, 1583 bp, Homo sapiens
  Payload ID: 1748
  Gene Symbol: BCS1L
  Gene Name: BC1 (ubiquinol-cytochrome c reductase) synthesis-like
  Uniprot ID: Q9Y276
  ENST ID: ENST00000392109
  CDS Start-End: 267-1526
aaaccatcgagacggagggccagagagtcacggcggatcttattgtctacgatgtgacgatccgtggagaaagtagcagatgggcagattttcatttggggagaatgagggagaaaagaacgggcattccgagccaagagcactgcatgagcaaggagttgggaggttgcttacttgttgaacatatttgttgcgtatttgcatatttgctaaacaggttttcgtaacaccccagggcctgtaaggtttggtgtttccctttcaagatgccactttcagactttattctggctctgaaggacaatccctactttggggctggatttgggctggtgggtgtgggcacagccctggccctggcccggaagggtgtccaactgggcctggtggcattccggcgccattacatgatcacactggaagtccctgctcgagacaggagctatgcctggttgcttagctggctcacccgccacagtacccgtactcagcacctcagtgtcgagacttcgtaccttcagcatgagagtggccgcatttccactaagtttgaatttgtccccagccctggaaaccattttatctggtatcgggggaaatggattcgggtagaacgaagtcgagagatgcagatgatagacttgcagacggggactccttgggaatctgtcaccttcacggccctgggcactgaccgaaaggttttcttcaacatcctggaggaagctcgagagctagccttgcagcaggaggaagggaagaccgtgatgtacacagctgtgggctctgaatggcgtccctttggctatccacgccgccggcgaccactgaattctgtggttctacaacagggtctggctgaccgaattgtcagagacgtccaggaattcatcgataaccccaagtggtacactgacagaggcattccttacagacgtggctacctgctttatgggccccctggttgcggaaagagcagttttatcacagccctggctggggaactggagcacagcatctgcctgctgagcctcacggactccagcctctctgatgaccgactcaaccacctgctgagcgtggccccgcagcagagcctggtactcctggaggatgtggatgctgcttttctcagtcgagacttggctgtggagaacccagtaaagtaccaaggcctaggtcgcctcaccttcagtggactgctcaatgccttggatggtgtggcttccaccgaggcccgcatcgtgttcatgaccaccaaccacgttgacaggctggaccctgccctgatacgcccggggcgagtggacctgaaggagtacgtgggctactgctcacactggcagctgacccagatgttccagaggttctatccagggcaggcaccttccttagctgagaactttgcagaacatgtccttcgagctacaaaccagatcagtcctgcccaggtgcagggctacttcatgctgtataaaaatgaccctgtaggggcaattcacaatgctgagtctctgaggaggtgatcaggctgggctcagctcagctctcctcctctagctcaataaacatctgccacacta

SEQ ID NO: 110868 - DNA, 1525 bp, Homo sapiens
  Payload ID: 1748
  Gene Symbol: BCS1L
  Gene Name: BC1 (ubiquinol-cytochrome c reductase) synthesis-like
  Uniprot ID: Q9Y276
  ENST ID: ENST00000392110
  CDS Start-End: 210-1469
atcgagacggagggccagagagtcacggcggatcttattgtctacgatgtgacgatccgtggagaaagtagcagatgggcagattttcatttggggagaatgagggagaaaagaacgggcattccgagccaagagcactgcatgagcaaggagttgggaggttttcgtaacaccccagggcctgtaaggtttggtgtttccctttcaagatgccactttcagactttattctggctctgaaggacaatccctactttggggctggatttgggctggtgggtgtgggcacagccctggccctggcccggaagggtgtccaactgggcctggtggcattccggcgccattacatgatcacactggaagtccctgctcgagacaggagctatgcctggttgcttagctggctcacccgccacagtacccgtactcagcacctcagtgtcgagacttcgtaccttcagcatgagagtggccgcatttccactaagtttgaatttgtccccagccctggaaaccattttatctggtatcgggggaaatggattcgggtagaacgaagtcgagagatgcagatgatagacttgcagacggggactccttgggaatctgtcaccttcacggccctgggcactgaccgaaaggttttcttcaacatcctggaggaagctcgagagctagccttgcagcaggaggaagggaagaccgtgatgtacacagctgtgggctctgaatggcgtccctttggctatccacgccgccggcgaccactgaattctgtggttctacaacagggtctggctgaccgaattgtcagagacgtccaggaattcatcgataaccccaagtggtacactgacagaggcattccttacagacgtggctacctgctttatgggccccctggttgcggaaagagcagttttatcacagccctggctggggaactggagcacagcatctgcctgctgagcctcacggactccagcctctctgatgaccgactcaaccacctgctgagcgtggccccgcagcagagcctggtactcctggaggatgtggatgctgcttttctcagtcgagacttggctgtggagaacccagtaaagtaccaaggcctaggtcgcctcaccttcagtggactgctcaatgccttggatggtgtggcttccaccgaggcccgcatcgtgttcatgaccaccaaccacgttgacaggctggaccctgccctgatacgcccggggcgagtggacctgaaggagtacgtgggctactgctcacactggcagctgacccagatgttccagaggttctatccagggcaggcaccttccttagctgagaactttgcagaacatgtccttcgagctacaaaccagatcagtcctgcccaggtgcagggctacttcatgctgtataaaaatgaccctgtaggggcaattcacaatgctgagtctctgaggaggtgatcaggctgggctcagctcagctctcctcctctagctcaataaacatctgccacact

SEQ ID NO: 110869 - DNA, 1584 bp, Homo sapiens
  Payload ID: 1748
  Gene Symbol: BCS1L
  Gene Name: BC1 (ubiquinol-cytochrome c reductase) synthesis-like
  Uniprot ID: Q9Y276
  ENST ID: ENST00000392111
  CDS Start-End: 268-1527
gtcacggcggatcttattgtctacgatgtgacgatccgtggagaaagtagcagatgggcagattttcatttggggagaatgagggagaaaagaacgggcattccgagccaagagcactgcatgagcaaggagttgggaggttgcttacttgttgaacatatttgttgcgtatttgcatatttgctaaacaggtagtgttaggagctaatccatgaaaggttttcgtaacaccccagggcctgtaaggtttggtgtttccctttcaagatgccactttcagactttattctggctctgaaggacaatccctactttggggctggatttgggctggtgggtgtgggcacagccctggccctggcccggaagggtgtccaactgggcctggtggcattccggcgccattacatgatcacactggaagtccctgctcgagacaggagctatgcctggttgcttagctggctcacccgccacagtacccgtactcagcacctcagtgtcgagacttcgtaccttcagcatgagagtggccgcatttccactaagtttgaatttgtccccagccctggaaaccattttatctggtatcgggggaaatggattcgggtagaacgaagtcgagagatgcagatgatagacttgcagacggggactccttgggaatctgtcaccttcacggccctgggcactgaccgaaaggttttcttcaacatcctggaggaagctcgagagctagccttgcagcaggaggaagggaagaccgtgatgtacacagctgtgggctctgaatggcgtccctttggctatccacgccgccggcgaccactgaattctgtggttctacaacagggtctggctgaccgaattgtcagagacgtccaggaattcatcgataaccccaagtggtacactgacagaggcattccttacagacgtggctacctgctttatgggccccctggttgcggaaagagcagttttatcacagccctggctggggaactggagcacagcatctgcctgctgagcctcacggactccagcctctctgatgaccgactcaaccacctgctgagcgtggccccgcagcagagcctggtactcctggaggatgtggatgctgcttttctcagtcgagacttggctgtggagaacccagtaaagtaccaaggcctaggtcgcctcaccttcagtggactgctcaatgccttggatggtgtggcttccaccgaggcccgcatcgtgttcatgaccaccaaccacgttgacaggctggaccctgccctgatacgcccggggcgagtggacctgaaggagtacgtgggctactgctcacactggcagctgacccagatgttccagaggttctatccagggcaggcaccttccttagctgagaactttgcagaacatgtccttcgagctacaaaccagatcagtcctgcccaggtgcagggctacttcatgctgtataaaaatgaccctgtaggggcaattcacaatgctgagtctctgaggaggtgatcaggctgggctcagctcagctctcctcctctagctcaataaacatctgccacacta

SEQ ID NO: 110870 - DNA, 552 bp, Homo sapiens
  Payload ID: 1748
  Gene Symbol: BCS1L
  Gene Name: BC1 (ubiquinol-cytochrome c reductase) synthesis-like
  ENST ID: ENST00000436603
  CDS Start-End: 1-365
gcattccttacagacgtggctacctgctttatgggccccctggttgcggaaagagcagttttatcacagccctggctggggaactggagcacagcatctgcctgctgagcctcacggactccagcctctctgatgaccgactcaaccacctgctgagcgtggccccgcagcagagcctggtactcctggaggatgtggatgctgcttttctcagtcgagacttggctgtggagaacccagtaaagtaccaaggcctaggtcgcctcaccttcagtggactgctcaatgccttggatggtgtggcttccaccgaggcccgcatcgtgttcatgaccaccaaccacgttgacaggcaccttccttagctgagaactttgcagaacatgtccttcgagctacaaaccagatcagtcctgcccaggtgcagggctacttcatgctgtataaaaatgaccctgtaggggcaattcacaatgctgagtctctgaggaggtgatcaggctgggctcagctcagctctcctcctctagctcaataaacatctgccacact

SEQ ID NO: 110871 - DNA, 804 bp, Homo sapiens
  Payload ID: 1748
  Gene Symbol: BCS1L
  Gene Name: BC1 (ubiquinol-cytochrome c reductase) synthesis-like
  ENST ID: ENST00000428880
  CDS Start-End: 575-804
aaggaggacgctgagccgtcaagattaagaaccttcacctgcgggagggcagggtgaggtaggagacaggtgggcaccagagaagaaatacgcttatcttccgggcaggagggctgaggaagagaaaggacagactaaggcagagagaaggcctggagaaacaacgggccccggcctagcgacccaggttcccacctgcctctggctctgactcaccgcgtggtcttggacagacacagtcgcttcgcttctctgggcctcagctttcctatctgtaaaatggaggtgatgacagtgtccacatcgtcgggcaggagctggatcataagagccagcgaactggaaaggcggtttgtaacctggaaggcttgggatggagcatcgtcatgattttgtcctgagagcagcaggggtctgctgggagccagccattgaaggtgctggagcagagagagatatggtattggagctgatccctatgatgaaagatctggacccttgtgtagatgttccgtgaagcaggaggttttcgtaacaccccagggcctgtaaggtttggtgtttccctttcaagatgccactttcagactttattctggctctgaaggacaatccctactttggggctggatttgggctggtgggtgtgggcacagccctggccctggcccggaagggtgtccaactgggcctggtggcattccggcgccattacatgatcacactggaagtccctgctcgagacaggagctatgcctggttgcttagctggctcacccgccacagtacccgtactcagcacct

SEQ ID NO: 110872 - DNA, 815 bp, Homo sapiens
  Payload ID: 1748
  Gene Symbol: BCS1L
  Gene Name: BC1 (ubiquinol-cytochrome c reductase) synthesis-like
  ENST ID: ENST00000456050
  CDS Start-End: 198-815
cccagagccggcgggagccgcatctctatggtcggccgcggctggaacggcccccggggcccgctttgtgcgaccgcctccggctcagccgcctctaggatattggggatgtggaagccactctctcttcctcttgccggctgccggggttttcgtaacaccccagggcctgtaaggtttggtgtttccctttcaagatgccactttcagactttattctggctctgaaggacaatccctactttggggctggatttgggctggtgggtgtgggcacagccctggccctggcccggaagggtgtccaactgggcctggtggcattccggcgccattacatgatcacactggaagtccctgctcgagacaggagctatgcctggttgcttagctggctcacccgccacagtacccgtactcagcacctcagtgtcgagacttcgtaccttcagcatgagagtggccgcatttccactaagtttgaatttgtccccagccctggaaaccattttatctggtatcgggggaaatggattcgggtagaacgaagtcgagagatgcagatgatagacttgcagacggggactccttgggaatctgtcaccttcacggccctgggcactgaccgaaaggttttcttcaacatcctggaggaagctcgagagctagccttgcagcaggaggaagggaagaccgtgatgtacacagctgtgggctctgaatggcgtccctttggctatccacgccgccggcgaccactgaattctgtggttctacaacagggtctggctgaccgaattgtcagagacgtccag

SEQ ID NO: 110873 - DNA, 583 bp, Homo sapiens
  Payload ID: 1748
  Gene Symbol: BCS1L
  Gene Name: BC1 (ubiquinol-cytochrome c reductase) synthesis-like
  ENST ID: ENST00000423377
  CDS Start-End: 253-583
gagacggagggccagagagtcacggcggggtctgctgggagccagccattgaaggtgctggagcagagagagatatggtattggagctgatccctatgatgaaagatctggacccttgtgtagatgttccgtgaagcaggaggtgaagacctattaaaatgccatttcaagaactacgattttaaagacagtttaggtgggaggttttcgtaacaccccagggcctgtaaggtttggtgtttccctttcaagatgccactttcagactttattctggctctgaaggacaatccctactttggggctggatttgggctggtgggtgtgggcacagccctggccctggcccggaagggtgtccaactgggcctggtggcattccggcgccattacatgatcacactggaagtccctgctcgagacaggagctatgcctggttgcttagctggctcacccgccacagtacccgtactcagcacctcagtgtcgagacttcgtaccttcagcatgagagtggccgcatttccactaagtttgaatttgtccccagccctggaaaccattttatctggtatcggggga

SEQ ID NO: 110874 - DNA, 1036 bp, Homo sapiens
  Payload ID: 1748
  Gene Symbol: BCS1L
  Gene Name: BC1 (ubiquinol-cytochrome c reductase) synthesis-like
  ENST ID: ENST00000430322
  CDS Start-End: 419-1036
cgggagggcagggtgaggtaggagacaggtgggcaccagagaagaaatacgcttatcttccgggcaggagggctgaggaagagaaaggacagactaaggcagagagaaggcctggagaaacaacgggccccggcctagcgacccaggttcccacctgcctctggctctgactcaccgcgtggtcttggacagacacagtcgcttcgcttctctgggcctcagctttcctatctgtaaaatggaggtgatgacagtgtccacatcgtcgggcaggagctggatcataagagccagcgaactggaaaggcggtttgtaacctggaaggcttgggatggagcatcgtcatgattttgtcctgagagcagcaggttttcgtaacaccccagggcctgtaaggtttggtgtttccctttcaagatgccactttcagactttattctggctctgaaggacaatccctactttggggctggatttgggctggtgggtgtgggcacagccctggccctggcccggaagggtgtccaactgggcctggtggcattccggcgccattacatgatcacactggaagtccctgctcgagacaggagctatgcctggttgcttagctggctcacccgccacagtacccgtactcagcacctcagtgtcgagacttcgtaccttcagcatgagagtggccgcatttccactaagtttgaatttgtccccagccctggaaaccattttatctggtatcgggggaaatggattcgggtagaacgaagtcgagagatgcagatgatagacttgcagacggggactccttgggaatctgtcaccttcacggccctgggcactgaccgaaaggttttcttcaacatcctggaggaagctcgagagctagccttgcagcaggaggaagggaagaccgtgatgtacacagctgtgggctctgaatggcgtccctttggctatccacgccgccggcgaccactgaattctgtggttctacaacagggtctggctgaccgaattgtcagagacgtccag

SEQ ID NO: 110875 - DNA, 1483 bp, Homo sapiens
  Payload ID: 1748
  Gene Symbol: BCS1L
  Gene Name: BC1 (ubiquinol-cytochrome c reductase) synthesis-like
  Uniprot ID: Q9Y276
  ENST ID: ENST00000439945
  CDS Start-End: 206-1465
acgggttaccccaaaccatgtggctggaggcgcgagctggggggtctgctgggagccagccattgaaggtgctggagcagagagagatatggtattggagctgatccctatgatgaaagatctggacccttgtgtagatgttccgtgaagcaggaggttttcgtaacaccccagggcctgtaaggtttggtgtttccctttcaagatgccactttcagactttattctggctctgaaggacaatccctactttggggctggatttgggctggtgggtgtgggcacagccctggccctggcccggaagggtgtccaactgggcctggtggcattccggcgccattacatgatcacactggaagtccctgctcgagacaggagctatgcctggttgcttagctggctcacccgccacagtacccgtactcagcacctcagtgtcgagacttcgtaccttcagcatgagagtggccgcatttccactaagtttgaatttgtccccagccctggaaaccattttatctggtatcgggggaaatggattcgggtagaacgaagtcgagagatgcagatgatagacttgcagacggggactccttgggaatctgtcaccttcacggccctgggcactgaccgaaaggttttcttcaacatcctggaggaagctcgagagctagccttgcagcaggaggaagggaagaccgtgatgtacacagctgtgggctctgaatggcgtccctttggctatccacgccgccggcgaccactgaattctgtggttctacaacagggtctggctgaccgaattgtcagagacgtccaggaattcatcgataaccccaagtggtacactgacagaggcattccttacagacgtggctacctgctttatgggccccctggttgcggaaagagcagttttatcacagccctggctggggaactggagcacagcatctgcctgctgagcctcacggactccagcctctctgatgaccgactcaaccacctgctgagcgtggccccgcagcagagcctggtactcctggaggatgtggatgctgcttttctcagtcgagacttggctgtggagaacccagtaaagtaccaaggcctaggtcgcctcaccttcagtggactgctcaatgccttggatggtgtggcttccaccgaggcccgcatcgtgttcatgaccaccaaccacgttgacaggctggaccctgccctgatacgcccggggcgagtggacctgaaggagtacgtgggctactgctcacactggcagctgacccagatgttccagaggttctatccagggcaggcaccttccttagctgagaactttgcagaacatgtccttcgagctacaaaccagatcagtcctgcccaggtgcagggctacttcatgctgtataaaaatgaccctgtaggggcaattcacaatgctgagtctctgaggaggtgatcaggctgggctcagctc

SEQ ID NO: 110876 - DNA, 1430 bp, Homo sapiens
  Payload ID: 1748
  Gene Symbol: BCS1L
  Gene Name: BC1 (ubiquinol-cytochrome c reductase) synthesis-like
  Uniprot ID: Q9Y276
  ENST ID: ENST00000412366
  CDS Start-End: 114-1373
cacggcggtgagagggctgagtgacgggttaccccaaaccatgtggctggaggcgcgagctggggttttcgtaacaccccagggcctgtaaggtttggtgtttccctttcaagatgccactttcagactttattctggctctgaaggacaatccctactttggggctggatttgggctggtgggtgtgggcacagccctggccctggcccggaagggtgtccaactgggcctggtggcattccggcgccattacatgatcacactggaagtccctgctcgagacaggagctatgcctggttgcttagctggctcacccgccacagtacccgtactcagcacctcagtgtcgagacttcgtaccttcagcatgagagtggccgcatttccactaagtttgaatttgtccccagccctggaaaccattttatctggtatcgggggaaatggattcgggtagaacgaagtcgagagatgcagatgatagacttgcagacggggactccttgggaatctgtcaccttcacggccctgggcactgaccgaaaggttttcttcaacatcctggaggaagctcgagagctagccttgcagcaggaggaagggaagaccgtgatgtacacagctgtgggctctgaatggcgtccctttggctatccacgccgccggcgaccactgaattctgtggttctacaacagggtctggctgaccgaattgtcagagacgtccaggaattcatcgataaccccaagtggtacactgacagaggcattccttacagacgtggctacctgctttatgggccccctggttgcggaaagagcagttttatcacagccctggctggggaactggagcacagcatctgcctgctgagcctcacggactccagcctctctgatgaccgactcaaccacctgctgagcgtggccccgcagcagagcctggtactcctggaggatgtggatgctgcttttctcagtcgagacttggctgtggagaacccagtaaagtaccaaggcctaggtcgcctcaccttcagtggactgctcaatgccttggatggtgtggcttccaccgaggcccgcatcgtgttcatgaccaccaaccacgttgacaggctggaccctgccctgatacgcccggggcgagtggacctgaaggagtacgtgggctactgctcacactggcagctgacccagatgttccagaggttctatccagggcaggcaccttccttagctgagaactttgcagaacatgtccttcgagctacaaaccagatcagtcctgcccaggtgcagggctacttcatgctgtataaaaatgaccctgtaggggcaattcacaatgctgagtctctgaggaggtgatcaggctgggctcagctcagctctcctcctctagctcaataaacatctgccacacta

SEQ ID NO: 110877 - DNA, 580 bp, Homo sapiens
  Payload ID: 1748
  Gene Symbol: BCS1L
  Gene Name: BC1 (ubiquinol-cytochrome c reductase) synthesis-like
  ENST ID: ENST00000443791
  CDS Start-End: 129-580
gaaaggacccggggcggggccgaacgcagcttccccaaggtgcaggcgcggtgaaaccatcgagacggagggccagagagtcacggcggtatcgggggaaatggattcgggtagaacgaagtcgagagatgcagatgatagacttgcagacggggactccttgggaatctgtcaccttcacggccctgggcactgaccgaaaggttttcttcaacatcctggaggaagctcgagagctagccttgcagcaggaggaagggaagaccgtgatgtacacagctgtgggctctgaatggcgtccctttggctatccacgccgccggcgaccactgaattctgtggttctacaacagggtctggctgaccgaattgtcagagacgtccaggaattcatcgataaccccaagtggtacactgacagaggcattccttacagacgtggctacctgctttatgggccccctggttgcggaaagagcagttttatcacagccctggctggggaactggagcacagcatctgcctgctgagcctcacggactccagcctctctgatgaccgactcaaccacctgctgag

SEQ ID NO: 110878 - DNA, 2015 bp, Homo sapiens
  Payload ID: 1748
  Gene Symbol: BCS1L
  Gene Name: BC1 (ubiquinol-cytochrome c reductase) synthesis-like
  Uniprot ID: Q9Y276
  ENST ID: ENST00000431802
  CDS Start-End: 700-1959
aaaccatgtggctggaggcgcgagctggggtgtgggcgaggttcaggagggggttcctgggtgtcgcggaggggccggggacgggagagctttgtctgtggccttccatgcataggtgttttggaattctggatcccagttctgaggctcagccgaggtcactgctgtcagctcacctccctgcatgccaggcgcagggcaaagtggccggggttcggggttggaggagaggtgtactagaaacaactttgctcttgtccctcaggatcttattgtctacgatgtgacgatccgtggagaaagtagcagatgggcagattttcatttggggagaatgagggagaaaagaacgggcattccgagccaagagcactgcatgagcaaggagttgggaggttgcttacttgttgaacatatttgttgcgtatttgcatatttgctaaacaggtagtgttaggagctaatccatgaaaggtaggtgggcgccgtattgtagagagccttgagtaccaggctgagtttatacccaattcaggggtctgctgggagccagccattgaaggtgctggagcagagagagatatggtattggagctgatccctatgatgaaagatctggacccttgtgtagatgttccgtgaagcaggaggttttcgtaacaccccagggcctgtaaggtttggtgtttccctttcaagatgccactttcagactttattctggctctgaaggacaatccctactttggggctggatttgggctggtgggtgtgggcacagccctggccctggcccggaagggtgtccaactgggcctggtggcattccggcgccattacatgatcacactggaagtccctgctcgagacaggagctatgcctggttgcttagctggctcacccgccacagtacccgtactcagcacctcagtgtcgagacttcgtaccttcagcatgagagtggccgcatttccactaagtttgaatttgtccccagccctggaaaccattttatctggtatcgggggaaatggattcgggtagaacgaagtcgagagatgcagatgatagacttgcagacggggactccttgggaatctgtcaccttcacggccctgggcactgaccgaaaggttttcttcaacatcctggaggaagctcgagagctagccttgcagcaggaggaagggaagaccgtgatgtacacagctgtgggctctgaatggcgtccctttggctatccacgccgccggcgaccactgaattctgtggttctacaacagggtctggctgaccgaattgtcagagacgtccaggaattcatcgataaccccaagtggtacactgacagaggcattccttacagacgtggctacctgctttatgggccccctggttgcggaaagagcagttttatcacagccctggctggggaactggagcacagcatctgcctgctgagcctcacggactccagcctctctgatgaccgactcaaccacctgctgagcgtggccccgcagcagagcctggtactcctggaggatgtggatgctgcttttctcagtcgagacttggctgtggagaacccagtaaagtaccaaggcctaggtcgcctcaccttcagtggactgctcaatgccttggatggtgtggcttccaccgaggcccgcatcgtgttcatgaccaccaaccacgttgacaggctggaccctgccctgatacgcccggggcgagtggacctgaaggagtacgtgggctactgctcacactggcagctgacccagatgttccagaggttctatccagggcaggcaccttccttagctgagaactttgcagaacatgtccttcgagctacaaaccagatcagtcctgcccaggtgcagggctacttcatgctgtataaaaatgaccctgtaggggcaattcacaatgctgagtctctgaggaggtgatcaggctgggctcagctcagctctcctcctctagctcaataaacatctgccacact

SEQ ID NO: 110879 - DNA, 660 bp, Homo sapiens
  Payload ID: 1748
  Gene Symbol: BCS1L
  Gene Name: BC1 (ubiquinol-cytochrome c reductase) synthesis-like
  ENST ID: ENST00000426649
  CDS Start-End: 1-604
agaggcattccttacagacgtggctacctgctttatgggccccctggttgcggaaagagcagttttatccctggctggggaactggagcacagcatctgcctgctgagcctcacggactccagcctctctgatgaccgactcaaccacctgctgagcgtggccccgcagcagagcctggtactcctggaggatgtggatgctgcttttctcagtcgagacttggctgtggagaacccagtaaagtaccaaggcctaggtcgcctcaccttcagtggactgctcaatgccttggatggtgtggcttccaccgaggcccgcatcgtgttcatgaccaccaaccacgttgacaggctggaccctgccctgatacgcccggggcgagtggacctgaaggagtacgtgggctactgctcacactggcagctgacccagatgttccagaggttctatccagggcaggcaccttccttagctgagaactttgcagaacatgtccttcgagctacaaaccagatcagtcctgcccaggtgcagggctacttcatgctgtataaaaatgaccctgtaggggcaattcacaatgctgagtctctgaggaggtgatcaggctgggctcagctcagctctcctcctctagctcaataaacatctgccacact

SEQ ID NO: 110880 - DNA, 3253 bp, Homo sapiens
  Payload ID: 1749
  Gene Symbol: BCDIN3D
  Gene Name: BCDIN3 domain containing
  Uniprot ID: Q7Z5W3
  ENST ID: ENST00000333924
  CDS Start-End: 43-921
ggcttccggttccgccacggcccagaggctgtgttgaggctaatggcggtgcccacggaactggatggagggagtgttaaggagaccgcagcggaagaggaatcgcgagttctggcacctggcgccgccccgttcggaaattttcctcattattctcgcttccaccctccggagcaacggctccgcctcctgcccccggagctgcttcgacagctctttcctgagagtcccgagaacgggccgattctggggctcgacgtggggtgtaactccggggatctgagtgtggctctatacaaacacttcctctccctacctgacggggaaacctgctcagatgcctcaagagaattccgtctcctctgctgcgacatagatccagtcctggtgaagcgagccgaaaaagaatgtccttttcctgatgccttgacttttatcaccctggacttcatgaatcaaaggacccggaaggttctcttgagctctttcttaagccaatttggacgttcagtttttgacattggcttctgcatgtcaataaccatgtggattcatctgaatcatggagaccatggcctatgggagttcctggcccatctttcctccctctgccactacctccttgtggagccccaaccctggaagtgttaccgggcagctgcaaggcgtctccgaaagctgggactccatgattttgaccacttccactcccttgccatccgaggtgacatgcccaatcagattgtgcagatcttgacccaggatcatggcatggaattaatatgttgctttggcaacaccagttgggacagaagccttctgctcttcagggcaaaacaaaccatagagactcatccaatccctgaatcactgatagaaaaagggaaagaaaagaacagattaagtttccagaagcagtgagatgggagggcaagaagaccaagaaagatattgaaagggttttatattgagaattatgttcattctccttaattccttaacaatcaggcagccgcaaaacctggcaggagcttttggtaaaatgtccaaggcacataattgaaagaatcagtatctgttccccattgtttggaacaaatcttgaggagaatgaatctgtggagtgatgagctaggatatctggattgagatggcctaggaaaagtggtcctggttatgggttatggagagggctgcttttggggattatttataaagatcagactaggctagtcttaaaatatgtcagttcctgggctctctgaatcctacctggtttcttcaggcttctggacttgctaggcctgcctttgggcaaaaccttagtaattcaggtctggaatggggcttaggaatctattttctgtttttttgtttgtttgtttttgcattcttctattgtaatatatacataaaatttaccattttaaccgtttttaagtacagtttttcagaacgtggaaatcccatcaaaaattggattaaaaaattaaaagataaattgataatttttttaaaagtatacaattttgtgatattaagtacatttcacaatgaggcatctatttttaacagctcccccagatgattctgaggcaagcagaggtagaccatactttgagtgcttacggttccattcagtccttctctatgtatttttcctggggtgagttcttccctatggttttaacaactacctacatgcggccgggcgcggtggctcacgcctgtaatcgcagcactttgggaggccgaggcgggtggatcacgaggtcaggagatcgagaccatcccggctaaaacggtgaaaccccgtctctactaaaaatacaaaaaattagccgggcgtagtggcgggcgcctgtagtcccagctacttgggaggctgaggcaggagaatggcgtgaacccgggaggcggagcttgcagtgagccgagatcccgccactgcactccagcctgggcgacagagcgagactccgtctcaaaaaaaaaaaaaaaaaaaacaaaaaaaaaaacaactacctacatgcttatggtccccaaatatattggtagcccgacatccacagttccagactagcatttttcctgttttgtcattatatcccttagttcttaggtacatcagaatcaacagatctcaaaagcaagctcactaccctcattcaaaacctagtcctatctcatttgatagtaatcattgcttatgctagaaacctcagttgattttctcacttacactcccccacattgaaatgctctcaaagtccagcagcaaattctatcaattacatgtaagtttcattccatacatgtgtccggtgcctggtgggaggttcctatattaaagtcatctaccttccatccattgtctgccttacagccacagtttactcatctgtacaacgaaataacaccactttccttttcctatgcccaaatgagctaaggatgtgaaggtattttgcagaatatagagtgataaagaaaaataaggtgctattacactgtgtgagcatgccgcagaccacaactgcacttgttagactggaggcttatgagaaaaacatctcaccttgtagaaaacatgcatcttactatctctgataacttgtttttcaggatgatgaagtaataaggagtccagcttcagtgctacagagcattttaaaggaagcagtgttgggagggagggatatggaactaatggaaatgaggctagtttatgatggtctcagttatcacagtagatacagagctgagtttacccacaagatcttaatttaggaacactttgaaaccctgtaaccctgctgggtgctctctcctctcactccaccaaggcagcgcacagaaacatacatggggctgtggtaggatgaataatggtcccccaagatgtccacctcctttagcaaaaggggctttgcaaatgagattgaggatcttcagatagggagattaatctggatgatcagaatataccctaagtgcaatcatcagtgttcttataatagggaggcagagggagagctgaccacagtaggagatgtaatgacaaaagcaagaggttggagtgatatgaagaagggctgcaagtcaaggaatgcaggtggcttctagaagttagaaaaagcaagaaaatgtattctcccctgaagcctccagaaggaacagccctgccaacaccttgatttcagatttaatctccagagctgtaagagaataaatcagtattttaaaccactaa

SEQ ID NO: 110881 - DNA, 2456 bp, Homo sapiens
  Payload ID: 1750
  Gene Symbol: BLACE
  Gene Name: B-cell acute lymphoblastic leukemia expressed
  Uniprot ID: A4D250
  ENST ID: ENST00000378120
  CDS Start-End: 1262-1801
ggagcccctccgtccagcagccaccccgtctgggaagtgaggagcgtctccgcccggcagccaccccgtccgggggggaggtggggggggtcagccccccgcccggccagccgccccgtccgggagagatgggggtctcgccatgttgtccaggctggtgttgaactcctgagttcaagtgatcctcctgctttggctccccaaagtgctgggattacagggagcttcacaaatcatacattaaccagagctcctgaaacagaaggccagacgggacatattacagcaggaactggctcaccaccatccagggtcccgcatcccaggaggctgtttaaatcaacacacagactatgcaggtgtctttcccccagcgaacttcccagctcctcggtgggagggtctaacctgccctctccccagtgcgatatttcatgtcaccttctgggaactgcctggctgtggctcgacgcacggtgatggggacctcaccactgtcctgcccatgtgtcagaggaggagcagaggcacagagagacacccagagaagatagccatgcaacagcagaggggaggctggagccaaggacccccgggattgccggccacaccagaactgggccaggtgcagggcgatcctccctgcagacttcagagggggtgcccgcagtgcagagaccacaggggtccccgcgccgccggatgcccgaggatgtgagactgtgcaccatctgcccgctgcccgctgccacgtccgtgtgctcggggcagggaagagctcaagccagtgaccttgaaagagggaacacagctgagaaacgtgtcagatgcccttccgggctggcggcgctggctgcacatctgtctggagtgcgtggatgccagaagtcactgtccatggggtgacagcgcagcctggagctgatgagaggctgggtgcgcgctgcacgtctccagcaggtccccacagcaggctctgctgcaggcatctgggcggaactgagactggacagaccgaggctgccagcagagggaggggcaggaggcctgtcccagggaggcacagagggggtgcggcagggcctcccccagcctctccctcgcctggcacccccaccttccctcctttcctcgtgatcgccttcccttccctttcctttcttcttcccttcagaaggaggagctgtgggcagagggactttggaaagcatggcgttacttacctttcacacctctcagggcttacgccatcctcctgcgaatgatgaaagacatcatccctgcctccagctgggcctcggaagagagcactgatttacagaacgggagctttccccttagcgtggcccccaggtcagagtttcccagacggagggccttggaagattggcttctctcggtgtttctggcagaccaggcagaaagtgaggggcagctcgtgttggaaagagttcgggacacgccgccacccgtgacctctcctagaggtgacggcatatgtgtgagcagagggaaggctccgagcagccccggaggaagtacacatgcgtggctttatctaaccagacatttcccttggagtcctttcccccacggagggtggactgacacctcagaaccctgtgttctggagaccctggggggatcctccctggcagccctgcggggaaacagtctctgggtgcagagcagcggtgcctgtgctttttgtgtttatgagtcactcatcgagcagtctttgcccaatgaaaggtttgaggagctgttacttgggccaagtcctggggaagtgatgaaatagagacggtttgtcttcagtgctggcaacctcccctttttagtcacttctttcctgtctccagagagggtttcctctctggtcatccacttgctcaggcatcagtgttctgattctgcccaaactttcctctcttttaaattatccttcatggctaggatgggagtacttgtttatactaatgtgtaaatgactaaccagctaatattgcttatattctgtgtgggcaggaggctttgcataggcctctcacatgtcccgaggtttgcctttaggcagaggaccgtctcctctgacagcgttaacttaatgcacctgctacgcttaatgaatacttaggcttgatgaatacgcagatgcgccagatcagttctgggtaaaggacaaacaccgtgagcaggacaggtggggtctggagggggaggcagatgcaccaaggcaaggggaaatacctaaagactgttagtgtcagcacagcgtcgcttcaggccgagtaagcaatgcccatccagaaagtggcagatggtggcgtgtggagcaagacatggagagagaagatgaaagatgctcagatcggggctcggcaaactttctctacaaaggccagatgacaaataaaggaacggtggctgtgtgggccacccagggcctgcctgaa

SEQ ID NO: 110882 - DNA, 540 bp, Homo sapiens
  Payload ID: 1750
  Gene Symbol: BLACE
  Gene Name: B-cell acute lymphoblastic leukemia expressed
  Uniprot ID: A4D250
  ENST ID: ENST00000616210
  CDS Start-End: 1-540
atgatgaaagacatcatccctgcctccagctgggcctcggaagagagcactgatttacagaacgggagctttccccttagcgtggcccccaggtcagagtttcccagacggagggccttggaagattggcttctctcggtgtttctggcagaccaggcagaaagtgaggggcagctcgtgttggaaagagttcgggacacgccgccacccgtgacctctcctagaggtgacggcatatgtgtgagcagagggaaggctccgagcagccccggaggaagtacacatgcgtggctttatctaaccagacatttcccttggagtcctttcccccacggagggtggactgacacctcagaaccctgtgttctggagaccctggggggatcctccctggcagccctgcggggaaacagtctctgggtgcagagcagcggtgcctgtgctttttgtgtttatgagtcactcatcgagcagtctttgcccaatgaaaggtttgaggagctgttacttgggccaagtcctggggaagtgatgaaatag

SEQ ID NO: 110883 - DNA, 2819 bp, Homo sapiens
  Payload ID: 1751
  Gene Symbol: BCL10
  Gene Name: B-cell CLL/lymphoma 10
  Uniprot ID: O95999
  ENST ID: ENST00000370580
  CDS Start-End: 739-1440
tttttctttcaaaaatttgtttagtattgtagttaggctgtttgtgtgtatgcatgtgtatgtgtgtatgagtgcgtttgtgtgtgaccaaaacagtaactggcaaacgtaacaacaggaaattgtagggcagggtctgggaaaaggggaggaacccaaggtactgacaagcccagaccggactcccccgaagtgagcaggcagcaaaggctgagagtgccagctgcctgggcactgacggaccccacccacggaaacgatgccttatgaggaagctaacccgggccacttaccgacgacctgcgcaggcgtggcttgaggaaacgcccgctgtgggcggagccacccgaaaggctccggtcgggggcgggaacaggatcggcccgcgggctggcgtcgataggctgccgcagagacagggcgggctctgctaagcgacgcgcctcgccgtggggcggtgcctgcgcctgagcctctacgagagggaaggaacgctgctccgagctccgcgtcgcgtcgcgtagattcgcgtcgccgtcgacctcagaggcggggccggaagcgctacggtttgacccccgagtccctctgttcccgaaggggcggccgtctttctcccgacccgctccgcctcctctccttcttccccattacccggaggccgaagcccccagccagggcggggcggcgcagcccgagctcccggacccggaagaagcgccatctcccgcctccaccatggagcccaccgcaccgtccctcaccgaggaggacctcactgaagtgaagaaggacgccttagaaaatttacgtgtatacctgtgtgagaaaatcatagctgagagacattttgatcatctacgtgcaaaaaaaatactcagtagagaagacactgaagaaatttcttgtcgaacatcaagtagaaaaagggctggaaaattgttagactacttacaggaaaacccaaaaggtctggacacccttgttgaatctattcggcgagaaaaaacacagaacttcctgatacagaagattacagatgaagtgctgaaacttagaaatataaaactagaacatctgaaaggactaaaatgtagcagttgtgaaccttttccagatggagccacgaacaacctctccagatcaaattcagatgagagtaatttctctgaaaaactgagggcatccactgtcatgtaccatccagaaggagaatccagcacgacgccctttttttctactaattcttctctgaatttgcctgttctagaagtaggcagaactgaaaataccatcttctcttcaactacacttcccagacctggggacccaggggctcctcctttgccaccagatctacagttagaagaagaaggaacttgtgcaaactctagtgagatgtttcttcccttaagatcacgtactgtttcacgacaatgacactttattgccttttaatttttaatgatgacaaaaaatgttttaaagaatatgactttttataaaatggctgtaatcatttgtttacatttgatgcatgtcttttaaaatgcaatgtaagcatactttgtaaataggatttttagaattaaaaaagcatacttctaggatagctaactgtaaatcatgttgatcatgtactttttagtaatttctttttttcctttttaaggtctttcagtacttttttaaatattttctattttaagactgattttaatagggaatatatctctatttgagaatagacccttactaggaagaacgttttttcctcagtgcatttgtgctagaaattttcaagagtctaatagtctttgccagtcattcagcagcaaattttcagcattaagctgttcctgttcagtaataaaaccggtcactgatgggaaaactgccaatatagaaaaataaaaatctcttttccactccattgtcgtataggcatgtaaacagcctctttttgatactggaggaacacttgatggagtgtgagccacctaagatctcggtttgccaaaattcatttctaattaaccttactaattatactactttgttaggattttcacattcttggcttaatcattttcattcctaaagaaaaatatcttggcctaaacctcagttattacatgtaatttgatgaggtattttttccttttttcttttttttttttttttttttttgagacagtcttgctctatcgcccaggctggagtgcagtggcgcattctaggctcactgcaacttctgcctcccatgcttacgtgatcctctcacctcagcctctcaagtaatatagctgagactacaagtgtgtgccaccatgcctcactaatttttgtattatttttgtagagacggtgttttgccatgttggccaggctggtcttgaactcctggactcaagcaacctacccagcgtggcctcccaaagtgctgggattacagacacgagccacctcacctagcctgatgagatttttaaaaaatattttctctgtacttttcattctcttttaatgaggaccaatgtacagttgaaataactggaacaaattatttttggtgtgtgtgacaattctgtttttaatgctatttgaacaagtgggccattagccagatttgtctttttgttgtaaaacaaaatttgactaattttacatgtttataaatcttatgctctcactgtttgtttttatttaaattacaattttatctgtttcctgacattgtctcctatatatttctattattaattgcaaaaacatagaaatggaaattttgctatcaacaataaaatttttttaaagta

SEQ ID NO: 110884 - DNA, 774 bp, Homo sapiens
  Payload ID: 1751
  Gene Symbol: BCL10
  Gene Name: B-cell CLL/lymphoma 10
  ENST ID: ENST00000620248
  CDS Start-End: 105-575
ctctccttcttccccattacccggaggccgaagcccccagccagggcggggcggcgcagcccgagctcccggacccggaagaagcgccatctcccgcctccaccatggagcccaccgcaccgtccctcaccgaggaggacctcactgaagtgaagaaggacgccttagaaaatttacgtgtatacctgtgtgagaaaatcatagctgagagacattttgatcatctacgtgcaaaaaaaatactcagtagagaagacactgaagaaatttcttgtcgaacatcaagtagaaaaagggctggaaaattgttagactacttacaggaaaacccaaaaggtctggacacccttgttgaatctattcggcgagaaaaaacacagaacttcctgatacagaagattacagatgaagtgctgaaacttagaaatataaaactagaacatctgaaagatggagccacgaacaacctctccagatcaaattcagatgagagtaatttctctgaaaaactgagggcatccactgtcatgtaccatccagaaggagaatccagcacgacgccctttttctactaattcttctctgaatttgcctgttctagaagtaggcagaactgaaaataccatcttctcttcaactacacttcccagacctggggacccaggggctcctcctttgccaccagatctacagttagaagaagaaggaacttgtgcaaactctagtgagatgtttcttcccttaagatcacgtactgtttcacgacaatgacac

SEQ ID NO: 110885 - DNA, 5942 bp, Homo sapiens
  Payload ID: 1752
  Gene Symbol: BCL11A
  Gene Name: B-cell CLL/lymphoma 11A (zinc finger protein)
  Uniprot ID: Q9H165
  ENST ID: ENST00000335712
  CDS Start-End: 229-2736
ttttttttttttttttgcttaaaaaaaagccatgacggctctcccacaattcatcttccctgcgccatctttgtattatttctaatttattttggatgtcaaaaggcactgatgaagatattttctctggagtctccttctttctaacccggctctcccgatgtgaaccgagccgtcgtccgcccgccgccgccgccgccgccgccgccgcccgccccgcagcccaccatgtctcgccgcaagcaaggcaaaccccagcacttaagcaaacgggaattctcgcccgagcctcttgaagccattcttacagatgatgaaccagaccacggcccgttgggagctccagaaggggatcatgacctcctcacctgtgggcagtgccagatgaacttcccattgggggacattcttatttttatcgagcacaaacggaaacaatgcaatggcagcctctgcttagaaaaagctgtggataagccaccttccccttcaccaatcgagatgaaaaaagcatccaatcccgtggaggttggcatccaggtcacgccagaggatgacgattgtttatcaacgtcatctagaggaatttgccccaaacaggaacacatagcagataaacttctgcactggaggggcctctcctcccctcgttctgcacatggagctctaatccccacgcctgggatgagtgcagaatatgccccgcagggtatttgtaaagatgagcccagcagctacacatgtacaacttgcaaacagccattcaccagtgcatggtttctcttgcaacacgcacagaacactcatggattaagaatctacttagaaagcgaacacggaagtcccctgaccccgcgggttggtatcccttcaggactaggtgcagaatgtccttcccagccacctctccatgggattcatattgcagacaataacccctttaacctgctaagaataccaggatcagtatcgagagaggcttccggcctggcagaagggcgctttccacccactccccccctgtttagtccaccaccgagacatcacttggacccccaccgcatagagcgcctgggggcggaagagatggccctggccacccatcacccgagtgcctttgacagggtgctgcggttgaatccaatggctatggagcctcccgccatggatttctctaggagacttagagagctggcagggaacacgtctagcccaccgctgtccccaggccggcccagccctatgcaaaggttactgcaaccattccagccaggtagcaagccgcccttcctggcgacgccccccctccctcctctgcaatccgcccctcctccctcccagcccccggtcaagtccaagtcatgcgagttctgcggcaagacgttcaaatttcagagcaacctggtggtgcaccggcgcagccacacgggcgagaagccctacaagtgcaacctgtgcgaccacgcgtgcacccaggccagcaagctgaagcgccacatgaagacgcacatgcacaaatcgtcccccatgacggtcaagtccgacgacggtctctccaccgccagctccccggaacccggcaccagcgacttggtgggcagcgccagcagcgcgctcaagtccgtggtggccaagttcaagagcgagaacgaccccaacctgatcccggagaacggggacgaggaggaagaggaggacgacgaggaagaggaagaagaggaggaagaggaggaggaggagctgacggagagcgagagggtggactacggcttcgggctgagcctggaggcggcgcgccaccacgagaacagctcgcggggcgcggtcgtgggcgtgggcgacgagagccgcgccctgcccgacgtcatgcagggcatggtgctcagctccatgcagcacttcagcgaggccttccaccaggtcctgggcgagaagcataagcgcggccacctggccgaggccgagggccacagggacacttgcgacgaagactcggtggccggcgagtcggaccgcatagacgatggcactgttaatggccgcggctgctccccgggcgagtcggcctcggggggcctgtccaaaaagctgctgctgggcagccccagctcgctgagccccttctctaagcgcatcaagctcgagaaggagttcgacctgcccccggccgcgatgcccaacacggagaacgtgtactcgcagtggctcgccggctacgcggcctccaggcagctcaaagatcccttccttagcttcggagactccagacaatcgccttttgcctcctcgtcggagcactcctcggagaacgggagtttgcgcttctccacaccgcccggggagctggacggagggatctcggggcgcagcggcacgggaagtggagggagcacgccccatattagtggtccgggcccgggcaggcccagctcaaaagagggcagacgcagcgacacttgtgagtactgtgggaaagtcttcaagaactgtagcaatctcactgtccacaggagaagccacacgggcgaaaggccttataaatgcgagctgtgcaactatgcctgtgcccagagtagcaagctcaccaggcacatgaaaacgcatggccaggtggggaaggacgtttacaaatgtgaaatttgtaagatgccttttagcgtgtacagtaccctggagaaacacatgaaaaaatggcacagtgatcgagtgttgaataatgatataaaaactgaatagaggtatattaatacccctccctcactcccacctgacaccccctttttcaccactccccttccccatcgccctccagccccactccctgtaggatttttttctagtcccatgtgatttaaacaaacaaacaaacaaacagaagtaacgaagctaagaatatgagagtgcttgtcaccagcacacctgttttttttctttttctttttcttttttctttttccttttttttttttttcctttatgttctcaccgtttgaatgcatgatctgtatggggcaatactattgcattttacgcaaactttgagcctttctcttgtgcaataatttacatgttgtgtatgtttttttttaaacttagacagcatgtatggtatgttatggctattttaaattgtccctaattcgttgctgagcaaacatgttgctgtttccagttccgttctgagagaaaaagagagagagagagaaaaagaccatgctgcatacattctgtaatacatatcatgtacagttttattttataacgtgaggaggaaaaacagtctttggattaaccctctatagacagaatagatagcactgaaaaaaaatctctatgagctaaatgtctgtctctaaagggttaaatgtatcaattggaaaggaagaaaaaaggccttgaattgacaaattaacagaaaaacagaacaagtttattctatcatttggttttaaaatatgagtgccttggatctattaaaaccacatcgatggttctttctacttgttataaacttgtagcttaattcagcattgggtgaggtaataaaccttaggaactagcatataattctatattgtatttctcacaacaatggctacctaaaaagatgacccattatgtcctagttaatcatcatttttcctttagtttaattttataaacaaaactgattataccagtataaaagctactttgctcctggtgagagcttaaaagaaatgggctgttttgcccaaagttttattttttttaaacaatgattaaattgaatgtgtaatgtgcaaaagccctggaacgcaattaaatacactagtaaggagttcattttatgaagatatttgctttaataatgtctttttaaaaatactggcaccaaaagaaatagatccagatctacttggttgtcaagtggacaatcaaatgataaactttaagaccttgtataccatattgaaaggaagaggctgacaataaggtttgacagaggggaacagaagaaaataatatgatttattagcacaacgtggtactatttgccatttaaaactagaacaggtatataagctaatattgatacaatgatgattaactatgaattcttaagacttgcatttaaatgtgacattcttaaaaaaagaagagaaagaattttaagagtagcagtatatatgtctgtgctccctaaaagttgtacttcatttcttttccatacactgtgtgctatttgtgttaacatggaagaggattcattgtttttatttttatttttttaattttttcttttttattaagctagcatctgccccagttggtgttcaaatagcacttgactctgcctgtgatatctgtatcttttctctaatcagagatacagaggttgagtataaaataaacctgctcagataggacaattaagtgcactgtacaattttcccagtttacaggtctatacttaagggaaaagttgcaagaatgctgaaaaaaaattgaacacaatctcattgaggagcattttttaaaaactaaaaaaaaaaaaactttgccagccatttacttgactattgagcttacttacttggacgcaacattgcaagcgctgtgaatggaaacagaatacacttaacatagaaatgaatgattgctttcgcttctacagtgcaaggatttttttgtacaaaacttttttaaatataaatgttaagaaaaattttttttaaaaaacacttcattatgtttaggggggaactgcattttagggttccattgtcttggtggtgttacaagacttgttatccatttaaaaatggtagtggaaattctatgccttggatacacaccgctcttcaggttgtaaaaaaaaaaaacatacattggggaaaggtttaagattatatagtacttaaatataggaaaatgcacactcatgttgattcctatgctaaaatacatttatggtcttttttctgtatttctagaatggtatttgaattaaatgttcatctagtgttaggcactatagtatttatattgaagcttgtatttttaactgttgcttgttctcttaaaaggtatcaatgtaccttttttggtagtggaaaaaaaaaagacaggctgccacagtatatttttttaatttggcaggataatatagtgcaaattatttgtatgcttcaaaaaaaaaaaaaagagagaaacaaaaaagtgtgacattacagatgagaagccatataatggcggtttgggggagcctgctagaatgtcacatggatggctgtcataggggttgtacatatccttttttgttcctttttcctgctgccatactgtatgcagtactgcaagctaataacgttggtttgttatgtagtgtgctttttgtccctttccttctatcaccctacattccagcatcttaccttcatatgcagtaaaagaaagaaagaaaaaaaaaggaaaaaaaaaaaaaaaccaatgttttgcagtttttttcattgccaaaaactaaatggtgctttatatttagattggaaagaatttcatatgcaaagcatattaaagagaaagcccgctttagtcaatacttttttgtaaatggcaatgcagaatattttgttattggccttttctattcctgtaatgaaagctgtttgtcgtaacttgaaattttatcttttactatgggagtcactatttattattgcttatgtgccctgttcaaaacagaggcacttaatttgatcttttatttttctttgtttttatttttttttttatttagatgaccaaaggtcattacaacctggctttttattgtatttgtttctggtctttgttaagttctattggaaaaaccactgtctgtgtttttttggcagttgtctgcattaacctgttcatacacccattttgtccctttattgaaaaaataaaaaaaattaaag

SEQ ID NO: 110886 - DNA, 3959 bp, Homo sapiens
  Payload ID: 1752
  Gene Symbol: BCL11A
  Gene Name: B-cell CLL/lymphoma 11A (zinc finger protein)
  Uniprot ID: Q9H165
  ENST ID: ENST00000356842
  CDS Start-End: 230-2551
tttttttttttttttttgcttaaaaaaaagccatgacggctctcccacaattcatcttccctgcgccatctttgtattatttctaatttattttggatgtcaaaaggcactgatgaagatattttctctggagtctccttctttctaacccggctctcccgatgtgaaccgagccgtcgtccgcccgccgccgccgccgccgccgccgccgcccgccccgcagcccaccatgtctcgccgcaagcaaggcaaaccccagcacttaagcaaacgggaattctcgcccgagcctcttgaagccattcttacagatgatgaaccagaccacggcccgttgggagctccagaaggggatcatgacctcctcacctgtgggcagtgccagatgaacttcccattgggggacattcttatttttatcgagcacaaacggaaacaatgcaatggcagcctctgcttagaaaaagctgtggataagccaccttccccttcaccaatcgagatgaaaaaagcatccaatcccgtggaggttggcatccaggtcacgccagaggatgacgattgtttatcaacgtcatctagaggaatttgccccaaacaggaacacatagcagataaacttctgcactggaggggcctctcctcccctcgttctgcacatggagctctaatccccacgcctgggatgagtgcagaatatgccccgcagggtatttgtaaagatgagcccagcagctacacatgtacaacttgcaaacagccattcaccagtgcatggtttctcttgcaacacgcacagaacactcatggattaagaatctacttagaaagcgaacacggaagtcccctgaccccgcgggttggtatcccttcaggactaggtgcagaatgtccttcccagccacctctccatgggattcatattgcagacaataacccctttaacctgctaagaataccaggatcagtatcgagagaggcttccggcctggcagaagggcgctttccacccactccccccctgtttagtccaccaccgagacatcacttggacccccaccgcatagagcgcctgggggcggaagagatggccctggccacccatcacccgagtgcctttgacagggtgctgcggttgaatccaatggctatggagcctcccgccatggatttctctaggagacttagagagctggcagggaacacgtctagcccaccgctgtccccaggccggcccagccctatgcaaaggttactgcaaccattccagccaggtagcaagccgcccttcctggcgacgccccccctccctcctctgcaatccgcccctcctccctcccagcccccggtcaagtccaagtcatgcgagttctgcggcaagacgttcaaatttcagagcaacctggtggtgcaccggcgcagccacacgggcgagaagccctacaagtgcaacctgtgcgaccacgcgtgcacccaggccagcaagctgaagcgccacatgaagacgcacatgcacaaatcgtcccccatgacggtcaagtccgacgacggtctctccaccgccagctccccggaacccggcaccagcgacttggtgggcagcgccagcagcgcgctcaagtccgtggtggccaagttcaagagcgagaacgaccccaacctgatcccggagaacggggacgaggaggaagaggaggacgacgaggaagaggaagaagaggaggaagaggaggaggaggagctgacggagagcgagagggtggactacggcttcgggctgagcctggaggcggcgcgccaccacgagaacagctcgcggggcgcggtcgtgggcgtgggcgacgagagccgcgccctgcccgacgtcatgcagggcatggtgctcagctccatgcagcacttcagcgaggccttccaccaggtcctgggcgagaagcataagcgcggccacctggccgaggccgagggccacagggacacttgcgacgaagactcggtggccggcgagtcggaccgcatagacgatggcactgttaatggccgcggctgctccccgggcgagtcggcctcggggggcctgtccaaaaagctgctgctgggcagccccagctcgctgagccccttctctaagcgcatcaagctcgagaaggagttcgacctgcccccggccgcgatgcccaacacggagaacgtgtactcgcagtggctcgccggctacgcggcctccaggcagctcaaagatcccttccttagcttcggagactccagacaatcgccttttgcctcctcgtcggagcactcctcggagaacgggagtttgcgcttctccacaccgcccggggagctggacggagggatctcggggcgcagcggcacgggaagtggagggagcacgccccatattagtggtccgggcccgggcaggcccagctcaaaagagggcagacgcagcgacacttgttcttcacacacccccattcggcgtagtacccagagagctcaagatgtgtggcagttttcggatggaagctcgagagcccttaagttctgagaaaatttgaagcccccaggggtggggtggacgcgtgccgcccagtcgacgtcagcgtggtctgtcatcctgctagtttgtgatgttttctgacagtagcctccaagaagccgttgtgcgaagacagagtcctgcagagtccttccagcctaggcctgcagcgccattttatttatattttttaataaaaagtaaaaacaaaaaaacagacccacattggaacagtgaatcagtcccatagagagggcccgtggaccatcgctgtcatgagtgatgccctggcccttctgaaaccagccaacctaattacctgtattgtggaaatgcgcatgagtccccaaccccttgtttctatacattctatgttgtcttttaaaaagtgtgcttaacattgacacaataaatgttggagctttaggtggtgtttgcttgttctttaatttttaatgcttataagacaatgaggctgcttatgattttgtacttctgtacctgtttcctacagacacccatcgggtgggtaggaggaacagatttgagaaatgggcaggagatgtaggaggggaactaggttaccgcttatcagatggcataaattttcaaggagaatcaaaatgcaaaacttgggaataaatcatagcaatatcataattaatgtagtagtaatattgctgtttattaatgctgaagtgtggttttcctaactgtctgacttataatttgcataccattaaataatgcataatatggcacgccgaatcctgtttttcaaatatatgcttttggtggctaccatgcaggatttgaatttgtcttttaatttagcttaggaaagaacatcactgggcgagcggtaaatcctaaagaaggtgataaatgtcagtagtttcttattaaatattctaattttaggttcccaaaccttcaggaaatatatcttaatgcagacaaacaaacataaaacttctttagtacttacatcaggaaatttggggcagattttagaggggggaaattataggaggaaagaagttcacatcagaacagacaatcacagcaatgctctattccttagaaattagtgccacaaataagttacatctacaaacaggtggtaaaaattctttctggcccagttaatttgcacagaacttttctcagtttggtattttttactgcttggagatccagaagagaattagaaacaacatagcaaattaaaataggtttgtcaataatagagctcagacacctgtgtgctgtagattcacatacaggccgtgaacctaagtggggaaaatcctacctatccaccttctggctagattacctagcttagtgaaaagatagccaaataattggcatgtgaattatttcctgcttattcataataaataatgactgtcta

SEQ ID NO: 110887 - DNA, 2697 bp, Homo sapiens
  Payload ID: 1752
  Gene Symbol: BCL11A
  Gene Name: B-cell CLL/lymphoma 11A (zinc finger protein)
  Uniprot ID: Q9H165
  ENST ID: ENST00000358510
  CDS Start-End: 162-2567
tctttgtattatttctaatttattttggatgtcaaaaggcactgatgaagatattttctctggagtctccttctttctaacccggctctcccgatgtgaaccgagccgtcgtccgcccgccgccgccgccgccgccgccgccgcccgccccgcagcccaccatgtctcgccgcaagcaaggcaaaccccagcacttaagcaaacgggaattctcgcccgagcctcttgaagccattcttacagatgatgaaccagaccacggcccgttgggagctccagaaggggatcatgacctcctcacctgtgggcagtgccagatgaacttcccattgggggacattcttatttttatcgagcacaaacggaaacaatgcaatggcagcctctgcttagaaaaagctgtggataagccaccttccccttcaccaatcgagatgaaaaaagcatccaatcccgtggaggttggcatccaggtcacgccagaggatgacgattgtttatcaacgtcatctagaggaatttgccccaaacaggaacacatagcaggtaaagatgagcccagcagctacacatgtacaacttgcaaacagccattcaccagtgcatggtttctcttgcaacacgcacagaacactcatggattaagaatctacttagaaagcgaacacggaagtcccctgaccccgcgggttggtatcccttcaggactaggtgcagaatgtccttcccagccacctctccatgggattcatattgcagacaataacccctttaacctgctaagaataccaggatcagtatcgagagaggcttccggcctggcagaagggcgctttccacccactccccccctgtttagtccaccaccgagacatcacttggacccccaccgcatagagcgcctgggggcggaagagatggccctggccacccatcacccgagtgcctttgacagggtgctgcggttgaatccaatggctatggagcctcccgccatggatttctctaggagacttagagagctggcagggaacacgtctagcccaccgctgtccccaggccggcccagccctatgcaaaggttactgcaaccattccagccaggtagcaagccgcccttcctggcgacgccccccctccctcctctgcaatccgcccctcctccctcccagcccccggtcaagtccaagtcatgcgagttctgcggcaagacgttcaaatttcagagcaacctggtggtgcaccggcgcagccacacgggcgagaagccctacaagtgcaacctgtgcgaccacgcgtgcacccaggccagcaagctgaagcgccacatgaagacgcacatgcacaaatcgtcccccatgacggtcaagtccgacgacggtctctccaccgccagctccccggaacccggcaccagcgacttggtgggcagcgccagcagcgcgctcaagtccgtggtggccaagttcaagagcgagaacgaccccaacctgatcccggagaacggggacgaggaggaagaggaggacgacgaggaagaggaagaagaggaggaagaggaggaggaggagctgacggagagcgagagggtggactacggcttcgggctgagcctggaggcggcgcgccaccacgagaacagctcgcggggcgcggtcgtgggcgtgggcgacgagagccgcgccctgcccgacgtcatgcagggcatggtgctcagctccatgcagcacttcagcgaggccttccaccaggtcctgggcgagaagcataagcgcggccacctggccgaggccgagggccacagggacacttgcgacgaagactcggtggccggcgagtcggaccgcatagacgatggcactgttaatggccgcggctgctccccgggcgagtcggcctcggggggcctgtccaaaaagctgctgctgggcagccccagctcgctgagccccttctctaagcgcatcaagctcgagaaggagttcgacctgcccccggccgcgatgcccaacacggagaacgtgtactcgcagtggctcgccggctacgcggcctccaggcagctcaaagatcccttccttagcttcggagactccagacaatcgccttttgcctcctcgtcggagcactcctcggagaacgggagtttgcgcttctccacaccgcccggggagctggacggagggatctcggggcgcagcggcacgggaagtggagggagcacgccccatattagtggtccgggcccgggcaggcccagctcaaaagagggcagacgcagcgacacttgtgagtactgtgggaaagtcttcaagaactgtagcaatctcactgtccacaggagaagccacacgggcgaaaggccttataaatgcgagctgtgcaactatgcctgtgcccagagtagcaagctcaccaggcacatgaaaacgcatggccaggtggggaaggacgtttacaaatgtgaaatttgtaagatgccttttagcgtgtacagtaccctggagaaacacatgaaaaaatggcacagtgatcgagtgttgaataatgatataaaaactgaatagaggtatattaatacccctccctcactcccacctgacaccccctttttcaccactccccttccccatcgccctccagccccactccctgtaggatttttttctagtcccatgtgatttaaacaaacaaaca

SEQ ID NO: 110888 - DNA, 2427 bp, Homo sapiens
  Payload ID: 1752
  Gene Symbol: BCL11A
  Gene Name: B-cell CLL/lymphoma 11A (zinc finger protein)
  Uniprot ID: Q9H165
  ENST ID: ENST00000359629
  CDS Start-End: 298-1029
tttttttcatctctctctctctctctccctctatctctcttctctctctctccctctttttttttttttttttttttttttttttgcttaaaaaaaagccatgacggctctcccacaattcatcttccctgcgccatctttgtattatttctaatttattttggatgtcaaaaggcactgatgaagatattttctctggagtctccttctttctaacccggctctcccgatgtgaaccgagccgtcgtccgcccgccgccgccgccgccgccgccgccgcccgccccgcagcccaccatgtctcgccgcaagcaaggcaaaccccagcacttaagcaaacgggaattctcgcccgagcctcttgaagccattcttacagatgatgaaccagaccacggcccgttgggagctccagaaggggatcatgacctcctcacctgtgggcagtgccagatgaacttcccattgggggacattcttatttttatcgagcacaaacggaaacaatgcaatggcagcctctgcttagaaaaagctgtggataagccaccttccccttcaccaatcgagatgaaaaaagcatccaatcccgtggaggttggcatccaggtcacgccagaggatgacgattgtttatcaacgtcatctagaggaatttgccccaaacaggaacacatagcagataaacttctgcactggaggggcctctcctcccctcgttctgcacatggagctctaatccccacgcctgggatgagtgcagaatatgccccgcagggtatttgtaaagatgagcccagcagctacacatgtacaacttgcaaacagccattcaccagtgcatggtttctcttgcaacacgcacagaacactcatggattaagaatctacttagaaagcgaacacggaagtcccctgaccccgcgggttcttcacacacccccattcggcgtagtacccagagagctcaagatgtgtggcagttttcggatggaagctcgagagcccttaagttctgagaaaatttgaagcccccaggggtggggtggacgcgtgccgcccagtcgacgtcagcgtggtctgtcatcctgctagtttgtgatgttttctgacagtagcctccaagaagccgttgtgcgaagacagagtcctgcagagtccttccagcctaggcctgcagcgccattttatttatattttttaataaaaagtaaaaacaaaaaaacagacccacattggaacagtgaatcagtcccatagagagggcccgtggaccatcgctgtcatgagtgatgccctggcccttctgaaaccagccaacctaattacctgtattgtggaaatgcgcatgagtccccaaccccttgtttctatacattctatgttgtcttttaaaaagtgtgcttaacattgacacaataaatgttggagctttaggtggtgtttgcttgttctttaatttttaatgcttataagacaatgaggctgcttatgattttgtacttctgtacctgtttcctacagacacccatcgggtgggtaggaggaacagatttgagaaatgggcaggagatgtaggaggggaactaggttaccgcttatcagatggcataaattttcaaggagaatcaaaatgcaaaacttgggaataaatcatagcaatatcataattaatgtagtagtaatattgctgtttattaatgctgaagtgtggttttcctaactgtctgacttataatttgcataccattaaataatgcataatatggcacgccgaatcctgtttttcaaatatatgcttttggtggctaccatgcaggatttgaatttgtcttttaatttagcttaggaaagaacatcactgggcgagcggtaaatcctaaagaaggtgataaatgtcagtagtttcttattaaatattctaattttaggttcccaaaccttcaggaaatatatcttaatgcagacaaacaaacataaaacttctttagtacttacatcaggaaatttggggcagattttagaggggggaaattataggaggaaagaagttcacatcagaacagacaatcacagcaatgctctattccttagaaattagtgccacaaataagttacatctacaaacaggtggtaaaaattctttctggcccagttaatttgcacagaacttttctcagtttggtattttttactgcttggagatccagaagagaattagaaacaacatagcaaattaaaataggtttgtcaataatagagctcagacacctgtgtgctgtagattcacatacaggccgtgaacctaagtggggaaaatcctacctatccaccttctggctagattacctagcttagtgaaaagatagccaaataattggcatgtgaattatttcctgcttattcataataaataatgactgtcta

SEQ ID NO: 110889 - DNA, 756 bp, Homo sapiens
  Payload ID: 1752
  Gene Symbol: BCL11A
  Gene Name: B-cell CLL/lymphoma 11A (zinc finger protein)
  ENST ID: ENST00000409351
  CDS Start-End: 231-659
ttttttttttttttttttgcttaaaaaaaagccatgacggctctcccacaattcatcttccctgcgccatctttgtattatttctaatttattttggatgtcaaaaggcactgatgaagatattttctctggagtctccttctttctaacccggctctcccgatgtgaaccgagccgtcgtccgcccgccgccgccgccgccgccgccgccgcccgccccgcagcccaccatgtctcgccgcaagcaaggcaaaccccagcacttaagcaaacgggaattctcgcccgagcctcttgaagccattcttacagatgatgaaccagaccacggcccgttgggagctccagaaggggatcatgacctcctcacctgtgggcagtgccagatgaacttcccattgggggacattcttatttttatcgagcacaaacggaaacaatgcaatggcagcctctgcttagaaaaagctgtggataagccaccttccccttcaccaatcgagatgaaaaaagcatccaatcccgtggaggttggcatccaggtcacgccagaggatgacgattgtttatcaacgtcatctagaggaatttgccccaaacaggaacacatagcagctcagactgaactggaggatgtatttgtgtaccttatggtgtaattgtaaatgagactataaattatagtatgctattatgactacttatttttcttttctctttatttatgtgattctgaataaaaacgactgacttctg

SEQ ID NO: 110890 - DNA, 1508 bp, Homo sapiens
  Payload ID: 1752
  Gene Symbol: BCL11A
  Gene Name: B-cell CLL/lymphoma 11A (zinc finger protein)
  ENST ID: ENST00000489516
  CDS Start-End: 149-724
gcggatcagacgcggcgcgcggcggtgtgaagttacagcccggccagccgagcctcttgaagccattcttacagatgatgaaccagaccacggcccgttgggagctccagaaggggatcatgacctcctcacctgtgggcagtgccagatgaacttcccattgggggacattcttatttttatcgagcacaaacggaaacaatgcaatggcagcctctgcttagaaaaagctgtggataagccaccttccccttcaccaatcgagatgaaaaaagcatccaatcccgtggaggttggcatccaggtcacgccagaggatgacgattgtttatcaacgtcatctagaggaatttgccccaaacaggaacacatagcagataaacttctgcactggaggggcctctcctcccctcgttctgcacatggagctctaatccccacgcctgggatgagtgcagaatatgccccgcagggtatttgtaaagatgagcccagcagctacacatgtacaacttgcaaacagccattcaccagtgcatggtttctcttgcaacacgcacagaacactcatggattaagaatctacttagaaagcgaacacggaagtcccctgaccccgcgggttcttcacacacccccattcggcgtagtacccagagagctcaagatgtgtggcagttttcggatggaagctcgagagcccttaagttctgagaaaatttgaagcccccaggggtggggtggacgcgtgccgcccagtcgacgtcagcgtggtctgtcatcctgctagtttgtgatgttttctgacagtagcctccaagaagccgttgtgcgaagacagagtcctgcagagtccttccagcctaggcctgcagcgccattttatttatattttttaataaaaagtaaaaacaaaaaaacagacccacattggaacagtgaatcagtcccatagagagggcccgtggaccatcgctgtcatgagtgatgccctggcccttctgaaaccagccaacctaattacctgtattgtggaaatgcgcatgagtccccaaccccttgtttctatacattctatgttgtcttttaaaaagtgtgcttaacattgacacaataaatgttggagctttaggtggtgtttgcttgttctttaatttttaatgcttataagacaatgaggctgcttatgattttgtacttctgtacctgtttcctacagacacccatcgggtgggtaggaggaacagatttgagaaatgggcaggagatgtaggaggggaactaggttaccgcttatcagatggcataaattttcaaggagaatcaaaatgcaaaacttgggaataaatcatagcaatatcataattaatgtagtagtaatattgctgtttattaatgctgaagtgtggttttcctaactgtctgacttataatttgcataccattaaataatgcataatatggcacgccgaatcctgtttttcaaatatatgcttttggtggctacc

SEQ ID NO: 110891 - DNA, 567 bp, Homo sapiens
  Payload ID: 1752
  Gene Symbol: BCL11A
  Gene Name: B-cell CLL/lymphoma 11A (zinc finger protein)
  ENST ID: ENST00000479026
  CDS Start-End: 1-52
gaaaaaatggcacagtgatcgagtgttgaataatgatataaaaactgaatagaggttcttcacacacccccattcggcgtagtacccagagagctcaagatgtgtggcagttttcggatggaagctcgagagcccttaagttctgagaaaatttgaagcccccaggggtggggtggacgcgtgccgcccagtcgacgtcagcgtggtctgtcatcctgctagtttgtgatgttttctgacagtagcctccaagaagccgttgtgcgaagacagagtcctgcagagtccttccagcctaggcctgcagcgccattttatttatattttttaataaaaagtaaaaacaaaaaaacagacccacattggaacagtgaatcagtcccatagagagggcccgtggaccatcgctgtcatgagtgatgccctggcccttctgaaaccagccaacctaattacctgtattgtggaaatgcgcatgagtccccaaccccttgtttctatacattctatgttgtcttttaaaaagtgtgcttaacattgacacaataaatgttggagctttaggtg

SEQ ID NO: 110892 - DNA, 2316 bp, Homo sapiens
  Payload ID: 1752
  Gene Symbol: BCL11A
  Gene Name: B-cell CLL/lymphoma 11A (zinc finger protein)
  ENST ID: ENST00000631857
  CDS Start-End: 238-741
tttttttttttttttttttttttttgcttaaaaaaaagccatgacggctctcccacaattcatcttccctgcgccatctttgtattatttctaatttattttggatgtcaaaaggcactgatgaagatattttctctggagtctccttctttctaacccggctctcccgatgtgaaccgagccgtcgtccgcccgccgccgccgccgccgccgccgccgcccgccccgcagcccaccatgtctcgccgcaagcaaggcaaaccccagcacttaagcaaacgggaattctcgcccgagcctcttgaagccattcttacagatgatgaaccagaccacggcccgttgggagctccagaaggggatcatgacctcctcacctgtgggcagtgccagatgaacttcccattgggggacattcttatttttatcgagcacaaacggaaacaatgcaatggcagcctctgcttagaaaaagctgtggataagccaccttccccttcaccaatcgagatgaaaaaagcatccaatcccgtggaggttggcatccaggtcacgccagaggatgacgattgtttatcaacgtcatctagaggaatttgccccaaacaggaacacatagcaggtaacccaagggggagctcagagaagagtccaggctgccagtgcaaaggtccagccctgtcgccaaggagaccctcagggaaatgcacaggcctccagctattcccacggcccctgtagctgagcgccagcttcttcctgggccaagctgaggctgtttcctgccgtgtccattctcctagcaacgcttctctttggccagtttgccatagtacctgagataaacttctgcactggaggggcctctcctcccctcgttctgcacatggagctctaatccccacgcctgggatgagtgcagaatatgccccgcagggtatttgtaaagatgagcccagcagctacacatgtacaacttgcaaacagccattcaccagtgcatggtttctcttgcaacacgcacagaacactcatggattaagaatctacttagaaagcgaacacggaagtcccctgaccccgcggagcaacctggtggtgcaccggcgcagccacacgggcgagaagccctacaagtgcaacctgtgcgaccacgcgtgcacccaggccagcaagctgaagcgccacatgaagacgcacatgcacaaatcgtcccccatgacggtcaagtccgacgacggtctctccaccgccagctccccggaacccggcaccagcgacttggtgggcagcgccagcagcgcgctcaagtccgtggtggccaagttcaagagcgagaacgaccccaacctgatcccggagaacggggacgaggaggaagaggaggacgacgaggaagaggaagaagaggaggaagaggaggaggaggagctgacggagagcgagagggtggactacggcttcgggctgagcctggaggcggcgcgccaccacgagaacagctcgcggggcgcggtcgtgggcgtgggcgacgagagccgcgccctgcccgacgtcatgcagggcatggtgctcagctccatgcagcacttcagcgaggccttccaccaggtcctgggcgagaagcataagcgcggccacctggccgaggccgagggccacagggacacttgcgacgaagactcggtggccggcgagtcggaccgcatagacgatggcactgttaatggccgcggctgctccccgggcgagtcggcctcggggggcctgtccaaaaagctgctgctgggcagccccagctcgctgagccccttctctaagcgcatcaagctcgagaaggagttcgacctgcccccggccgcgatgcccaacacggagaacgtgtactcgcagtggctcgccggctacgcggcctccaggcagctcaaagatcccttccttagcttcggagactccagacaatcgccttttgcctcctcgtcggagcactcctcggagaacgggagtttgcgcttctccacaccgcccggggagctggacggagggatctcggggcgcagcggcacgggaagtggagggagcacgccccatattagtggtccgggcccgggcaggcccagctcaaaagagggcagacgcagcgacacttgttcttcacacacccccattcggcgtagtacccagagagctcaagatgtgtggcagttttcggatggaagctcgagagcccttaagttctgagaaaatttgaagcccccaggggtggggtggacgcgtgccgcccagtcgacgtcagcgtggtctgtcatcctgcta

SEQ ID NO: 110893 - DNA, 7603 bp, Homo sapiens
  Payload ID: 1753
  Gene Symbol: BCL11B
  Gene Name: B-cell CLL/lymphoma 11B (zinc finger protein)
  Uniprot ID: Q9C0K0
  ENST ID: ENST00000345514
  CDS Start-End: 268-2739
ttttcttgcttttcttcccttttttttctttttgcaaacaaaacaaaaaacagcatagaagaaagagcaaaataaagaagaagaagaggaggaagagagggaaagagaggaagggaaaaaaaacaccaacccgggcagaggaggaggtgcggcggcggcggcggcggcggcagcggcggcagcggcgcggcggcggctcggaccccctcccccggctccccccatcagtgcagctctccgggcgatgccagaatagatgccggggcaatgtcccgccgcaaacagggcaacccgcagcacttgtcccagagggagctcatcaccccagaggctgaccatgtggaggccgccatcctcgaagaagacgagggtctggagatagaggagccaagtggcctggggctgatggtgggtggccccgaccctgacctgctcacctgtggccagtgtcaaatgaacttccccttgggggacatcctggtttttatagagcacaaaaggaagcagtgtggcggcagcttgggtgcctgctatgacaaggccctggacaaggacagcccgccaccctcctcacgctccgagctcaggaaagtgtccgagccggtggagatcgggatccaagtcacccccgacgaagatgaccacctgctctcacccacgaaaggcatctgtcccaagcaggagaacattgcaggtaaagatgagccttccagctacatttgcacaacatgcaagcagcccttcaacagcgcgtggttcctgctgcagcacgcgcagaacacgcacggcttccgcatctacctggagcccgggccggccagcagctcgctcacgccgcggctcaccatcccgccgccgctcgggccggaggccgtggcgcagtccccgctcatgaatttcctgggcgacagcaaccccttcaacctgctgcgcatgacgggccccatcctgcgggaccacccgggcttcggcgagggccgcctgccgggcacgccgcctctcttcagtcccccgccgcgccaccacctggacccgcaccgcctcagtgccgaggagatggggctcgtcgcccagcaccccagtgccttcgaccgagtcatgcgcctgaaccccatggccatcgactcgcccgccatggacttctcgcggcggctccgcgagctggcgggcaacagctccacgccgccgcccgtgtccccgggccgcggcaaccctatgcaccggctcctgaaccccttccagcccagccccaagtccccgttcctgagcacgccgccgctgccgcccatgccccctggcggcacgccgcccccgcagccgccagccaagagcaagtcgtgcgagttctgcggcaagaccttcaagttccagagcaatctcatcgtgcaccggcgcagtcacacgggcgagaagccctacaagtgccagctgtgcgaccacgcgtgctcgcaggccagcaagctcaagcgccacatgaagacgcacatgcacaaggccggctcgctggccggccgctccgacgacgggctctcggccgccagctcccccgagcccggcaccagcgagctggcgggcgagggcctcaaggcggccgacggtgacttccgccaccacgagagcgacccgtcgctgggccacgagccggaggaggaggacgaggaggaggaggaggaggaggaggagctgctactggagaacgagagccggcccgagtcgagcttcagcatggactcggagctgagccgcaaccgcgagaacggcggtggtggggtgcccggggtcccgggcgcggggggcggcgcggccaaggcgctggctgacgagaaggcgctggtgctgggcaaggtcatggagaacgtgggcctaggcgcactgccgcagtacggcgagctcctggccgacaagcagaagcgcggcgccttcctgaagcgtgcggcgggcggcggggacgcgggcgacgacgacgacgcgggcggctgcggggacgcgggcgcgggcggcgcggtcaacgggcgcgggggcggcttcgcgccaggcaccgagcccttccccgggctcttcccgcgcaagcccgcgccgctgcccagccccgggctcaacagcgccgccaagcgcatcaaggtggagaaggacctggagctgccgcccgccgcgctcatcccgtccgagaacgtgtactcgcagtggctggtgggctacgcggcgtcgcggcacttcatgaaggaccccttcctgggcttcacggacgcacgacagtcgcccttcgccacgtcgtccgagcactcgtccgagaacggcagcctgcgcttctccacgccgcccggggacctgctggacggcggcctctcgggccgcagcggcacggccagcggaggcagcaccccgcacctgggcggcccgggccccgggcggcccagctccaaggagggccgccgcagcgacacgtgcgagtactgcggcaaggtgttcaagaactgcagcaacttgacggtgcaccggcggagccacaccggcgagcggccttacaagtgcgagctgtgcaactacgcgtgcgcgcagagcagcaagctcacgcgccacatgaagacgcacgggcagatcggcaaggaggtgtaccgctgcgacatctgccagatgcccttcagcgtctacagcaccctggagaaacacatgaaaaagtggcacggcgagcacttgctgactaacgacgtcaaaatcgagcaggccgagaggagctaagcgcgcgggccccggcgccccgcacctgtacagtggaaccgttgccaaccgagagaatgctgacctgacttgcctccgtgtcaccgccaccccgcaccccgcgtgtccccggggcccaggggaggcggcactccaacctaacctgtgtctgcgaagtcctatggaaacccgagggttgattaaggcagtacaaattgtggagccttttaactgtgcaataatttctgtatttattgggttttgtaatttttttggcatgtgcaggtactttttattattattttttctgtttgaattcctttaagagattttgttgggtatccatcccttctttgttttttttttaacccggtagtagcctgagcaatgactcgcaagcaatgttagaggggaagcatatcttttaaattataatttggggggaggggtggtgctgcttttttgaaatttaagctaagcatgtgtaatttcttgtgaagaagccaacactcaaatgacttttaaagttgtttactttttcattccttccttttttttgtcctgaaataaaaagtggcatgcagttttttttttaattattttttaattttttttttggtttttgtttttggggtggggggtgtggatgtacagcggataacaatctttcaagtcgtagcactttgtttcagaactggaatggagatgtagcactcatgtcgtcccgagtcaagcggccttttctgtgttgatttcggctttcatattacataagggaaaccttgagtggtggtgctgggggaggcaccccacagactcagcgccgccagagatagggtttttggagggctcctctgggaaatggcccgacagcattctgaggttgtgcatgaccagcagatactatcctgttggtgtgccctggggtgccatggctgctattcgctgtagattaggctacataaaatgggctgagggtacctttttggggagatggggtggcctgcagtgacacagaaaggaagaaactagcggtgttcttttaggcgttttctggcttgacggcttctctctttttttaaatcacccccaccacataaatctcaaatcctatgttgctacaaggggtcatccatcatttcccaagcagacgaatgccctaattaattgaagttagtgttctctcatttaatgcacactgatgatattgtagggatgggtggggtggggatcttgcaaatttctattctcttttactgaaaaagcaggggatgagttccatcagaaggtgcccagcgctacttcccaggtttttattttttttttcctatctcattaggttggaaggtactaaatattgaactgttaagattagacatttgaattctgttgacccgcactttaaagcttttgtttgcatttaaattaaatggcttctaaacaagaaattgcagcatattcttctctttggcccagaggtgggttaaactgtaagggacagctgagattgagtgtcagtattgctaagcgtggcattcacaatactggcactataaagaacaaaataaaataataatttataggacagtttttctactgccattcaatttgatgtgagtgccttgaaaactgatcttcctatttgagtctcttgagacaaatgcaaaactttttttttgaaatgaaaagactttttaaaaaagtaaaacaagaaaagtacattctttagaaactaacaaagccacatttactttaagtaaaaaaaaaaaaaattctggttgaagatagaggatatgaaatgccataagacccaatcaaatgaagaaataaacccagcacaaccttggacatccattagctgaattatcctcagccccttttgtttttgggacaacgctgcttagatatggagtggaggtgatttactgctgaattaaaactcaagtgacacaagttacaagttgatatcgttgaatgaaaagcaaaacaaaaacaattcaggaacaacggctaattttttctaaagttaaatttagtgcactctgtcttaaaaatacgtttacagtattgggtacatacaagggtaaaaaaaaaattgtgtgtatgtgtgttggagcgatctttttttttcaaagtttgcttaataggttatacaaaaatgccacagtggccgcgtgtatattgttttcttttggtgacggggttttagtatatattatatatattaaaatttcttgattactgtaaaagtggaccagtatttgtaataatcgagaatgcctgggcattttacaaaacaagaaaaaaaatacccttttcttttccttgaaaatgttgcagtaaaatttaaatggtgggtctataaatttgttcttgttacagtaactgtaaagtcggagttttagtaaatttttttctgccttgggtgttgaatttttatttcaaaaaaaatgtatagaaacttgtatttggggattcaaaggggattgctacaccatgtagaaaaagtatgtagaaaaaaagtgcttaatattgttattgctttgcagaaaaaaaaaaaatcacatttctgacctgtacttatttttctcttcccgcctccctctggaatggatatattggttggttcatatgatgtaggcacttgctgtatttttactggagctcgtaattttttaactgtaagcttgtccttttaaagggatttaatgtacctttttgttagtgaatttggaaataaaaagaaaaaaaaaacaaaaacaaacaggctgccataatatatttttttaatttggcaggataaaatattgcaaaaaaaacacatttgtatgttaagtcctattgtacaggagaaaaagggttgtttgacaacctttgagaaaaagaaacaaaaggaagtagttaaatgctttggttcacaaatcatttagttgtatatattttttgtcggaattggcctacacagagaaccgttcgtgttgggcttctctctgaacgccccgaaccttgcatcaaggctccttggtgtggccacagcagaccagatgggaaattatttgtgttgagtggaaaaaaatcagtttttgtaaagatgtcagtaacattccacatcgtcctccctttctctaagaggccatctctaagatgtcagatgtagaggagagagagcgagagaacatcttccttctctaccatcactcctgtggcggtcaccaccaccacctctcccgcccttaccagcagaaagcaatgcaaactgagctgctttagtccttgagaaattgtgaaacaaacacaaatatcataaaaggagctggtgattcagctgggtccaggtgaagtgacctgctgttgagaccggtacaaattggatttcaggaaggagactccatcacagccaggacctttcgtgccatggagagtgttggcctcttgtctttcttccctgctttgctgctttgctctctgaaacctacattccgtcagtttccgaatgcgagggcctgggatgaatttggtgcctttccatatctcgttctctctccttcccctgcgtttcctctccatccttcatcctccattggtcctttttttttctttcattttttatttaatttcttttcttcctgtctgttcctcccctaatcctctattttatttttattttttgtaaagccaagtagctttaagataaagtggtggtcttttggatgagggaataatgcatttttaaataaaataccaatatcaggaagccattttttatttcaggaaatgtaagaaaccattatttcaggttatgaaagtataaccaagcatccttttgggcaattccttaccaaatgcagaagcttttctgttcgatgcactctttcctccttgccacttacctttgcaaagttaaaaaaaaggggggagggaatgggagagaaagctgagatttcagtttcctactgcagtttcctacctgcagatccaggggctgctgttgcctttggatgccccactgaggtcctagagtgcctccagggtggtcttcctgtagtcataacagctagccagtgctcaccagcttaccagattgccaggactaagccatcccaaagcacaagcattgtgtgtctctgtgactgcagagaagagagaattttgcttctgttttgtgtttaaaaaaccaacacggaagcagatgatcccgagagagaggcctctagcatgggtgacccagccgacctcaggccggtttccgcactgccacaactttgttcaaagttgcccccaattggaacctgccacttggcattagagggtctttcatggggagagaaggagactgaattactctaagcaaaatgtgaaaagtaaggaaatcagcctttcatcccggtcctaagtaaccgtcagccgaaggtctcgtggaacacaggcaaacccgtgattttggtgctccttgtaactcagccctgcaaagcaaagtcccattgatttaagttgtttgcatttgtactggcaaggcaaaatatttttattaccttttctattacttattgtatgagcttttgttgtttacttggaggttttgtcttttactacaagtttggaactatttattattgcttggtatttgtgctctgtttaagaaacaggcacttttttttattatggataaaatgttgagatgacaggaggtcatttcaatatggcttagtaaaatatttattgttcctttattctctgtacaagattttgggcctctttttttccttaatgtcacaatgttgagttcagcatgtgtctgccatttcatttgtacgcttgttcaaaaccaagtttgttctggtttcaagttataaaaataaattggacatttaacttgatctccaaa

SEQ ID NO: 110894 - DNA, 7559 bp, Homo sapiens
  Payload ID: 1753
  Gene Symbol: BCL11B
  Gene Name: B-cell CLL/lymphoma 11B (zinc finger protein)
  Uniprot ID: Q9C0K0
  ENST ID: ENST00000357195
  CDS Start-End: 11-2695
tgccggggcaatgtcccgccgcaaacagggcaacccgcagcacttgtcccagagggagctcatcaccccagaggctgaccatgtggaggccgccatcctcgaagaagacgagggtctggagatagaggagccaagtggcctggggctgatggtgggtggccccgaccctgacctgctcacctgtggccagtgtcaaatgaacttccccttgggggacatcctggtttttatagagcacaaaaggaagcagtgtggcggcagcttgggtgcctgctatgacaaggccctggacaaggacagcccgccaccctcctcacgctccgagctcaggaaagtgtccgagccggtggagatcgggatccaagtcacccccgacgaagatgaccacctgctctcacccacgaaaggcatctgtcccaagcaggagaacattgcagggccgtgcaggcctgcccagctgccagcggtggcccccatagctgcctcctcccaccctcactcatccgtgatcacttcacctctgcgtgccctgggcgctctcccgccctgcctccccctgccgtgctgcagcgcgcgcccggtctcgggtgacgggactcagggtgagggtcagacggaggctccctttggatgccagtgtcagttgtcaggtaaagatgagccttccagctacatttgcacaacatgcaagcagcccttcaacagcgcgtggttcctgctgcagcacgcgcagaacacgcacggcttccgcatctacctggagcccgggccggccagcagctcgctcacgccgcggctcaccatcccgccgccgctcgggccggaggccgtggcgcagtccccgctcatgaatttcctgggcgacagcaaccccttcaacctgctgcgcatgacgggccccatcctgcgggaccacccgggcttcggcgagggccgcctgccgggcacgccgcctctcttcagtcccccgccgcgccaccacctggacccgcaccgcctcagtgccgaggagatggggctcgtcgcccagcaccccagtgccttcgaccgagtcatgcgcctgaaccccatggccatcgactcgcccgccatggacttctcgcggcggctccgcgagctggcgggcaacagctccacgccgccgcccgtgtccccgggccgcggcaaccctatgcaccggctcctgaaccccttccagcccagccccaagtccccgttcctgagcacgccgccgctgccgcccatgccccctggcggcacgccgcccccgcagccgccagccaagagcaagtcgtgcgagttctgcggcaagaccttcaagttccagagcaatctcatcgtgcaccggcgcagtcacacgggcgagaagccctacaagtgccagctgtgcgaccacgcgtgctcgcaggccagcaagctcaagcgccacatgaagacgcacatgcacaaggccggctcgctggccggccgctccgacgacgggctctcggccgccagctcccccgagcccggcaccagcgagctggcgggcgagggcctcaaggcggccgacggtgacttccgccaccacgagagcgacccgtcgctgggccacgagccggaggaggaggacgaggaggaggaggaggaggaggaggagctgctactggagaacgagagccggcccgagtcgagcttcagcatggactcggagctgagccgcaaccgcgagaacggcggtggtggggtgcccggggtcccgggcgcggggggcggcgcggccaaggcgctggctgacgagaaggcgctggtgctgggcaaggtcatggagaacgtgggcctaggcgcactgccgcagtacggcgagctcctggccgacaagcagaagcgcggcgccttcctgaagcgtgcggcgggcggcggggacgcgggcgacgacgacgacgcgggcggctgcggggacgcgggcgcgggcggcgcggtcaacgggcgcgggggcggcttcgcgccaggcaccgagcccttccccgggctcttcccgcgcaagcccgcgccgctgcccagccccgggctcaacagcgccgccaagcgcatcaaggtggagaaggacctggagctgccgcccgccgcgctcatcccgtccgagaacgtgtactcgcagtggctggtgggctacgcggcgtcgcggcacttcatgaaggaccccttcctgggcttcacggacgcacgacagtcgcccttcgccacgtcgtccgagcactcgtccgagaacggcagcctgcgcttctccacgccgcccggggacctgctggacggcggcctctcgggccgcagcggcacggccagcggaggcagcaccccgcacctgggcggcccgggccccgggcggcccagctccaaggagggccgccgcagcgacacgtgcgagtactgcggcaaggtgttcaagaactgcagcaacttgacggtgcaccggcggagccacaccggcgagcggccttacaagtgcgagctgtgcaactacgcgtgcgcgcagagcagcaagctcacgcgccacatgaagacgcacgggcagatcggcaaggaggtgtaccgctgcgacatctgccagatgcccttcagcgtctacagcaccctggagaaacacatgaaaaagtggcacggcgagcacttgctgactaacgacgtcaaaatcgagcaggccgagaggagctaagcgcgcgggccccggcgccccgcacctgtacagtggaaccgttgccaaccgagagaatgctgacctgacttgcctccgtgtcaccgccaccccgcaccccgcgtgtccccggggcccaggggaggcggcactccaacctaacctgtgtctgcgaagtcctatggaaacccgagggttgattaaggcagtacaaattgtggagccttttaactgtgcaataatttctgtatttattgggttttgtaatttttttggcatgtgcaggtactttttattattattttttctgtttgaattcctttaagagattttgttgggtatccatcccttctttgttttttttttaacccggtagtagcctgagcaatgactcgcaagcaatgttagaggggaagcatatcttttaaattataatttggggggaggggtggtgctgcttttttgaaatttaagctaagcatgtgtaatttcttgtgaagaagccaacactcaaatgacttttaaagttgtttactttttcattccttccttttttttgtcctgaaataaaaagtggcatgcagttttttttttaattattttttaattttttttttggtttttgtttttggggtggggggtgtggatgtacagcggataacaatctttcaagtcgtagcactttgtttcagaactggaatggagatgtagcactcatgtcgtcccgagtcaagcggccttttctgtgttgatttcggctttcatattacataagggaaaccttgagtggtggtgctgggggaggcaccccacagactcagcgccgccagagatagggtttttggagggctcctctgggaaatggcccgacagcattctgaggttgtgcatgaccagcagatactatcctgttggtgtgccctggggtgccatggctgctattcgctgtagattaggctacataaaatgggctgagggtacctttttggggagatggggtggcctgcagtgacacagaaaggaagaaactagcggtgttcttttaggcgttttctggcttgacggcttctctctttttttaaatcacccccaccacataaatctcaaatcctatgttgctacaaggggtcatccatcatttcccaagcagacgaatgccctaattaattgaagttagtgttctctcatttaatgcacactgatgatattgtagggatgggtggggtggggatcttgcaaatttctattctcttttactgaaaaagcaggggatgagttccatcagaaggtgcccagcgctacttcccaggtttttattttttttttcctatctcattaggttggaaggtactaaatattgaactgttaagattagacatttgaattctgttgacccgcactttaaagcttttgtttgcatttaaattaaatggcttctaaacaagaaattgcagcatattcttctctttggcccagaggtgggttaaactgtaagggacagctgagattgagtgtcagtattgctaagcgtggcattcacaatactggcactataaagaacaaaataaaataataatttataggacagtttttctactgccattcaatttgatgtgagtgccttgaaaactgatcttcctatttgagtctcttgagacaaatgcaaaactttttttttgaaatgaaaagactttttaaaaaagtaaaacaagaaaagtacattctttagaaactaacaaagccacatttactttaagtaaaaaaaaaaaaaattctggttgaagatagaggatatgaaatgccataagacccaatcaaatgaagaaataaacccagcacaaccttggacatccattagctgaattatcctcagccccttttgtttttgggacaacgctgcttagatatggagtggaggtgatttactgctgaattaaaactcaagtgacacaagttacaagttgatatcgttgaatgaaaagcaaaacaaaaacaattcaggaacaacggctaattttttctaaagttaaatttagtgcactctgtcttaaaaatacgtttacagtattgggtacatacaagggtaaaaaaaaaattgtgtgtatgtgtgttggagcgatctttttttttcaaagtttgcttaataggttatacaaaaatgccacagtggccgcgtgtatattgttttcttttggtgacggggttttagtatatattatatatattaaaatttcttgattactgtaaaagtggaccagtatttgtaataatcgagaatgcctgggcattttacaaaacaagaaaaaaaatacccttttcttttccttgaaaatgttgcagtaaaatttaaatggtgggtctataaatttgttcttgttacagtaactgtaaagtcggagttttagtaaatttttttctgccttgggtgttgaatttttatttcaaaaaaaatgtatagaaacttgtatttggggattcaaaggggattgctacaccatgtagaaaaagtatgtagaaaaaaagtgcttaatattgttattgctttgcagaaaaaaaaaaaatcacatttctgacctgtacttatttttctcttcccgcctccctctggaatggatatattggttggttcatatgatgtaggcacttgctgtatttttactggagctcgtaattttttaactgtaagcttgtccttttaaagggatttaatgtacctttttgttagtgaatttggaaataaaaagaaaaaaaaaacaaaaacaaacaggctgccataatatatttttttaatttggcaggataaaatattgcaaaaaaaacacatttgtatgttaagtcctattgtacaggagaaaaagggttgtttgacaacctttgagaaaaagaaacaaaaggaagtagttaaatgctttggttcacaaatcatttagttgtatatattttttgtcggaattggcctacacagagaaccgttcgtgttgggcttctctctgaacgccccgaaccttgcatcaaggctccttggtgtggccacagcagaccagatgggaaattatttgtgttgagtggaaaaaaatcagtttttgtaaagatgtcagtaacattccacatcgtcctccctttctctaagaggccatctctaagatgtcagatgtagaggagagagagcgagagaacatcttccttctctaccatcactcctgtggcggtcaccaccaccacctctcccgcccttaccagcagaaagcaatgcaaactgagctgctttagtccttgagaaattgtgaaacaaacacaaatatcataaaaggagctggtgattcagctgggtccaggtgaagtgacctgctgttgagaccggtacaaattggatttcaggaaggagactccatcacagccaggacctttcgtgccatggagagtgttggcctcttgtctttcttccctgctttgctgctttgctctctgaaacctacattccgtcagtttccgaatgcgagggcctgggatgaatttggtgcctttccatatctcgttctctctccttcccctgcgtttcctctccatccttcatcctccattggtcctttttttttctttcattttttatttaatttcttttcttcctgtctgttcctcccctaatcctctattttatttttattttttgtaaagccaagtagctttaagataaagtggtggtcttttggatgagggaataatgcatttttaaataaaataccaatatcaggaagccattttttatttcaggaaatgtaagaaaccattatttcaggttatgaaagtataaccaagcatccttttgggcaattccttaccaaatgcagaagcttttctgttcgatgcactctttcctccttgccacttacctttgcaaagttaaaaaaaaggggggagggaatgggagagaaagctgagatttcagtttcctactgcagtttcctacctgcagatccaggggctgctgttgcctttggatgccccactgaggtcctagagtgcctccagggtggtcttcctgtagtcataacagctagccagtgctcaccagcttaccagattgccaggactaagccatcccaaagcacaagcattgtgtgtctctgtgactgcagagaagagagaattttgcttctgttttgtgtttaaaaaaccaacacggaagcagatgatcccgagagagaggcctctagcatgggtgacccagccgacctcaggccggtttccgcactgccacaactttgttcaaagttgcccccaattggaacctgccacttggcattagagggtctttcatggggagagaaggagactgaattactctaagcaaaatgtgaaaagtaaggaaatcagcctttcatcccggtcctaagtaaccgtcagccgaaggtctcgtggaacacaggcaaacccgtgattttggtgctccttgtaactcagccctgcaaagcaaagtcccattgatttaagttgtttgcatttgtactggcaaggcaaaatatttttattaccttttctattacttattgtatgagcttttgttgtttacttggaggttttgtcttttactacaagtttggaactatttattattgcttggtatttgtgctctgtttaagaaacaggcacttttttttattatggataaaatgttgagatgacaggaggtcatttcaatatggcttagtaaaatatttattgttcctttattctctgtacaagattttgggcctctttttttccttaatgtcacaatgttgagttcagcatgtgtctgccatttcatttgtacgcttgttcaaaaccaagtttgttctggtttcaagttataaaaataaattggacatttaacttgatctccaaa

SEQ ID NO: 110895 - DNA, 2599 bp, Homo sapiens
  Payload ID: 1753
  Gene Symbol: BCL11B
  Gene Name: B-cell CLL/lymphoma 11B (zinc finger protein)
  ENST ID: ENST00000443726
  CDS Start-End: 307-2409
tttttttttgcctctttttcttattttagatcgagaggtttttcttgcttttcttcccttttttttctttttgcaaacaaaacaaaaaacagcatagaagaaagagcaaaataaagaagaagaagaggaggaagagagggaaagagaggaagggaaaaaaaacaccaacccgggcagaggaggaggtgcggcggcggcggcggcggcggcagcggcggcagcggcgcggcggcggctcggaccccctcccccggctccccccatcagtgcagctctccgggcgatgccagaatagatgccggggcaatgtcccgccgcaaacagggcaacccgcagcacttgtcccagagggagctcatcacccgtaaagatgagccttccagctacatttgcacaacatgcaagcagcccttcaacagcgcgtggttcctgctgcagcacgcgcagaacacgcacggcttccgcatctacctggagcccgggccggccagcagctcgctcacgccgcggctcaccatcccgccgccgctcgggccggaggccgtggcgcagtccccgctcatgaatttcctgggcgacagcaaccccttcaacctgctgcgcatgacgggccccatcctgcgggaccacccgggcttcggcgagggccgcctgccgggcacgccgcctctcttcagtcccccgccgcgccaccacctggacccgcaccgcctcagtgccgaggagatggggctcgtcgcccagcaccccagtgccttcgaccgagtcatgcgcctgaaccccatggccatcgactcgcccgccatggacttctcgcggcggctccgcgagctggcgggcaacagctccacgccgccgcccgtgtccccgggccgcggcaaccctatgcaccggctcctgaaccccttccagcccagccccaagtccccgttcctgagcacgccgccgctgccgcccatgccccctggcggcacgccgcccccgcagccgccagccaagagcaagtcgtgcgagttctgcggcaagaccttcaagttccagagcaatctcatcgtgcaccggcgcagtcacacgggcgagaagccctacaagtgccagctgtgcgaccacgcgtgctcgcaggccagcaagctcaagcgccacatgaagacgcacatgcacaaggccggctcgctggccggccgctccgacgacgggctctcggccgccagctcccccgagcccggcaccagcgagctggcgggcgagggcctcaaggcggccgacggtgacttccgccaccacgagagcgacccgtcgctgggccacgagccggaggaggaggacgaggaggaggaggaggaggaggaggagctgctactggagaacgagagccggcccgagtcgagcttcagcatggactcggagctgagccgcaaccgcgagaacggcggtggtggggtgcccggggtcccgggcgcggggggcggcgcggccaaggcgctggctgacgagaaggcgctggtgctgggcaaggtcatggagaacgtgggcctaggcgcactgccgcagtacggcgagctcctggccgacaagcagaagcgcggcgccttcctgaagcgtgcggcgggcggcggggacgcgggcgacgacgacgacgcgggcggctgcggggacgcgggcgcgggcggcgcggtcaacgggcgcgggggcggcttcgcgccaggcaccgagcccttccccgggctcttcccgcgcaagcccgcgccgctgcccagccccgggctcaacagcgccgccaagcgcatcaaggtggagaaggacctggagctgccgcccgccgcgctcatcccgtccgagaacgtgtactcgcagtggctggtgggctacgcggcgtcgcggcacttcatgaaggaccccttcctgggcttcacggacgcacgacagtcgcccttcgccacgtcgtccgagcactcgtccgagaacggcagcctgcgcttctccacgccgcccggggacctgctggacggcggcctctcgggccgcagcggcacggccagcggaggcagcaccccgcacctgggcggcccgggccccgggcggcccagctccaaggagggccgccgcagcgacacgtgcgagtactgcggcaaggtgttcaagaactgcagcaacttgacggtgcaccggcggagccacaccggcgagcggccttacaagtgcgagctgtgcaactacgcgtgcgcgcagagcagcaagctcacgcgccacatgaagacgcacgggcagatcggcaaggaggtgtaccgctgcgacatctgccagatgcccttcagcgtctacagcaccctggagaaacacatgaaaaagtggcacggcgagcacttgctgactaacgacgtcaaaatcgagcaggccgagaggagctaagcgcgcgggccccggcgccccgcacctgtacagtggaaccgttgccaaccgagagaatgctgacctgacttgcctccgtgtcaccgccaccccgcaccccgcgtgtccccggggcccaggggaggcggcactccaacctaacctgtgtctgcgaagtcctatggaaacccgagggttgattaaggcagta

SEQ ID NO: 110896 - DNA, 3209 bp, Homo sapiens
  Payload ID: 1754
  Gene Symbol: BCL2
  Gene Name: B-cell CLL/lymphoma 2
  Uniprot ID: P10415
  ENST ID: ENST00000333681
  CDS Start-End: 900-1619
accacctccttctccccacccctcgccgcaccacacacagcgcgggcttctagcgctcggcaccggcgggccaggcgcgtcctgccttcatttatccagcagcttttcggaaaatgcatttgctgttcggagtttaatcagaagaggattcctgcctccgtccccggctccttcatcgtcccctctcccctgtctctctcctggggaggcgtgaagcggtcccgtggatagagattcatgcctgtgcccgcgcgtgtgtgcgcgcgtgtaaattgccgagaaggggaaaacatcacaggacttctgcgaataccggactgaaaattgtaattcatctgccgccgccgctgccttttttttttctcgagctcttgagatctccggttgggattcctgcggattgacatttctgtgaagcagaagtctgggaatcgatctggaaatcctcctaatttttactccctctccccgcgactcctgattcattgggaagtttcaaatcagctataactggagagtgctgaagattgatgggatcgttgccttatgcatttgttttggttttacaaaaaggaaacttgacagaggatcatgctgtacttaaaaaatacaacatcacagaggaagtagactgatattaacaatacttactaataataacgtgcctcatgaaataaagatccgaaaggaattggaataaaaatttcctgcatctcatgccaagggggaaacaccagaatcaagtgttccgcgtgattgaagacaccccctcgtccaagaatgcaaagcacatccaataaaatagctggattataactcctcttctttctctgggggccgtggggtgggagctggggcgagaggtgccgttggcccccgttgcttttcctctgggaaggatggcgcacgctgggagaacagggtacgataaccgggagatagtgatgaagtacatccattataagctgtcgcagaggggctacgagtgggatgcgggagatgtgggcgccgcgcccccgggggccgcccccgcaccgggcatcttctcctcccagcccgggcacacgccccatccagccgcatcccgggacccggtcgccaggacctcgccgctgcagaccccggctgcccccggcgccgccgcggggcctgcgctcagcccggtgccacctgtggtccacctgaccctccgccaggccggcgacgacttctcccgccgctaccgccgcgacttcgccgagatgtccagccagctgcacctgacgcccttcaccgcgcggggacgctttgccacggtggtggaggagctcttcagggacggggtgaactgggggaggattgtggccttctttgagttcggtggggtcatgtgtgtggagagcgtcaaccgggagatgtcgcccctggtggacaacatcgccctgtggatgactgagtacctgaaccggcacctgcacacctggatccaggataacggaggctgggatgcctttgtggaactgtacggccccagcatgcggcctctgtttgatttctcctggctgtctctgaagactctgctcagtttggccctggtgggagcttgcatcaccctgggtgcctatctgggccacaagtgaagtcaacatgcctgccccaaacaaatatgcaaaaggttcactaaagcagtagaaataatatgcattgtcagtgatgtaccatgaaacaaagctgcaggctgtttaagaaaaaataacacacatataaacatcacacacacagacagacacacacacacacaacaattaacagtcttcaggcaaaacgtcgaatcagctatttactgccaaagggaaatatcatttattttttacattattaagaaaaaaagatttatttatttaagacagtcccatcaaaactcctgtctttggaaatccgaccactaattgccaagcaccgcttcgtgtggctccacctggatgttctgtgcctgtaaacatagattcgctttccatgttgttggccggatcaccatctgaagagcagacggatggaaaaaggacctgatcattggggaagctggctttctggctgctggaggctggggagaaggtgttcattcacttgcatttctttgccctgggggctgtgatattaacagagggagggttcctgtggggggaagtccatgcctccctggcctgaagaagagactctttgcatatgactcacatgatgcatacctggtgggaggaaaagagttgggaacttcagatggacctagtacccactgagatttccacgccgaaggacagcgatgggaaaaatgcccttaaatcataggaaagtatttttttaagctaccaattgtgccgagaaaagcattttagcaatttatacaatatcatccagtaccttaagccctgattgtgtatattcatatattttggatacgcaccccccaactcccaatactggctctgtctgagtaagaaacagaatcctctggaacttgaggaagtgaacatttcggtgacttccgcatcaggaaggctagagttacccagagcatcaggccgccacaagtgcctgcttttaggagaccgaagtccgcagaacctgcctgtgtcccagcttggaggcctggtcctggaactgagccggggccctcactggcctcctccagggatgatcaacagggcagtgtggtctccgaatgtctggaagctgatggagctcagaattccactgtcaagaaagagcagtagaggggtgtggctgggcctgtcaccctggggccctccaggtaggcccgttttcacgtggagcatgggagccacgacccttcttaagacatgtatcactgtagagggaaggaacagaggccctgggcccttcctatcagaaggacatggtgaaggctgggaacgtgaggagaggcaatggccacggcccattttggctgtagcacatggcacgttggctgtgtggccttggcccacctgtgagtttaaagcaaggctttaaatgactttggagagggtcacaaatcctaaaagaagcattgaagtgaggtgtcatggattaattgacccctgtctatggaattacatgtaaaacattatcttgtcactgtagtttggttttatttgaaaacctgacaaaaaaaaagttccaggtgtggaatatgggggttatctgtacatcctggggcattaaaaaaaaaa

SEQ ID NO: 110897 - DNA, 7461 bp, Homo sapiens
  Payload ID: 1754
  Gene Symbol: BCL2
  Gene Name: B-cell CLL/lymphoma 2
  Uniprot ID: P10415
  ENST ID: ENST00000398117
  CDS Start-End: 1463-2182
gcgcccgcccctccgcgccgcctgcccgcccgcccgccgcgctcccgcccgccgctctccgtggccccgccgcgctgccgccgccgccgctgccagcgaaggtgccggggctccgggccctccctgccggcggccgtcagcgctcggagcgggctgcgcggcgggagctccgggaggcggccgtagccagcgccgccgcgcaggaccaggaggaggagaaagggtgcgcagcccggaggcggggtgcgccggtggggtgcagcggaagagggggtccaggggggagaacttcgtagcagtcatcctttttaggaaaagagggaaaaaataaaaccctcccccaccacctccttctccccacccctcgccgcaccacacacagcgcgggcttctagcgctcggcaccggcgggccaggcgcgtcctgccttcatttatccagcagcttttcggaaaatgcatttgctgttcggagtttaatcagaagaggattcctgcctccgtccccggctccttcatcgtcccctctcccctgtctctctcctggggaggcgtgaagcggtcccgtggatagagattcatgcctgtgcccgcgcgtgtgtgcgcgcgtgtaaattgccgagaaggggaaaacatcacaggacttctgcgaataccggactgaaaattgtaattcatctgccgccgccgctgccttttttttttctcgagctcttgagatctccggttgggattcctgcggattgacatttctgtgaagcagaagtctgggaatcgatctggaaatcctcctaatttttactccctctccccgcgactcctgattcattgggaagtttcaaatcagctataactggagagtgctgaagattgatgggatcgttgccttatgcatttgttttggttttacaaaaaggaaacttgacagaggatcatgctgtacttaaaaaatacaagtaagttctctgcacaggaaattggtttaatgtaactttcaatggaaacctttgagattttttacttaaagtgcattcgagtaaatttaatttccaggcagcttaatacattctttttagccgtgttacttgtagtgtgtatgccctgctttcactcagtgtgtacagggaaacgcacctgattttttacttattagtttgttttttctttaacctttcagcatcacagaggaagtagactgatattaacaatacttactaataataacgtgcctcatgaaataaagatccgaaaggaattggaataaaaatttcctgcatctcatgccaagggggaaacaccagaatcaagtgttccgcgtgattgaagacaccccctcgtccaagaatgcaaagcacatccaataaaatagctggattataactcctcttctttctctgggggccgtggggtgggagctggggcgagaggtgccgttggcccccgttgcttttcctctgggaaggatggcgcacgctgggagaacagggtacgataaccgggagatagtgatgaagtacatccattataagctgtcgcagaggggctacgagtgggatgcgggagatgtgggcgccgcgcccccgggggccgcccccgcaccgggcatcttctcctcccagcccgggcacacgccccatccagccgcatcccgggacccggtcgccaggacctcgccgctgcagaccccggctgcccccggcgccgccgcggggcctgcgctcagcccggtgccacctgtggtccacctgaccctccgccaggccggcgacgacttctcccgccgctaccgccgcgacttcgccgagatgtccagccagctgcacctgacgcccttcaccgcgcggggacgctttgccacggtggtggaggagctcttcagggacggggtgaactgggggaggattgtggccttctttgagttcggtggggtcatgtgtgtggagagcgtcaaccgggagatgtcgcccctggtggacaacatcgccctgtggatgactgagtacctgaaccggcacctgcacacctggatccaggataacggaggctgggatgcctttgtggaactgtacggccccagcatgcggcctctgtttgatttctcctggctgtctctgaagactctgctcagtttggccctggtgggagcttgcatcaccctgggtgcctatctgggccacaagtgaagtcaacatgcctgccccaaacaaatatgcaaaaggttcactaaagcagtagaaataatatgcattgtcagtgatgtaccatgaaacaaagctgcaggctgtttaagaaaaaataacacacatataaacatcacacacacagacagacacacacacacacaacaattaacagtcttcaggcaaaacgtcgaatcagctatttactgccaaagggaaatatcatttattttttacattattaagaaaaaaagatttatttatttaagacagtcccatcaaaactcctgtctttggaaatccgaccactaattgccaagcaccgcttcgtgtggctccacctggatgttctgtgcctgtaaacatagattcgctttccatgttgttggccggatcaccatctgaagagcagacggatggaaaaaggacctgatcattggggaagctggctttctggctgctggaggctggggagaaggtgttcattcacttgcatttctttgccctgggggctgtgatattaacagagggagggttcctgtggggggaagtccatgcctccctggcctgaagaagagactctttgcatatgactcacatgatgcatacctggtgggaggaaaagagttgggaacttcagatggacctagtacccactgagatttccacgccgaaggacagcgatgggaaaaatgcccttaaatcataggaaagtatttttttaagctaccaattgtgccgagaaaagcattttagcaatttatacaatatcatccagtaccttaagccctgattgtgtatattcatatattttggatacgcaccccccaactcccaatactggctctgtctgagtaagaaacagaatcctctggaacttgaggaagtgaacatttcggtgacttccgcatcaggaaggctagagttacccagagcatcaggccgccacaagtgcctgcttttaggagaccgaagtccgcagaacctgcctgtgtcccagcttggaggcctggtcctggaactgagccggggccctcactggcctcctccagggatgatcaacagggcagtgtggtctccgaatgtctggaagctgatggagctcagaattccactgtcaagaaagagcagtagaggggtgtggctgggcctgtcaccctggggccctccaggtaggcccgttttcacgtggagcatgggagccacgacccttcttaagacatgtatcactgtagagggaaggaacagaggccctgggcccttcctatcagaaggacatggtgaaggctgggaacgtgaggagaggcaatggccacggcccattttggctgtagcacatggcacgttggctgtgtggccttggcccacctgtgagtttaaagcaaggctttaaatgactttggagagggtcacaaatcctaaaagaagcattgaagtgaggtgtcatggattaattgacccctgtctatggaattacatgtaaaacattatcttgtcactgtagtttggttttatttgaaaacctgacaaaaaaaaagttccaggtgtggaatatgggggttatctgtacatcctggggcattaaaaaaaaaatcaatggtggggaactataaagaagtaacaaaagaagtgacatcttcagcaaataaactaggaaatttttttttcttccagtttagaatcagccttgaaacattgatggaataactctgtggcattattgcattatataccatttatctgtattaactttggaatgtactctgttcaatgtttaatgctgtggttgatatttcgaaagctgctttaaaaaaatacatgcatctcagcgtttttttgtttttaattgtatttagttatggcctatacactatttgtgagcaaaggtgatcgttttctgtttgagatttttatctcttgattcttcaaaagcattctgagaaggtgagataagccctgagtctcagctacctaagaaaaacctggatgtcactggccactgaggagctttgtttcaaccaagtcatgtgcatttccacgtcaacagaattgtttattgtgacagttatatctgttgtccctttgaccttgtttcttgaaggtttcctcgtccctgggcaattccgcatttaattcatggtattcaggattacatgcatgtttggttaaacccatgagattcattcagttaaaaatccagatggcaaatgaccagcagattcaaatctatggtggtttgacctttagagagttgctttacgtggcctgtttcaacacagacccacccagagccctcctgccctccttccgcgggggctttctcatggctgtccttcagggtcttcctgaaatgcagtggtgcttacgctccaccaagaaagcaggaaacctgtggtatgaagccagacctccccggcgggcctcagggaacagaatgatcagacctttgaatgattctaatttttaagcaaaatattattttatgaaaggtttacattgtcaaagtgatgaatatggaatatccaatcctgtgctgctatcctgccaaaatcattttaatggagtcagtttgcagtatgctccacgtggtaagatcctccaagctgctttagaagtaacaatgaagaacgtggacgtttttaatataaagcctgttttgtcttttgttgttgttcaaacgggattcacagagtatttgaaaaatgtatatatattaagaggtcacgggggctaattgctggctggctgccttttgctgtggggttttgttacctggttttaataacagtaaatgtgcccagcctcttggccccagaactgtacagtattgtggctgcacttgctctaagagtagttgatgttgcattttccttattgttaaaaacatgttagaagcaatgaatgtatataaaagcctcaactagtcatttttttctcctcttcttttttttcattatatctaattattttgcagttgggcaacagagaaccatccctattttgtattgaagagggattcacatctgcatcttaactgctctttatgaatgaaaaaacagtcctctgtatgtactcctctttacactggccagggtcagagttaaatagagtatatgcactttccaaattggggacaagggctctaaaaaaagccccaaaaggagaagaacatctgagaacctcctcggccctcccagtccctcgctgcacaaatactccgcaagagaggccagaatgacagctgacagggtctatggccatcgggtcgtctccgaagatttggcaggggcagaaaactctggcaggcttaagatttggaataaagtcacagaattaaggaagcacctcaatttagttcaaacaagacgccaacattctctccacagctcacttacctctctgtgttcagatgtggccttccatttatatgtgatctttgttttattagtaaatgcttatcatctaaagatgtagctctggcccagtgggaaaaattaggaagtgattataaatcgagaggagttataataatcaagattaaatgtaaataatcagggcaatcccaacacatgtctagctttcacctccaggatctattgagtgaacagaattgcaaatagtctctatttgtaattgaacttatcctaaaacaaatagtttataaatgtgaacttaaactctaattaattccaactgtacttttaaggcagtggctgtttttagactttcttatcacttatagttagtaatgtacacctactctatcagagaaaaacaggaaaggctcgaaatacaagccattctaaggaaattagggagtcagttgaaattctattctgatcttattctgtggtgtcttttgcagcccagacaaatgtggttacacactttttaagaaatacaattctacattgtcaagcttatgaaggttccaatcagatctttattgttattcaatttggatctttcagggattttttttttaaattattatgggacaaaggacatttgttggaggggtgggagggaggaagaatttttaaatgtaaaacattcccaagtttggatcagggagttggaagttttcagaataaccagaactaagggtatgaaggacctgtattggggtcgatgtgatgcctctgcgaagaaccttgtgtgacaaatgagaaacattttgaagtttgtggtacgacctttagattccagagacatcagcatggctcaaagtgcagctccgtttggcagtgcaatggtataaatttcaagctggatatgtctaatgggtatttaaacaataaatgtgcagttttaactaacaggatatttaatgacaaccttctggttggtagggacatctgtttctaaatgtttattatgtacaatacagaaaaaaattttataaaattaagcaatgtgaaactgaattggagagtgataatacaagtcctttagtcttacccagtgaatcattctgttccatgtctttggacaaccatgaccttggacaatcatgaaatatgcatctcactggatgcaaagaaaatcagatggagcatgaatggtactgtaccggttcatctggactgccccagaaaaataacttcaagcaaacatcctatcaacaacaaggttgttctgcataccaagctgagcacagaagatgggaacactggtggaggatggaaaggctcgctcaatcaagaaaattctgagactattaataaataagactgtagtgtagatactgagtaaatccatgcacctaaaccttttggaaaatctgccgtgggccctccagatagctcatttcattaagtttttccctccaaggtagaatttgcaagagtgacagtggattgcatttcttttggggaagctttcttttggtggttttgtttattataccttcttaagttttcaaccaaggtttgcttttgttttgagttactggggttatttttgttttaaataaaaataagtgtacaataagtgtttttgtattgaaagcttttgttatcaagattttcatacttttaccttccatggctctttttaagattgatacttttaagaggtggctgatattctgcaacactgtacacataaaaaatacggtaaggatactttacatggttaaggtaaagtaagtctccagttggccaccattagctataatggcactttgtttgtgttgttggaaaaagtcacattgccattaaactttccttgtctgtctagttaatattgtgaagaaaaataaagtacagtgtgagatactg

SEQ ID NO: 110898 - DNA, 5011 bp, Homo sapiens
  Payload ID: 1754
  Gene Symbol: BCL2
  Gene Name: B-cell CLL/lymphoma 2
  Uniprot ID: P10415
  ENST ID: ENST00000589955
  CDS Start-End: 147-764
tgattgaagacaccccctcgtccaagaatgcaaagcacatccaataaaatagctggattataactcctcttctttctctgggggccgtggggtgggagctggggcgagaggtgccgttggcccccgttgcttttcctctgggaaggatggcgcacgctgggagaacagggtacgataaccgggagatagtgatgaagtacatccattataagctgtcgcagaggggctacgagtgggatgcgggagatgtgggcgccgcgcccccgggggccgcccccgcaccgggcatcttctcctcccagcccgggcacacgccccatccagccgcatcccgggacccggtcgccaggacctcgccgctgcagaccccggctgcccccggcgccgccgcggggcctgcgctcagcccggtgccacctgtggtccacctgaccctccgccaggccggcgacgacttctcccgccgctaccgccgcgacttcgccgagatgtccagccagctgcacctgacgcccttcaccgcgcggggacgctttgccacggtggtggaggagctcttcagggacggggtgaactgggggaggattgtggccttctttgagttcggtggggtcatgtgtgtggagagcgtcaaccgggagatgtcgcccctggtggacaacatcgccctgtggatgactgagtacctgaaccggcacctgcacacctggatccaggataacggaggctgggtaggtgcacttggtgatgtgagtctgggctgaggccacaggtccgagatgcgggggttggagtgcgggtgggctcctggggcaatgggaggctgtggagccggcgaaataaaatcagagttgttgcttcccggcgtccctacctcctcctctggacaaagcgttcactcccaacctgaccgataacgcctgccatctaaaagtctttaacttgcttgctagtcgtggagatccaaagatctagcgtttgtaatccagtaggatgtggtggtaaatggtaccccttcagtgtttctcaagctgaaggtccaggagtccccaggaccaccgtttcctggcttgagcagcttgttggaaccggagggaggtttcagggactgcttatgaaccagataccaggttgggtcttgacagtctgcatcccaaacaagctcccctgaaacaagcccgttgtacactaaaattggagaacaacccgattagaagaatagactccacagaagaccaagggcatcatcaatcggtaaaattttccaaaagaggaaaaccaatgtaagtctttttccctgaaaaacttagttgtgtttgtaaagagctaagttgacattccaaagtccttggactggaatctccagtgtgtgccatgttcccagtgggcgtgatgaggtgtcctgaggagtatcaggctatggctttgctaccttgtcagtgacagaatttgcatcggctgcattctttgtattctataatttgtgtatggtttaccagtttgctagaatgttagaatcttttgtttttcaccactcagagtggacctaattttgtggtcggctgaaaaaaatttgcatctaggtatctatgtaaagtgtagaagaattgattcttagctgtggattatcttacccttactttagttgaagtgattgatacctgtggctttgaagaacatttgtgagatgatctttttctcgtactgtgctagatagagctttcatcattataccatacaattgtacttttctgagattctttgttggagggggtttagttcctaagagtcaaggattgtaatggagatctatatctcatatctaaaatgatgaatttatgaaaaagtaattcttgtgtgaagttttttttttttttacactttttgttttaatctgaagagttatctttgaaaaacaggatgcaattcagtgcttccttttatagcctcttgggagaatgactaatgtcattattttataggacctaacaggagcaaaaagcctagaaattactgcaagtggattagatgtcaagaagcacaccacatgtttttattacattttacaaagtgtgctcatactaggaggccaaatagagaaaaggccaagaaaagtagatgattgatgtgaacatctgatcttatttgaccaaagttgacaaaatattgatgccactgtttggtgtttaaaagtaagattaactaaaatgccccaatttaaatttctaaaatttaaatcctcttcttgaattgtttgtttgttgagatctcacattatcagatctttagtaattctggaagaatttgctaaagggtgaaaagaatatttttgttaaatatttggttaagtaggtggtttgatttttaatcactataactaaaggggttgggacttccagattcccaaaggatccttttaaaccaaagtaaaactgatttaatagttttactatttcacatttttgtgaaaaattcacacttacaaattttctttctacttgaaataaatccaaggtggtaactggtatctgtctatcaaataagttaataaaaatgtgggaaacagagacacatgtttatgacagaaattaagatacaaccttgatatttgttgctgaatttcagtgtgttaccctctcatgtaactgaagtttctttttaagtaaaggctcacttttttctttttgtgaaacagagttttcatagtagacctatctttgtggtcaacaggtatctgaggttgataaatgtagaggctacattttatgatgccaaaccacaatgacataccatagaacatgataaaaattttttgacaaaactgcttctagtaaaaataaatcatgtagaagcacagatggttgatggtaaaatatgtaatagctttcagaacaatgcatagatggtgactatataggaaaacaaaggaatttagagaaaaaatatatatatataccaggaaatgcactcataggacactttggaataaaagtggtagtgtttgagaatgatgaatgatttgcctatcatttcaaatgtgcattattaatctaaaagtcattttaggcatttggcatacagacagattttcttcacatttacaccaattggggttacatctctaataatatgttgtattttatagtgtaaggtagtcttaatggtaaagcttcagaagagagctagcatattttcttggcatgtgacaataatctgcactgtccccagggctccgtggattagcccatctcctgaatactacactgaatactccaggctttagactgcaagtcatttctttttctttgctgctgctcgtagaaaattggaaccttgtgaggctgaggaaatctgtttgacttttgtgttccataacatggataaatcaggtccttggaatgatcagcctctgatagattgtcccagaagactacaaattaaataaagactaaagaagtaattggctgtagagtggagtgtggatttattcctaggtctgaataaggcattgtgtggcatccagagagaggcaggacagaggaagcagtgagagagaagcaattctagaaaatgtggataccttgctgctcagtgtggcttatagacagtagcacatgcatcccccggagctttgtagagatgctaaagctcagctcccaccccagagctactgagtcagaatatgtggtttgtgtgcacgttaaagttagcgatgctggctaccatccttggttcctggtggcatcttttaggaagagttgctacctgggatggattctgcattgtccccttccagtggccttaaagatctatagtgttacttggaataccgagtatttcccaggtgtccactattgtgatctgactttaggaagacataaattggatgaaggagagatagcaagcaggtagatcaactataagcccagtcttctcatgaatatttttcgtagtagttatatagtttatattggcatcactggtcccattaaaaagtaagatagcttttcttcaattaaaggcaagagaattagctcttttaatagctctgttagttattattttatcccctcataacacagtttaaattctgtaaatgactttagtgaccttgcagcttctttaagacaaagggactcttgcaggcaagggattgagttttgggcaggtgatggagagtgaccctctaaactgggaactgtgacgacattcagcttcatgtcttaggagagagtgagataggagccactagaagaatgagatgattcagacaagagattgtaggagattggctttattctgttgacaagatggtaatccgacttattttttggttttttggtgttggtggtttaggaagacaggaacttctccacacccggtagagttcagctgccttttcattagtcagcaagcagtttttcctttctcaaggcagtccacatccagcaaaacatttgattaactggaaagcaataccattctcatgccagtgtacaaattacatgaaagagcatcatttttctagtgtctgaggattggctgcttatggccaattttggcagcaagacgataggattaaaaatagcttgaagatgatctagtcttaaataatatatttcatgatgaactttccttgggaaagtgcatctttctgcctacaagaatcacatgacccctttcaataatttatgtagtagagaaaaacacactatttctcatagagttttcagtcatgtgctgtggtgtgattgtttctggacattcataaaattttatagttaactgaattctcttttctgttttgttgctatttaacgtccattgaaaacatggctttcttttgcgcattctgttactttcagctgtactttctaataagaatggattgccctttttagcaatctttgattgaactggtacatttcagattacttaaatgtcatcaggccacacagcataccaggtaacagaaagccataaattaaaaataaaaaaaaggcaagcaaaa

SEQ ID NO: 110899 - DNA, 2038 bp, Homo sapiens
  Payload ID: 1755
  Gene Symbol: BCL3
  Gene Name: B-cell CLL/lymphoma 3
  Uniprot ID: P20749
  ENST ID: ENST00000164227
  CDS Start-End: 245-1609
cgggcggggcgcagggcaggctgcacctcagagcggcgggagcagcggcgggtccaggaaacccctggggcgtacgggtggccccgggggggccgggggcggggaggcgggcggccggcaccgccccggccgacaaaagtcccttcagttcagccggctgcaggggaagtcccggcgcccggcgaaaccaccctcccgtgcagccgagcccagccgctctccggccgccgtccccggcggccccatgccccgatgccccgcgggggccatggacgaggggcccgtggacctgcgcacccggcccaaggccgccggactcccgggcgccgcgctgccgctccgcaagcgcccgctgcgcgcgccctccccggagcccgccgctccccgcggcgctgcgggccttgtcgtccccctggaccctctgcgcggcggctgcgacctgccggcggtccccgggcccccccacggcctggcccggccggaggcgctttactaccccggagccttactgcctttgtaccccactcgggccatgggctccccgtttcctctggtgaacctgcctacacccctataccccatgatgtgccccatggaacaccccctttctgctgacatcgccatggccacccgtgcagatgaggacggagacacgcctctccatattgctgtggtgcagggtaacctgccagctgtgcaccggctggtcaacctcttccagcaggggggccgggagctcgacatctacaacaacctacggcagacaccgctccacctggctgtgatcaccacattaccgtctgtggtccggctcctggtgacagctggtgccagccccatggcgctggaccgccatggccagacggccgctcacctggcgtgcgagcaccgcagcccgacctgcctgcgagccctgctggacagcgcagctccgggcacgttggacctggaggcccgcaattatgacgggctcaccgccctgcacgtggcagtgaacaccgagtgccaagaaaccgtgcagctcttgctagagcgcggtgccgacatcgacgcagtggacattaagagcggccgctccccgctcatccacgccgtggaaaacaacagccttagcatggtgcagctgctgctgcagcacggcgccaacgtgaacgcgcaaatgtactccggcagctccgccctgcactcagcgtccggccgcgggctcctcccgctggtgcgcacgctggtccgcagcggcgctgacagcagcctcaagaactgccacaacgacacgccgctcatggtggcgcgcagccgcagggtcatcgacatcctgagggggaaggccacccggcctgcttccacctcccagccagacccctcccctgaccggagcgccaacacctcccccgagagcagcagccgcctcagctccaatggtcttctctccgcatcaccatcctcctcaccctcccagtctccccccagggacccccctggattccccatggctcctcccaatttcttccttccttccccatctccacccgccttcctgccctttgctggggtcctccgaggccctggccggccggtgcccccctccccagctccaggaggcagctgagggggatgggggggcagatcttggactcatgaggaggggcccccctgccctgtggggtcaacccttctggaaactgtgaagatctcactctgccccccccccccatcttcgggaccaggatttgcacagaagcacatgcacctacccatacaccccctcttctgagcacagatgttcccccatctcgctccctcccaggactctgaccccagcattctcaggcaccagtccctgtccggaatgccacccacatcttccatttccatgtcccctcccagagctggtggacccagggaacagccactcccctccactctctaccagataactgaggaggggagaggtgggccgtaacgggcacggatcacgatgtaaattattaagcattttggttggatttcttttgtaataaactatttttgtaccata

SEQ ID NO: 110900 - DNA, 923 bp, Homo sapiens
  Payload ID: 1755
  Gene Symbol: BCL3
  Gene Name: B-cell CLL/lymphoma 3
  ENST ID: ENST00000444487
  CDS Start-End: 1-923
ggaacaccccctttctgctgacatcgccatggccacccgtgcagatgaggacggagacacgcctctccatattgctgtggtgcagggtaacctgccagctgtgcaccggctggtcaacctcttccagcaggggggccgggagctcgacatctacaacaacctacggcagacaccgctccacctggctgtgatcaccacattaccgtctgtggtccggctcctggtgacagctggtgccagccccatggcgctggaccgccatggccagacggccgctcacctggcgtgcgagcaccgcagcccgacctgcctgcgagccctgctggacagcgcagctccgggcacgttggacctggaggcccgcaattatgacgggctcaccgccctgcacgtggcagtgaacaccgagtgccaagaaaccgtgcagctcttgctagagcgcggtgccgacatcgacgcagtggacattaagagcggccgctccccgctcatccacgccgtggaaaacaacagccttagcatggtgcagctgctgctgcagcacggcgccaacgtgaacgcgcaaatgtactccggcagctccgccctgcactcagcgtccggccgcgggctcctcccgctggtgcgcacgctggtccgcagcggcgctgacagcagcctcaagaactgccacaacgacacgccgctcatggtggcgcgcagccgcagggtgagccggggcagctgtggacatgccccttgcacacgtgtgtccgcgggctggttgcaggtcatcgacatcctgagggggaaggccacccggcctgcttccacctcccagccagacccctcccctgaccggagcgccaacacctcccccgagagcagcagccgcctcagctccaatggtcttctctccgcatcaccatcctcctcaccctccc

SEQ ID NO: 110901 - DNA, 2710 bp, Homo sapiens
  Payload ID: 1756
  Gene Symbol: BCL6
  Gene Name: B-cell CLL/lymphoma 6
  Uniprot ID: P41182
  ENST ID: ENST00000232014
  CDS Start-End: 530-2650
gccacttgtcatggtgaaatggcaaatctgggcttcctgtggttccagaagcctgcgactggaaatccacaagcgagctggtggttgaagctggttaaagaacagcctaggtattccagaagtgtttgaggatcccttccatgaaggaagagaggaaagtttttaagtaaacctcccactcccatgtgtcttcagctttcttttgcaaaggagaaaatccttgaagtttggtaaagaccgagttagtctatctctctttgcctatctcgagttgggctggggagaggaggagataggttcttttgtctttttctgtcttctcccttccccacttccttccctccagtccccactcactcacatgcacacactaaccttggagccgatgggattgagtgactggcacttgggaccacagagaaatgtcagagtgtttggttacagactcaaggaaacctctcattttagagtgctcatttggttttgagcaaaattttggactgtgaagcaaggcattggtgaagacaaaatggcctcgccggctgacagctgtatccagttcacccgccatgccagtgatgttcttctcaaccttaatcgtctccggagtcgagacatcttgactgatgttgtcattgttgtgagccgtgagcagtttagagcccataaaacggtcctcatggcctgcagtggcctgttctatagcatctttacagaccagttgaaatgcaaccttagtgtgatcaatctagatcctgagatcaaccctgagggattctgcatcctcctggacttcatgtacacatctcggctcaatttgcgggagggcaacatcatggctgtgatggccacggctatgtacctgcagatggagcatgttgtggacacttgccggaagtttattaaggccagtgaagcagagatggtttctgccatcaagcctcctcgtgaagagttcctcaacagccggatgctgatgccccaagacatcatggcctatcggggtcgtgaggtggtggagaacaacctgccactgaggagcgcccctgggtgtgagagcagagcctttgcccccagcctgtacagtggcctgtccacaccgccagcctcttattccatgtacagccacctccctgtcagcagcctcctcttctccgatgaggagtttcgggatgtccggatgcctgtggccaaccccttccccaaggagcgggcactcccatgtgatagtgccaggccagtccctggtgagtacagccggccgactttggaggtgtcccccaatgtgtgccacagcaatatctattcacccaaggaaacaatcccagaagaggcacgaagtgatatgcactacagtgtggctgagggcctcaaacctgctgccccctcagcccgaaatgccccctacttcccttgtgacaaggccagcaaagaagaagagagaccctcctcggaagatgagattgccctgcatttcgagccccccaatgcacccctgaaccggaagggtctggttagtccacagagcccccagaaatctgactgccagcccaactcgcccacagagtcctgcagcagtaagaatgcctgcatcctccaggcttctggctcccctccagccaagagccccactgaccccaaagcctgcaactggaagaaatacaagttcatcgtgctcaacagcctcaaccagaatgccaaaccagaggggcctgagcaggctgagctgggccgcctttccccacgagcctacacggccccacctgcctgccagccacccatggagcctgagaaccttgacctccagtccccaaccaagctgagtgccagcggggaggactccaccatcccacaagccagccggctcaataacatcgttaacaggtccatgacgggctctccccgcagcagcagcgagagccactcaccactctacatgcaccccccgaagtgcacgtcctgcggctctcagtccccacagcatgcagagatgtgcctccacaccgctggccccacgttccctgaggagatgggagagacccagtctgagtactcagattctagctgtgagaacggggccttcttctgcaatgagtgtgactgccgcttctctgaggaggcctcactcaagaggcacacgctgcagacccacagtgacaaaccctacaagtgtgaccgctgccaggcctccttccgctacaagggcaacctcgccagccacaagaccgtccataccggtgagaaaccctatcgttgcaacatctgtggggcccagttcaaccggccagccaacctgaaaacccacactcgaattcactctggagagaagccctacaaatgcgaaacctgcggagccagatttgtacaggtggcccacctccgtgcccatgtgcttatccacactggtgagaagccctatccctgtgaaatctgtggcacccgtttccggcaccttcagactctgaagagccacctgcgaatccacacaggagagaaaccttaccattgtgagaagtgtaacctgcatttccgtcacaaaagccagctgcgacttcacttgcgccagaagcatggcgccatcaccaacaccaaggtgcaataccgcgtgtcagccactgacctgcctccggagctccccaaagcctgctgaagcatggagtgttgatgctttcgtctccagccccttctcagaatctacccaaaggatact

SEQ ID NO: 110902 - DNA, 3569 bp, Homo sapiens
  Payload ID: 1756
  Gene Symbol: BCL6
  Gene Name: B-cell CLL/lymphoma 6
  Uniprot ID: P41182
  ENST ID: ENST00000406870
  CDS Start-End: 368-2488
ataccatcgtcttgggcccggggagggagagccaccttcaggcccctcgagcctcgaaccggaacctccaaatccgagacgctctgcttatgaggacctcgaaatatgccggccagtgaaaaaatcttgtggctttgagggcttttggttggccaggggcagtaaaaatctcggagagctgacaccaagtcctcccctgccacgtagcagtggtaaagtccgaagctcaaattccgagaattgagctctgttgattcttagaactggggttcttagaagtggtgatgcaagaagtttctaggaaaggccggacaccaggttttgagcaaaattttggactgtgaagcaaggcattggtgaagacaaaatggcctcgccggctgacagctgtatccagttcacccgccatgccagtgatgttcttctcaaccttaatcgtctccggagtcgagacatcttgactgatgttgtcattgttgtgagccgtgagcagtttagagcccataaaacggtcctcatggcctgcagtggcctgttctatagcatctttacagaccagttgaaatgcaaccttagtgtgatcaatctagatcctgagatcaaccctgagggattctgcatcctcctggacttcatgtacacatctcggctcaatttgcgggagggcaacatcatggctgtgatggccacggctatgtacctgcagatggagcatgttgtggacacttgccggaagtttattaaggccagtgaagcagagatggtttctgccatcaagcctcctcgtgaagagttcctcaacagccggatgctgatgccccaagacatcatggcctatcggggtcgtgaggtggtggagaacaacctgccactgaggagcgcccctgggtgtgagagcagagcctttgcccccagcctgtacagtggcctgtccacaccgccagcctcttattccatgtacagccacctccctgtcagcagcctcctcttctccgatgaggagtttcgggatgtccggatgcctgtggccaaccccttccccaaggagcgggcactcccatgtgatagtgccaggccagtccctggtgagtacagccggccgactttggaggtgtcccccaatgtgtgccacagcaatatctattcacccaaggaaacaatcccagaagaggcacgaagtgatatgcactacagtgtggctgagggcctcaaacctgctgccccctcagcccgaaatgccccctacttcccttgtgacaaggccagcaaagaagaagagagaccctcctcggaagatgagattgccctgcatttcgagccccccaatgcacccctgaaccggaagggtctggttagtccacagagcccccagaaatctgactgccagcccaactcgcccacagagtcctgcagcagtaagaatgcctgcatcctccaggcttctggctcccctccagccaagagccccactgaccccaaagcctgcaactggaagaaatacaagttcatcgtgctcaacagcctcaaccagaatgccaaaccagaggggcctgagcaggctgagctgggccgcctttccccacgagcctacacggccccacctgcctgccagccacccatggagcctgagaaccttgacctccagtccccaaccaagctgagtgccagcggggaggactccaccatcccacaagccagccggctcaataacatcgttaacaggtccatgacgggctctccccgcagcagcagcgagagccactcaccactctacatgcaccccccgaagtgcacgtcctgcggctctcagtccccacagcatgcagagatgtgcctccacaccgctggccccacgttccctgaggagatgggagagacccagtctgagtactcagattctagctgtgagaacggggccttcttctgcaatgagtgtgactgccgcttctctgaggaggcctcactcaagaggcacacgctgcagacccacagtgacaaaccctacaagtgtgaccgctgccaggcctccttccgctacaagggcaacctcgccagccacaagaccgtccataccggtgagaaaccctatcgttgcaacatctgtggggcccagttcaaccggccagccaacctgaaaacccacactcgaattcactctggagagaagccctacaaatgcgaaacctgcggagccagatttgtacaggtggcccacctccgtgcccatgtgcttatccacactggtgagaagccctatccctgtgaaatctgtggcacccgtttccggcaccttcagactctgaagagccacctgcgaatccacacaggagagaaaccttaccattgtgagaagtgtaacctgcatttccgtcacaaaagccagctgcgacttcacttgcgccagaagcatggcgccatcaccaacaccaaggtgcaataccgcgtgtcagccactgacctgcctccggagctccccaaagcctgctgaagcatggagtgttgatgctttcgtctccagccccttctcagaatctacccaaaggatactgtaacactttacaatgttcatcccatgatgtagtgcctctttcatccactagtgcaaatcatagctgggggttgggggtggtgggggtcggggcctgggggactgggagccgcagcagctccccctcccccactgccataaaacattaagaaaatcatattgcttcttctcctatgtgtaaggtgaaccatgtcagcaaaaagcaaaatcattttatatgtcaaagcaggggagtatgcaaaagttctgacttgactttagtctgcaaaatgaggaatgtatatgttttgtgggaacagatgtttcttttgtatgtaaatgtgcattcttttaaaagacaagacttcagtatgttgtcaaagagagggctttaatttttttaaccaaaggtgaaggaatatatggcagagttgtaaatatataaatatatatatatataaaataaatatatataaacctaaaaaagatatattaaaaatataaaactgcgttaaaggctcgattttgtatctgcaggcagacacggatctgagaatctttattgagaaagagcacttaagagaatattttaagtattgcatctgtataagtaagaaaatattttgtctaaaatgcctcagtgtatttgtatttttttgcaagtgaaggtttacaatttacaaagtgtgtattaaaaaaaacaaaaagaacaaaaaaatctgcagaaggaaaaatgtgtaattttgttctagttttcagtttgtatatacccgtacaacgtgtcctcacggtgccttttttcacggaagttttcaatgatgggcgagcgtgcaccatccctttttgaagtgtaggcagacacagggacttgaagttgttactaactaaactctctttgggaatgtttgtctcatcccattctgcgtcatgcttgtgttataactactccggagacagggtttggctgtgtctaaactgcattaccgcgttgtaaaatatagctgtacaaatataagaataaaatgttgaaaagtcaaactgg

SEQ ID NO: 110903 - DNA, 4178 bp, Homo sapiens
  Payload ID: 1756
  Gene Symbol: BCL6
  Gene Name: B-cell CLL/lymphoma 6
  ENST ID: ENST00000419510
  CDS Start-End: 1049-1216
tctcattgacagccctgctccttggagattgtttttgtgggtagtcttgtgtgtggcattggtggaatggctgaatctaggagacgcggcgtgtccagaacttgctggaaattggttttgagattttgggcaaggcctctcacccggagcctcagttccctccctaataaagcagggctgttataaggataagatgcaatcttgagggggtgggaaaggactaagagctctgtaaaaatacaaaccaaatgctggtggtgcttccacacctgcggcatttggggtgggggtggtgacaacattgcccacactcaacccacacactcaggagttggggggggctggttcttaagacgagttggcttgcaaaggagtgaacttgagaaggacctgcgcctcgtgtatgtacatttgtttttggccaggcagaggcttacggtgaaaagcccaaggcccagctgacagtggacacaggggaatttgtttgtttgtttcaatccgcatctggagtgagtcattgccacttgtcatggtgaaatggcaaatctgggcttcctgtggttccagaagcctgcgactggaaatccacaagcgagctggtggttgaagctggttaaagaacagcctaggtattccagaagtgtttgaggatcccttccatgaaggaagagaggaaagtttttaagtaaacctcccactcccatgtgtcttcagctttcttttgcaaaggagaaaatccttgaagtttggtaaagaccgagttagtctatctctctttgcctatctcgagttgggctggggagaggaggagataggttcttttgtctttttctgtcttctcccttccccacttccttccctccagtccccactcactcacatgcacacactaaccttggagccgatgggattgagtgactggcacttgggaccacagagaaatgtcagagtgtttggttacagactcaaggaaacctctcattttagagtgctcatttggttttgagcaaaattttggactgtgaagcaaggcattggtgaagacaaaatggcctcgccggctgacagctgtatccagttcacccgccatgccagtgatgttcttctcaaccttaatcgtctccggagtcgagacatcttgactgatgttgtcattgttgtgagccgtgagcagtttagagcccataaaacggtcctcatggcctgcagatcctgagatcaaccctgagggattctgcatcctcctggacttcatgtacacatctcggctcaatttgcgggagggcaacatcatggctgtgatggccacggctatgtacctgcagatggagcatgttgtggacacttgccggaagtttattaaggccagtgaagcagagatggtttctgccatcaagcctcctcgtgaagagttcctcaacagccggatgctgatgccccaagacatcatggcctatcggggtcgtgaggtggtggagaacaacctgccactgaggagcgcccctgggtgtgagagcagagcctttgcccccagcctgtacagtggcctgtccacaccgccagcctcttattccatgtacagccacctccctgtcagcagcctcctcttctccgatgaggagtttcgggatgtccggatgcctgtggccaaccccttccccaaggagcgggcactcccatgtgatagtgccaggccagtccctggtgagtacagccggccgactttggaggtgtcccccaatgtgtgccacagcaatatctattcacccaaggaaacaatcccagaagaggcacgaagtgatatgcactacagtgtggctgagggcctcaaacctgctgccccctcagcccgaaatgccccctacttcccttgtgacaaggccagcaaagaagaagagagaccctcctcggaagatgagattgccctgcatttcgagccccccaatgcacccctgaaccggaagggtctggttagtccacagagcccccagaaatctgactgccagcccaactcgcccacagagtcctgcagcagtaagaatgcctgcatcctccaggcttctggctcccctccagccaagagccccactgaccccaaagcctgcaactggaagaaatacaagttcatcgtgctcaacagcctcaaccagaatgccaaaccagaggggcctgagcaggctgagctgggccgcctttccccacgagcctacacggccccacctgcctgccagccacccatggagcctgagaaccttgacctccagtccccaaccaagctgagtgccagcggggaggactccaccatcccacaagccagccggctcaataacatcgttaacaggtccatgacgggctctccccgcagcagcagcgagagccactcaccactctacatgcaccccccgaagtgcacgtcctgcggctctcagtccccacagcatgcagagatgtgcctccacaccgctggccccacgttccctgaggagatgggagagacccagtctgagtactcagattctagctgtgagaacggggccttcttctgcaatgagtgtgactgccgcttctctgaggaggcctcactcaagaggcacacgctgcagacccacagtgacaaaccctacaagtgtgaccgctgccaggcctccttccgctacaagggcaacctcgccagccacaagaccgtccataccggtgagaaaccctatcgttgcaacatctgtggggcccagttcaaccggccagccaacctgaaaacccacactcgaattcactctggagagaagccctacaaatgcgaaacctgcggagccagatttgtacaggtggcccacctccgtgcccatgtgcttatccacactggtgagaagccctatccctgtgaaatctgtggcacccgtttccggcaccttcagactctgaagagccacctgcgaatccacacaggagagaaaccttaccattgtgagaagtgtaacctgcatttccgtcacaaaagccagctgcgacttcacttgcgccagaagcatggcgccatcaccaacaccaaggtgcaataccgcgtgtcagccactgacctgcctccggagctccccaaagcctgctgaagcatggagtgttgatgctttcgtctccagccccttctcagaatctacccaaaggatactgtaacactttacaatgttcatcccatgatgtagtgcctctttcatccactagtgcaaatcatagctgggggttgggggtggtgggggtcggggcctgggggactgggagccgcagcagctccccctcccccactgccataaaacattaagaaaatcatattgcttcttctcctatgtgtaaggtgaaccatgtcagcaaaaagcaaaatcattttatatgtcaaagcaggggagtatgcaaaagttctgacttgactttagtctgcaaaatgaggaatgtatatgttttgtgggaacagatgtttcttttgtatgtaaatgtgcattcttttaaaagacaagacttcagtatgttgtcaaagagagggctttaatttttttaaccaaaggtgaaggaatatatggcagagttgtaaatatataaatatatatatatataaaataaatatatataaacctaaaaaagatatattaaaaatataaaactgcgttaaaggctcgattttgtatctgcaggcagacacggatctgagaatctttattgagaaagagcacttaagagaatattttaagtattgcatctgtataagtaagaaaatattttgtctaaaatgcctcagtgtatttgtatttttttgcaagtgaaggtttacaatttacaaagtgtgtattaaaaaaaacaaaaagaacaaaaaaatctgcagaaggaaaaatgtgtaattttgttctagttttcagtttgtatatacccgtacaacgtgtcctcacggtgccttttttcacggaagttttcaatgatgggcgagcgtgcaccatccctttttgaagtgtaggcagacacagggacttgaagttgttactaactaaactctctttgggaatgtttgtctcatcccattctgcgtcatgcttgtgttataactactccggagacagggtttggctgtgtctaaactgcattaccgcgttgtaaaatatagctgtacaaatataagaataaaatgttgaaaa

SEQ ID NO: 110904 - DNA, 2003 bp, Homo sapiens
  Payload ID: 1756
  Gene Symbol: BCL6
  Gene Name: B-cell CLL/lymphoma 6
  Uniprot ID: P41182
  ENST ID: ENST00000450123
  CDS Start-End: 25-1977
aagcaaggcattggtgaagacaaaatggcctcgccggctgacagctgtatccagttcacccgccatgccagtgatgttcttctcaaccttaatcgtctccggagtcgagacatcttgactgatgttgtcattgttgtgagccgtgagcagtttagagcccataaaacggtcctcatggcctgcagtggcctgttctatagcatctttacagaccagttgaaatgcaaccttagtgtgatcaatctagatcctgagatcaaccctgagggattctgcatcctcctggacttcatgtacacatctcggctcaatttgcgggagggcaacatcatggctgtgatggccacggctatgtacctgcagatggagcatgttgtggacacttgccggaagtttattaaggccagtgaagcagagatggtttctgccatcaagcctcctcgtgaagagttcctcaacagccggatgctgatgccccaagacatcatggcctatcggggtcgtgaggtggtggagaacaacctgccactgaggagcgcccctgggtgtgagagcagagcctttgcccccagcctgtacagtggcctgtccacaccgccagcctcttattccatgtacagccacctccctgtcagcagcctcctcttctccgatgaggagtttcgggatgtccggatgcctgtggccaaccccttccccaaggagcgggcactcccatgtgatagtgccaggccagtccctggtgagtacagccggccgactttggaggtgtcccccaatgtgtgccacagcaatatctattcacccaaggaaacaatcccagaagaggcacgaagtgatatgcactacagtgtggctgagggcctcaaacctgctgccccctcagcccgaaatgccccctacttcccttgtgacaaggccagcaaagaagaagagagaccctcctcggaagatgagattgccctgcatttcgagccccccaatgcacccctgaaccggaagggtctggttagtccacagagcccccagaaatctgactgccagcccaactcgcccacagagtcctgcagcagtaagaatgcctgcatcctccaggcttctggctcccctccagccaagagccccactgaccccaaagcctgcaactggaagaaatacaagttcatcgtgctcaacagcctcaaccagaatgccaaaccagaggggcctgagcaggctgagctgggccgcctttccccacgagcctacacggccccacctgcctgccagccacccatggagcctgagaaccttgacctccagtccccaaccaagctgagtgccagcggggaggactccaccatcccacaagccagccggctcaataacatcgttaacaggtccatgacgggctctccccgcagcagcagcgagagccactcaccactctacatgcaccccccgaagtgcacgtcctgcggctctcagtccccacagcatgcagagatgtgcctccacaccgctggccccacgttccctgaggagatgggagagacccagtctgagtactcagattctagctgtggtgagaaaccctatcgttgcaacatctgtggggcccagttcaaccggccagccaacctgaaaacccacactcgaattcactctggagagaagccctacaaatgcgaaacctgcggagccagatttgtacaggtggcccacctccgtgcccatgtgcttatccacactggtgagaagccctatccctgtgaaatctgtggcacccgtttccggcaccttcagactctgaagagccacctgcgaatccacacaggagagaaaccttaccattgtgagaagtgtaacctgcatttccgtcacaaaagccagctgcgacttcacttgcgccagaagcatggcgccatcaccaacaccaaggtgcaataccgcgtgtcagccactgacctgcctccggagctccccaaagcctgctgaagcatggagtgttgatgctttcgtct

SEQ ID NO: 110905 - DNA, 709 bp, Homo sapiens
  Payload ID: 1756
  Gene Symbol: BCL6
  Gene Name: B-cell CLL/lymphoma 6
  ENST ID: ENST00000438077
  CDS Start-End: 398-709
tcctggcggctgccggggccggcagcttcctggaaagttacttcttgttggagccggcaataggcaaagtgtgttctgtgaaatccgcagagccgagattgactacgttccgggaatgagagggctgtgtcattcccctcattgcctgctgcattgacggcgtaacaggaaaaaaaaaaaaaaaaaaaaaaaggcatacacacaatgttagctaccgaggtgcaccaaaagttttatttgaatgtaactaaattaagggccgccacggtcataccacaaagcctccgtcgcgccttgcggggggcttcgaggtggatcgcccaggggcgggcagtccctggaagacaggttttgagcaaaattttggactgtgaagcaaggcattggtgaagacaaaatggcctcgccggctgacagctgtatccagttcacccgccatgccagtgatgttcttctcaaccttaatcgtctccggagtcgagacatcttgactgatgttgtcattgttgtgagccgtgagcagtttagagcccataaaacggtcctcatggcctgcagtggcctgttctatagcatctttacagaccagttgaaatgcaaccttagtgtgatcaatctagatcctgagatcaaccctgagggattctgcatcctcctggacttcatgtacacatctcggctcaatttgcgggagggcaacatcatggct

SEQ ID NO: 110906 - DNA, 454 bp, Homo sapiens
  Payload ID: 1756
  Gene Symbol: BCL6
  Gene Name: B-cell CLL/lymphoma 6
  ENST ID: ENST00000430339
  CDS Start-End: 90-454
gttaaatcaatttctgtttgctttcttctcttctctgtaggttttgagcaaaattttggactgtgaagcaaggcattggtgaagacaaaatggcctcgccggctgacagctgtatccagttcacccgccatgccagtgatgttcttctcaaccttaatcgtctccggagtcgagacatcttgactgatgttgtcattgttgtgagccgtgagcagtttagagcccataaaacggtcctcatggcctgcagtggcctgttctatagcatctttacagaccagttgaaatgcaaccttagtgtgatcaatctagatcctgagatcaaccctgagggattctgcatcctcctggacttcatgtacacatctcggctcaatttgcgggagggcaacatcatggctgtgatggccacggctatgtacctgcagatggagcatgttgtggacacttgccg

SEQ ID NO: 110907 - DNA, 3399 bp, Homo sapiens
  Payload ID: 1756
  Gene Symbol: BCL6
  Gene Name: B-cell CLL/lymphoma 6
  Uniprot ID: P41182
  ENST ID: ENST00000621333
  CDS Start-End: 366-2318
accatcgtcttgggcccggggagggagagccaccttcaggcccctcgagcctcgaaccggaacctccaaatccgagacgctctgcttatgaggacctcgaaatatgccggccagtgaaaaaatcttgtggctttgagggcttttggttggccaggggcagtaaaaatctcggagagctgacaccaagtcctcccctgccacgtagcagtggtaaagtccgaagctcaaattccgagaattgagctctgttgattcttagaactggggttcttagaagtggtgatgcaagaagtttctaggaaaggccggacaccaggttttgagcaaaattttggactgtgaagcaaggcattggtgaagacaaaatggcctcgccggctgacagctgtatccagttcacccgccatgccagtgatgttcttctcaaccttaatcgtctccggagtcgagacatcttgactgatgttgtcattgttgtgagccgtgagcagtttagagcccataaaacggtcctcatggcctgcagtggcctgttctatagcatctttacagaccagttgaaatgcaaccttagtgtgatcaatctagatcctgagatcaaccctgagggattctgcatcctcctggacttcatgtacacatctcggctcaatttgcgggagggcaacatcatggctgtgatggccacggctatgtacctgcagatggagcatgttgtggacacttgccggaagtttattaaggccagtgaagcagagatggtttctgccatcaagcctcctcgtgaagagttcctcaacagccggatgctgatgccccaagacatcatggcctatcggggtcgtgaggtggtggagaacaacctgccactgaggagcgcccctgggtgtgagagcagagcctttgcccccagcctgtacagtggcctgtccacaccgccagcctcttattccatgtacagccacctccctgtcagcagcctcctcttctccgatgaggagtttcgggatgtccggatgcctgtggccaaccccttccccaaggagcgggcactcccatgtgatagtgccaggccagtccctggtgagtacagccggccgactttggaggtgtcccccaatgtgtgccacagcaatatctattcacccaaggaaacaatcccagaagaggcacgaagtgatatgcactacagtgtggctgagggcctcaaacctgctgccccctcagcccgaaatgccccctacttcccttgtgacaaggccagcaaagaagaagagagaccctcctcggaagatgagattgccctgcatttcgagccccccaatgcacccctgaaccggaagggtctggttagtccacagagcccccagaaatctgactgccagcccaactcgcccacagagtcctgcagcagtaagaatgcctgcatcctccaggcttctggctcccctccagccaagagccccactgaccccaaagcctgcaactggaagaaatacaagttcatcgtgctcaacagcctcaaccagaatgccaaaccagaggggcctgagcaggctgagctgggccgcctttccccacgagcctacacggccccacctgcctgccagccacccatggagcctgagaaccttgacctccagtccccaaccaagctgagtgccagcggggaggactccaccatcccacaagccagccggctcaataacatcgttaacaggtccatgacgggctctccccgcagcagcagcgagagccactcaccactctacatgcaccccccgaagtgcacgtcctgcggctctcagtccccacagcatgcagagatgtgcctccacaccgctggccccacgttccctgaggagatgggagagacccagtctgagtactcagattctagctgtggtgagaaaccctatcgttgcaacatctgtggggcccagttcaaccggccagccaacctgaaaacccacactcgaattcactctggagagaagccctacaaatgcgaaacctgcggagccagatttgtacaggtggcccacctccgtgcccatgtgcttatccacactggtgagaagccctatccctgtgaaatctgtggcacccgtttccggcaccttcagactctgaagagccacctgcgaatccacacaggagagaaaccttaccattgtgagaagtgtaacctgcatttccgtcacaaaagccagctgcgacttcacttgcgccagaagcatggcgccatcaccaacaccaaggtgcaataccgcgtgtcagccactgacctgcctccggagctccccaaagcctgctgaagcatggagtgttgatgctttcgtctccagccccttctcagaatctacccaaaggatactgtaacactttacaatgttcatcccatgatgtagtgcctctttcatccactagtgcaaatcatagctgggggttgggggtggtgggggtcggggcctgggggactgggagccgcagcagctccccctcccccactgccataaaacattaagaaaatcatattgcttcttctcctatgtgtaaggtgaaccatgtcagcaaaaagcaaaatcattttatatgtcaaagcaggggagtatgcaaaagttctgacttgactttagtctgcaaaatgaggaatgtatatgttttgtgggaacagatgtttcttttgtatgtaaatgtgcattcttttaaaagacaagacttcagtatgttgtcaaagagagggctttaatttttttaaccaaaggtgaaggaatatatggcagagttgtaaatatataaatatatatatatataaaataaatatatataaacctaaaaaagatatattaaaaatataaaactgcgttaaaggctcgattttgtatctgcaggcagacacggatctgagaatctttattgagaaagagcacttaagagaatattttaagtattgcatctgtataagtaagaaaatattttgtctaaaatgcctcagtgtatttgtatttttttgcaagtgaaggtttacaatttacaaagtgtgtattaaaaaaaacaaaaagaacaaaaaaatctgcagaaggaaaaatgtgtaattttgttctagttttcagtttgtatatacccgtacaacgtgtcctcacggtgccttttttcacggaagttttcaatgatgggcgagcgtgcaccatccctttttgaagtgtaggcagacacagggacttgaagttgttactaactaaactctctttgggaatgtttgtctcatcccattctgcgtcatgcttgtgttataactactccggagacagggtttggctgtgtctaaactgcattaccgcgttgtaaaatatagctgtacaaatataagaataaaatgttgaaaagtcaaactgg

SEQ ID NO: 110908 - DNA, 3555 bp, Homo sapiens
  Payload ID: 1757
  Gene Symbol: BCL6B
  Gene Name: B-cell CLL/lymphoma 6, member B
  Uniprot ID: Q8N143
  ENST ID: ENST00000293805
  CDS Start-End: 93-1532
agataaaggagccgaggccaagaggggagagagaccccgccccccttaagaagagaagccgcggcccctgcaggacgggggcctgtgtcgctatgggttcccccgccgccccggagggagcgctgggctacgtccgcgagttcactcgccactcctccgacgtgctgggcaacctcaacgagctgcgcctgcgcgggatcctcactgacgtcacgctgctggttggcgggcaacccctcagagcacacaaggcagttctcatcgcctgcagtggcttcttctattcaattttccggggccgtgcgggagtcggggtggacgtgctctctctgcccgggggtcccgaagcgagaggcttcgcccctctattggacttcatgtacacttcgcgcctgcgcctctctccagccactgcaccagcagtcctagcggccgccacctatttgcagatggagcacgtggtccaggcatgccaccgcttcatccaggccagctatgaacctctgggcatctccctgcgccccctggaagcagaacccccaacacccccaacggcccctccaccaggtagtcccaggcgctccgaaggacacccagacccacctactgaatctcgaagctgcagtcaaggcccccccagtccagccagccctgaccccaaggcctgcaactggaaaaagtacaagtacatcgtgctaaactctcaggcctcccaagcagggagcctggtcggggagagaagttctggtcaaccttgcccccaagccaggctccccagtggagacgaggcctccagcagcagcagcagcagcagcagcagcagtgaagaaggacccattcctggtccccagagcaggctctctccaactgctgccactgtgcagttcaaatgtggggctccagccagtaccccctacctcctcacatcccaggctcaagacacctctggatcaccctctgaacgggctcgtccactaccgggaagtgaatttttcagctgccagaactgtgaggctgtggcagggtgctcatcggggctggactccttggttcctggggacgaagacaaaccctataagtgtcagctgtgccggtcttcgttccgctacaagggcaaccttgccagtcatcgtacagtgcacacaggggaaaagccttaccactgctcaatctgcggagcccgttttaaccggccagcaaacctgaaaacgcacagccgcatccattcgggagagaagccgtataagtgtgagacgtgcggctcgcgctttgtacaggtggcacatctgcgggcgcacgtgctgatccacaccggggagaagccctacccttgccctacctgcggaacccgcttccgccacctgcagaccctcaagagccacgttcgcatccacaccggagagaagccttaccactgcgacccctgtggcctgcatttccggcacaagagtcaactgcggctgcatctgcgccagaaacacggagctgctaccaacaccaaagtgcactaccacattctcggggggccctagctgagcgcaggcccaggccccacttgcttcctgcgggtgggaaagctgcaggcccaggccttgcttccctatcaggcttgggcataggggtgtgccaggccactttggtatcagaaattgccaccctcttaatttctcactggggagagcaggggtggcagatcctggctagatctgcctctgttttgctggtcaaaacctcttccccacaagccagattgtttctgaggagagagctagctaggggctgggaaaggggagagattggagtcctggtctccctaagggaatagccctccacctgtggcccccattgcattcagtttatctgtaaatataatttattgaggcctttgggtggcaccggggccttcattcgattgcatttcccactcccctcttccacaagtgtgattaaaagtgaccagaaacacagaaggtgagatcacagctctgctggcagagattactagcccttggctctctcgtttggcttgggtattttatattatttctgtcataacttttatctttagaattgttctttctcctgtttgtttgcttgttagtttgtttaaaatggaaaaaggggttctctgtgttctgcccctgtaattctaggtctggaacctttatttgttctagggcagctctgggaacatgcgggattgtggaattgggtcaggaaccctctctggtattctggatgttgtaggttctctagcagtctagaaatggatacagacatttctctgttcttcaagggtgataggaaccattatgttgagcccaaaatggaagtaataataaatgcctcctggaggctgtgggtgtgggggattctgtatctggattccgtatcactccaagtggaggctggcaggtttttctgcaagatggtccagaatctaaaatgtcccattaatctggtcacttgggtttggctctgctgtatccatctatagtggtagagacccaccagggctcaagtggagtccatcatcctcccacgggggcctgttcttagcactgagttgatcgctccatgggggagagatcagacattccttatcagagatgatgtgaccttttctgactctgcccagtctctatgaatgttatggcctagggaagaatcatgaaactctttagcttgattagatggtaaacagtgttaacccatcctttactacagaggcatatgggtttgaatgttacctggggttctctctattgagttgagccccttcttcctttagtgggttttggacatcttctggcaagtgtccagatgccagaaccttcttttcctctagaagggatggtgcttggtaaccttaccttttaaaagctgggtctgtgacctggtcttcccatccctgcattcctgtctggaaccagtgaatgcattagaaccttccataggaaaagaaaaggggctgagttccattctgggtttgctgtagtttggttgggattattgttggcattacagatgtaaaagattgactagcccataggccaaaggcctgttctagttgaccaagtttcaagtaggattaagaggttggttgaggggtgcagtttctggtgtaggccaggtaggtagaaagtgaggaacagggttgcctcttggctgggtggagtctctgaaatgttagaagaagcgctgaagccttgattgatagttctgccccttgttgccctggggcttatctgattatgggacgagggtagaaagtaagaagcacttttgaatttgtggggtagaacttcaacaataagtcagttctagtggctgtcgcctggggactagtgagaaagctactcttctccctcttccctctttctccccatggccccactgcagaattaaagaaggaagaagggaaggcggaggagtctataagaaggaatcatgatttctatttagcagattggatgggcaggtggagaatgcctgggggtagaaatgttagatcttgcaacatcagatccttggaataaagaagcctctctgtgc

SEQ ID NO: 110909 - DNA, 865 bp, Homo sapiens
  Payload ID: 1757
  Gene Symbol: BCL6B
  Gene Name: B-cell CLL/lymphoma 6, member B
  ENST ID: ENST00000537931
  CDS Start-End: 1-408
tgctcatcggggctggactccttggttcctggggacgaagacaaaccctataagtgtcagctgtgccggtcttcgttccgctacaagggcaaccttgccagtcatcgtacagtgcacacaggggaaaagccttaccactgctcaatctgcggagcccgttttaaccggccagcaaacctgaaaacgcacagccgcatccattcgggagagaagccgtataagtgtgagacgtgcggctcgcgctttgtacaggtggcacatctgcgggcgcacgtgctgatccacaccggggagaagccctacccttgccctacctgcggaacccgcttccgccacctgcagaccctcaagagccacgttcgcatccacaccggagagaagccttaccacgaaccagtgacttcatgaagtttctccggagccacctgcatcctgctgctctgaagtcacttcctgcctgaggtgtggaggctgcagggagaaaccaggaagccactaataatatcaagaggccggggcgtgcatctgtgctggagatcttaatgctggcgacatgcctccatcaccaaggaagatggataagagttgggtcccgtaaagaccacaggggctggaggtggcactgagaagactgagttagaactaacgggccagcccaccctcccccagcaagggtatcttgaatctatccagggtccagtgcatgcatctctcccaccctttcccctgtcctgtgtgtgtgctgggtgcggaggtcactaattctgatattaccttcctctgggccttaaattcctcatctgtgaaaaagtcagttaccatgatctctgcagctacctccaacattgaaagtttgtagttgtct

SEQ ID NO: 110910 - DNA, 459 bp, Homo sapiens
  Payload ID: 1757
  Gene Symbol: BCL6B
  Gene Name: B-cell CLL/lymphoma 6, member B
  ENST ID: ENST00000576705
  CDS Start-End: 59-459
aagaacaagagactgagggagccagactcctgggtcccccaagagggcctgtgtcgctatgggttcccccgccgccccggagggagcgctgggctacgtccgcgagttcactcgccactcctccgacgtgctgggcaacctcaacgagctgcgcctgcgcgggatcctcactgacgtcacgctgctggttggcgggcaacccctcagagcacacaaggcagttctcatcgcctgcagtggcttcttctattcaattttccggggccgtgcgggagtcggggtggacgtgctctctctgcccgggggtcccgaagcgagaggcttcgcccctctattggacttcatgtacacttcgcgcctgcgcctctctccagccactgcaccagcagtcctagcggccgccacctatttgcagatggagcacgtggtccaggcatgccaccgcttcatccaggccag

SEQ ID NO: 110911 - DNA, 529 bp, Homo sapiens
  Payload ID: 1757
  Gene Symbol: BCL6B
  Gene Name: B-cell CLL/lymphoma 6, member B
  ENST ID: ENST00000573503
  CDS Start-End: 196-529
caagggagcgagggtgtcgtagagggcagaatgaacaagaagaattaggagggaggctgcgtgtgccggggctaggggctggaagtcctggctctagttgcacctcggaaggaaaaggcaaacagaggagggaaggcgtcttaggactgcctggatccagagcactttccacggcctctacaggcctgtgtcgctatgggttcccccgccgccccggagggagcgctgggctacgtccgcgagttcactcgccactcctccgacgtgctgggcaacctcaacgagctgcgcctgcgcgggatcctcactgacgtcacgctgctggttggcgggcaacccctcagagcacacaaggcagttctcatcgcctgcagtggcttcttctattcaattttccggggccgtgcgggagtcggggtggacgtgctctctctgcccgggggtcccgaagcgagaggcttcgcccctctattggacttcatgtacacttcgcgcctgcgcctctctccagccactgcaccagcagtcc

SEQ ID NO: 110912 - DNA, 2581 bp, Homo sapiens
  Payload ID: 1758
  Gene Symbol: BCL7A
  Gene Name: B-cell CLL/lymphoma 7A
  Uniprot ID: Q4VC05
  ENST ID: ENST00000261822
  CDS Start-End: 207-839
actgggccaggcgcgcggcggccccgggctttgtgtgtgtgtgtatgtgtgtgtgtgtgtgtgtgtgtgtgtgagtgtgtgcgtgtgagagtgcgagtgtctgtgcgcgagtgagtgagcggcgggcgggcgcgagtgtggccgccgcggagcgcgagcaggacccggcgggcgcgctccccagcctccgtctccccgccggaaccatgtcgggcaggtcggttcgagccgagacgaggagccgggccaaagatgatatcaagagggtcatggcggcgatcgagaaagtgcgcaaatgggagaagaaatgggtgaccgttggtgacacatccctacgaatctacaaatgggtccctgtgacggagcccaaggttgatgacaaaaacaagaataagaaaaaaggcaaggacgagaagtgtggctcagaggtgaccactccggagaacagttcctccccagggatgatggacatgcatgacgataacagcaaccagagctccatcgcagatgcctcccccatcaaacaggagaacagcagcaactccagccccgctccagagcccaactcggctgtgcccagcgacggcaccgaggccaaggtggatgaggcccaggctgatgggaaggagcacccaggagctgaagatgcttctgatgagcagaattcacagtcctcgatggaacattcgatgaacagctcagagaaagtagatcggcagccgtctggagactcgggtctggccgcagagacgtctgcaatctctcaggatttggaaggagtgccaccctctaaaaagatgaaactggaggcctctcaacaaaactccgaagagatgtagacgatgctttaaagcctccgatccatgttccatggaaggtacatcagcaattaattctagagcaactttgccccagcgattcctcttgggtgcgaacagaactactaacgtttcaagtttaccaagtgcaaatccaagaagacccagaacggcgtcacttctcagacactgaagaactctgctgtgaagcaaaacactcaaacctttaagggactgtccttggggaggcaggcggggctgacagctcaggagtgtctgcacactgtctcggaagccaggattccatttgtgttgctgctgtattttccccccacttctctatgtaacgatataagctatcggagggtggtaccgatcaggaacgctttttggcggggctttccactgttcaaccgattccttccgctttctttttttgtgccttgtgcccttgaggtgacctctggcatgtatcctggtggttcttacatccccctctgcaaagtgccctcttggtttggttcgggcggcggctgccaccctactcaccgctctcctccctgccccaggacttcatcggagcaggcagggtggagcgaaggagctccttagcccacctggtttgcaggtgcagggggaccttaggcacgccccaagcaccaggcaccagggcccaaggacgcgcaggtgttggggcacagtccccaagggctcggccccttggatcaggctgggcactcgctgtgctctcccctccttggggcgtttaggactgggcgtctccaagcccaccatggcccagatggacgtgcaaagcccttggaattttctggcacttcctctctattgcccccaccaccaccacccccatcactgctttctcccagacctccgaatacgaaatggcttctctggctgactgcaaggctgtctccttaaggcactgagtgggccggggaggctgggagccggcggcaggattagctggtgctgaactttctctcataggacgtcgcttggatttcaaatccacggtcacctgctgccctttgcctcccccgacgccccagcctgtgccccggagaggcaggatcgcagtggtcagaatccacgtgctttcctattctcaggctgttctgactctgagccaacagctggaccgtgtctcatccccagaacatgccgtctgtccccaccggggagtgggccttgatggccgggcctcgaaggccacaaacaaggcgtcgaggaattggaaagatttgcacaccctccagaaaggagagacgcaatctcccctccctcccatcccccaccttcgctggaacagcttcctctcactgaacggagacgcccccttggacgaactgcctaatcgtttggttctgaggcctggtttgctcttaattaatatatgaactcctcagaccttaaaccttttcctaagctttctttactgcactggagttctgactccctttgagttgtgtgttactgggggtggggtggggtcatgggttttgttgtttttgggggctaattggtgcatattcaggtaccacctttgacgtgtggctctttctcctgaccatcatgggaagtgtctgctggattccattttctaagagtttctgagggtgaggctcttatttttttttttaagggatcctgtctatttcctgcacttcgagaagaatcaaaatgttcctgaatttcaaatacctcatgcaaaatgtctcctgaaataagggaaaaaaaaaaaa

SEQ ID NO: 110913 - DNA, 6247 bp, Homo sapiens
  Payload ID: 1758
  Gene Symbol: BCL7A
  Gene Name: B-cell CLL/lymphoma 7A
  Uniprot ID: Q4VC05
  ENST ID: ENST00000538010
  CDS Start-End: 2671-3366
cccagcctagatttctttttattatgatcaaatacacataaaattgaccattgtaaccatttaaaagtgtacaattcagcgtcattaagtacattcacattgttctgcaaccatcaccactatctcattccagaactttcctatcactccgaaaggaaaccccacatccgttagcagtcactcctgctctccctcccccttgcctctggcaaccaccaatctgatatctgtctttatggattcgcctagttgtagatatctcccgcaaatggacttacgcatatttatccttttgtgactggcttctttcacttagcgtgtttcaaggttcacccatgttgtagcatgtattcattcccttttatggctgaataatattccattgtgtggatagacacatttatctgttcctcagtcactatttgaattctgacataatattttcctattttaaattttaagatacatttttttaaagtttcatgtggcccaaagcacatacctattgatctcacatatctctgtgagatctgttttatgacctgctgttgcatattttcccagaaaattctcggaacgattctctgaagtccttctttctctttctcttttttttctttttctttctctctttctttttttgttttgttttgttttattttgttttgttttgtttttttgagattcagttttgctctgttgcccaggctggagtgcaatggcatgatcattgcacctctgcctcccaggttcaagcattttcctgcctcagcctcccgcgtagctcagattacaggcctgcaccaccacgcccagctaatttttgtatttttagtagagacagggtttctccatgttggccaggctggtctcgaactcctgacctcgtgatctgcccacttcggcctccaaagtgctgggattacaggcatgaaccaccgcgcccggccttttttttttttctgagacagggtctcactctgtctcccaggctggagtgcagtggctggatctctgctcactgcaacctccgtctcccaggttcaagcgagtctcctgcctcagactcccgagtagctgcgattacaggagcccaccaccgcgcccggctaatttttgtatttttagtagagacggggtttcacccaccatgttggccaggctggtatcgaactcttaacctcaagtgatccacccgcctcggcctcccaaagtgctggtattacaggcatgagccaccgcgcccggccagtatttgttcttttcttcatttttcacgtcaggagactgcgtttcagaatagtaaaaacaaatgcctaggaaaaggcctgcggtctctccatttccacagtagcgtgttccccaaagaccaaaccctcaggggaaacgtctagaatgagtaacaacttaaggctgcaaccttaaactttcccaggactcagtttccccagctgtgaaatggctgctgtcgggctgtcatctccaggcccggggcgctgacatttgggccactctcggtctccctcttcattctgggcgcgcattagctctggtccggccggttccgctgcagctgaacagcaagatgcggcacccaggttaccctgatcatcgcagatttctccccggggctctgttctgaggcctcaaaagtgctccttgtagatgggaccaggggtcatttgggcagtagcagcgcctggtctcagtctggtactgaagtcaggaatggcttaaggtgaaatcgtggtcctctggtgaagctcagcgaagaccccctcgccttgtttatgacaagagaacttctgggggcgggaggaagagtccctgttacgatgctgatcatcattgagcttttgctgagcagaaaactctttagtactcaaggtcgagagtctctggtggtctgcctggcaccaggcaccttcctacaaccctagttttccaaaaggacaaagcctggggcaggcgacgtcctagctcgcatttgaacagggccgcgggccagcagagatgcgcgatgcccaactctttccaagagcacctcgcgtcccgaaccggtgccttcaactcggagaagtcaagagacccgcaagaaacttgcacgactgcacccgccgccgcgctctgggggctgggcaggggcagctgggctggctcccggggaacgcgacccccccgcgccccgcagaccggctgtctcccatggacccctcggcacctgcagcctccgaggaagggtcagcgcgcgtgtccgcacgcccgcccccaccgcgcgcccagagccgggggtcgccgtgcgcccttcgccacctccccaggagggcgtccggggcgtcccctctgggggcgcaggaggcccgggggcgctgcccggtggccgcggcgcccggaggccgcactgccggcggcggcggcggcgcggctccccctgctctgtgcagctgccgcccggcgcttgcgcactgggccaggcgcgcggcggccccgggctttgtgtgtgtgtgtatgtgtgtgtgtgtgtgtgtgtgtgtgtgagtgtgtgcgtgtgagagtgcgagtgtctgtgcgcgagtgagtgagcggcgggcgggcgcgagtgtggccgccgcggagcgcgagcaggacccggcgggcgcgctccccagcctccgtctccccgccggaaccatgtcgggcaggtcggttcgagccgagacgaggagccgggccaaagatgatatcaagagggtcatggcggcgatcgagaaagtgcgcaaatgggagaagaaatgggtgaccgttggtgacacatccctacgaatctacaaatgggtccctgtgacggagcccaaggttgatgacaaaaacaagaataagaaaaaaggcaaggacgagaagtgtggctcagaggtgaccactccggagaacagttcctccccagggatgatggacatgcatgacgataacagcaaccagagctccatcgcagatgcctcccccatcaaacaggagaacagcagcaactccagccccgctccagagcccaactcggctgtgcccagcgacggcaccgaggccaaggtggatgaggcccaggctgatgggaaggagcacccaggagctgaagatgcttctgatgagcagaattcacagtcctcgatggaacattcgatgaacagctcagagaaagtagatcggcagccgtctggagactcgggtctggccgcagagacgtctgcaatctctcaggtacctcgctcgaggtctcagaggggcagccagatcggccgggagcccattgggttgtcgggggatttggaaggagtgccaccctctaaaaagatgaaactggaggcctctcaacaaaactccgaagagatgtagacgatgctttaaagcctccgatccatgttccatggaaggtacatcagcaattaattctagagcaactttgccccagcgattcctcttgggtgcgaacagaactactaacgtttcaagtttaccaagtgcaaatccaagaagacccagaacggcgtcacttctcagacactgaagaactctgctgtgaagcaaaacactcaaacctttaagggactgtccttggggaggcaggcggggctgacagctcaggagtgtctgcacactgtctcggaagccaggattccatttgtgttgctgctgtattttccccccacttctctatgtaacgatataagctatcggagggtggtaccgatcaggaacgctttttggcggggctttccactgttcaaccgattccttccgctttctttttttgtgccttgtgcccttgaggtgacctctggcatgtatcctggtggttcttacatccccctctgcaaagtgccctcttggtttggttcgggcggcggctgccaccctactcaccgctctcctccctgccccaggacttcatcggagcaggcagggtggagcgaaggagctccttagcccacctggtttgcaggtgcagggggaccttaggcacgccccaagcaccaggcaccagggcccaaggacgcgcaggtgttggggcacagtccccaagggctcggccccttggatcaggctgggcactcgctgtgctctcccctccttggggcgtttaggactgggcgtctccaagcccaccatggcccagatggacgtgcaaagcccttggaattttctggcacttcctctctattgcccccaccaccaccacccccatcactgctttctcccagacctccgaatacgaaatggcttctctggctgactgcaaggctgtctccttaaggcactgagtgggccggggaggctgggagccggcggcaggattagctggtgctgaactttctctcataggacgtcgcttggatttcaaatccacggtcacctgctgccctttgcctcccccgacgccccagcctgtgccccggagaggcaggatcgcagtggtcagaatccacgtgctttcctattctcaggctgttctgactctgagccaacagctggaccgtgtctcatccccagaacatgccgtctgtccccaccggggagtgggccttgatggccgggcctcgaaggccacaaacaaggcgtcgaggaattggaaagatttgcacaccctccagaaaggagagacgcaatctcccctccctcccatcccccaccttcgctggaacagcttcctctcactgaacggagacgcccccttggacgaactgcctaatcgtttggttctgaggcctggtttgctcttaattaatatatgaactcctcagaccttaaaccttttcctaagctttctttactgcactggagttctgactccctttgagttgtgtgttactgggggtggggtggggtcatgggttttgttgtttttgggggctaattggtgcatattcaggtaccacctttgacgtgtggctctttctcctgaccatcatgggaagtgtctgctggattccattttctaagagtttctgagggtgaggctcttatttttttttttaagggatcctgtctatttcctgcacttcgagaagaatcaaaatgttcctgaatttcaaatacctcatgcaaaatgtctcctgaaataagggaaaaaaaaaaaaccacaactttgaaaatcttaatgttgaagttagcaatgccgaaaggtttctgtcttaaaaaaaaaaatccttgtacttatcaattttgccccttaggcagtcagttttgttgagaactgtgtcctgcatcctggcgcagaacctacctgatgcggttcctctccacgcatctcgaggcggcgttacctccagattccgtagagttagagtcacatttttctttgcagcgaaactccatcttggtgagagatgaatttggatatttatttccttctctgtttttgggaaacgagaggctacaaccaagacagctgaaggagaatgaaacacacacatccacagaaacagagaggcgtaggtggccctgccgttgaccgcagcctctctggacaggcaaggggagttggcgcaggtgaggactcagacgacgtccaccgtcccaaggctgtcactagtatttctctgaagtgcctgaaggtaggaatgggccggcgattgggaccagctgggccccaccacggccacgccaggcaaagcgccagcagccctgcactccacgctggccaagaaggccttccacgcagaatgacaagactgcaaaaatccgatgtgcttccttccctggcgcagtcgctcctcgagccgctgccccccacccaccctgcacccctcgccctccccccaccacagaatctaagacctttcagcttcgagccagggggcgggggatcccgagcaaaagccttccgtggacatcaggccccgtggcctcaagggctcccagggcaaacctaattccccccaaaacgtgaagtcggggaagctgcggctacacattccacaaagtgctggcacttacacccacaacccggaaggctgtggaccgattcctctagggtggtgacctcccattagcaaacggtgtcatggtttggaatgttcattatcgccaagaacctggttagaggcataaagaccttttttcaccgttacctaattttttcccctttcaagaattttttttttttttggtgtgttgtacagcagtataatttttcacttatttattccatcagtagatatggtttgtacaatgtacaattgtttcatttcagaaaataaaaatttcaaatcatgaa

SEQ ID NO: 110914 - DNA, 6247 bp, Homo sapiens; identical to SEQ ID NO: 110913
  Payload ID: 1758
  Gene Symbol: BCL7A
  Gene Name: B-cell CLL/lymphoma 7A
  ENST ID: ENST00000635191
  CDS Start-End: 2671-3366

SEQ ID NO: 110915 - DNA, 2581 bp, Homo sapiens; identical to SEQ ID NO: 110912
  Payload ID: 1758
  Gene Symbol: BCL7A
  Gene Name: B-cell CLL/lymphoma 7A
  ENST ID: ENST00000635403
  CDS Start-End: 207-839

SEQ ID NO: 110916 - DNA, 1975 bp, Homo sapiens
  Payload ID: 1759
  Gene Symbol: BCL7B
  Gene Name: B-cell CLL/lymphoma 7B
  Uniprot ID: Q9BQE9
  ENST ID: ENST00000223368
  CDS Start-End: 425-1033
ggaggacagagatggcgcaggagtgcggttccacagggtcaggttcctaacacgctggccagagcagggagccgacctccaaactctcagggaagagaaccaggttgcccaccggcggcacctcgcacctcgccctgaccacaagcacgtgcgcccaacccgcctcgcaccccggcccgggtagggggctcaggggactcccggggcactcaggagggacgccccgggcggggcgcgcaggcgcgctgaggccgtgagccccaaggggcgggcgggtgcgcgcgctttctcgcgcacgcgcgcacggagggggcgacggccgctgtgacgctgcggcggcggcgggcgggcggcggcgcgtgaggcgcgcgatccccggtgtcttgggagcagtgccccggcccccgccgctcccgccgccgccatgtcgggccggtcggtccgggcggagacccgcagccgggccaaggacgacatcaagaaggtgatggcggccatcgagaaagtgcggaaatgggagaagaagtgggtgactgtgggtgacacgtccctgaggatatttaagtgggttcctgtgacagacagcaaggagaaagaaaagtcaaaatcgaacagttcagcagcccgagaacctaatggctttccttctgatgcctcagccaattcctctctccttcttgaattccaggacgaaaacagcaaccagagttccgtgtctgacgtctatcagcttaaggtggacagcagcaccaactcaagccccagcccccagcagagtgagtccctgagcccagcacacacctccgacttccgcacggatgactcccagcccccaacgctgggccaggagatcctggaggagccctccctgccctcctcggaagttgctgatgaacctcctaccctcaccaaggaagaaccagttccactagagacacaggtcgttgaggaagaggaagactcaggtgccccgcccctgaagcgcttctgtgtggaccaacccacagtgccgcagacggcgtcagaaagctagcaccatcccggccctccgcctcctggccctgcctctatttattgcattctggttctggccgcgccgcgttgctggggtaagggcaagcactggggtcaagagcctgcacacatgagccttccgggctggaaggctggcgtaggacttggggctgtagcatcatcttcctgaccctggcacctgtgtctacttgctcccgagaagaggagcgctcatgtcttttttgcaccccaagttggctggagcatcggccaccccaagattcatctgtgacctccaggcagcagtctctgctccagaatctctggacggagctgctggcagcttctgcgagaagagagagatgtggaaggcaccttctagaagagagcgtgcctcaggttacttgaacttgaacggagactgtagactcccggactttcccctaggactgggggccctgtaggctgctgttggaggactgggtagagacattggagggaagggaagggcttttctccacacaagggcagagagtccgtctagatttcttgctgtcctgccagctctgcccatgcctgaggtggtcctacctctcacgggcaccctagctgctgacagccctttgtggccgccgtccccatcccctgccctcagcacacacatctgcacacacgcagctttgttctcacctctacctgtcattccagcatccctgcctcttgtcacaaactgccccagcaagaatttgaggttctgacaacagtacccatcccccacagtaccccttcagctcagtttctagaaagctcccttttctttgaaatctgcatgttgaattgaactttgtgattttattttttgtttcaaaaaagtttaagaaaatggaaatgggcaacagtgagtgaagacatattttagcactgaatagaatatttttaaaattaaactatttgaaatatg

SEQ ID NO: 110917 - DNA, 1458 bp, Homo sapiens
  Payload ID: 1759
  Gene Symbol: BCL7B
  Gene Name: B-cell CLL/lymphoma 7B
  Uniprot ID: Q9BQE9
  ENST ID: ENST00000411832
  CDS Start-End: 94-531
tgcggcggcggcgggcgggcggcggcgcgtgaggcgcgcgatccccggtgtcttgggagcagtgccccggcccccgccgctcccgccgccgccatgtcgggccggtcggtccgggcggagacccgcagccgggccaaggacgacatcaagaaggtgatggcggccatcgagaaagtgcggaaatgggagaagaagtgggtgactgtgggtgacacgtccctgaggatatttaagtgggttcctgtgacagacagcaaggagaaagaaaagtcaaaatcgaacagttcagcagcccgagaacctaatggctttccttctgatgcctcagccaattcctctctccttcttgaattccaggagccctccctgccctcctcggaagttgctgatgaacctcctaccctcaccaaggaagaaccagttccactagagacacaggtcgttgaggaagaggaagactcaggtgccccgcccctgaagcgcttctgtgtggaccaacccacagtgccgcagacggcgtcagaaagctagcaccatcccggccctccgcctcctggccctgcctctatttattgcattctggttctggccgcgccgcgttgctggggtaagggcaagcactggggtcaagagcctgcacacatgagccttccgggctggaaggctggcgtaggacttggggctgtagcatcatcttcctgaccctggcacctgtgtctacttgctcccgagaagaggagcgctcatgtcttttttgcaccccaagttggctggagcatcggccaccccaagattcatctgtgacctccaggcagcagtctctgctccagaatctctggacggagctgctggcagcttctgcgagaagagagagatgtggaaggcaccttctagaagagagcgtgcctcaggttacttgaacttgaacggagactgtagactcccggactttcccctaggactgggggccctgtaggctgctgttggaggactgggtagagacattggagggaagggaagggcttttctccacacaagggcagagagtccgtctagatttcttgctgtcctgccagctctgcccatgcctgaggtggtcctacctctcacgggcaccctagctgctgacagccctttgtggccgccgtccccatcccctgccctcagcacacacatctgcacacacgcagctttgttctcacctctacctgtcattccagcatccctgcctcttgtcacaaactgccccagcaagaatttgaggttctgacaacagtacccatcccccacagtaccccttcagctcagtttctagaaagctcccttttctttgaaatctgcatgttgaattgaactttgtgattttattttttgtttcaaaaaagtttaagaaaatggaaatgggcaacagtgagtgaagacatattttagcactgaatagaatatttttaaaattaa

SEQ ID NO: 110918 - DNA, 985 bp, Homo sapiens
  Payload ID: 1759
  Gene Symbol: BCL7B
  Gene Name: B-cell CLL/lymphoma 7B
  ENST ID: ENST00000455335
  CDS Start-End: 188-829
gacgctgcggcggcggcgggcgggcggcggcgcgtgaggcgcgcgatccccggtgtcttgggagcagtgccccggcccccgccgctcccgccgccgccatgtcgggccggtcggtccgggcggagacccgcagccgggccaaggacgacatcaagaaggtgatggcggccatcgagaaagtgcggaaatgacggaatctcgctctgtcacccaggctggagtgcattggcgcaatctcggctcactgcaacctctgcctctcaggttcaagcaattctcctgcctcagcctcctgagtagctgggactacagggagaagaagtgggtgactgtgggtgacacgtccctgaggatatttaagtgggttcctgtgacagacagcaaggagaaagaaaagtcaaaatcgaacagttcagcagcccgagaacctaatggctttccttctgatgcctcagccaattcctctctccttcttgaattccaggacgaaaacagcaaccagagttccgtgtctgacgtctatcagcttaaggtggacagcagcaccaactcaagccccagcccccagcagagtgagtccctgagcccagcacacacctccgacttccgcacggatgactcccagcccccaacgctgggccaggagatcctggaggagccctccctgccctcctcggaagttgctgatgaacctcctaccctcaccaaggaagaaccagttccactagagacacaggtcgttgaggaagaggaagactcaggtgccccgcccctgaagcgcttctgtgtggaccaacccacagtgccgcagacggcgtcagaaagctagcaccatcccggccctccgcctcctggccctgcctctatttattgcattctggttctggccgcgccgcgttgctggggtaagggcaagcactggggtcaagagcctgcacacatgagccttccgggctggaaggctggcgtaggacttggggctgta

SEQ ID NO: 110919 - DNA, 848 bp, Homo sapiens
  Payload ID: 1759
  Gene Symbol: BCL7B
  Gene Name: B-cell CLL/lymphoma 7B
  ENST ID: ENST00000448175
  CDS Start-End: 77-313
ggcggcggcgcgtgaggcgcgcgatccccggtgtcttgggagcagtgccccggcccccgccgctcccgccgccgccatgtcgggccggtcggtccgggcggagacccgcagccgggccaaggacgacatcaagaaggtgatggcggccatcgagaaagtgcggaaatgggagaagaagtgggtgactgtgggtgacacgtccctgaggatatttaagtgggttcctgtgacagacagcaaggagagacagagtctggctatgttgtccaggctggttgtgaactcctggcctcaagcagtcccccagccttgacctcccaagacgaaaacagcaaccagagttccgtgtctgacgtctatcagcttaaggtggacagcagcaccaactcaagccccagcccccagcagagtgagtccctgagcccagcacacacctccgacttccgcacggatgactcccagcccccaacgctgggccaggagatcctggaggagccctccctgccctcctcggaagttgctgatgaacctcctaccctcaccaaggaagaaccagttccactagagacacaggtcgttgaggaagaggaagactcaggtgccccgcccctgaagcgcttctgtgtggaccaacccacagtgccgcagacggcgtcagaaagctagcaccatcccggccctccgcctcctggccctgcctctatttattgcattctggttctggccgcgccgcgttgctggggtaagggcaagcactggggtcaagagcctgcacacatgagccttccgggctggaaggctggcgtaggacttggggctgtagcatcatcttcctgaccctggcacct

SEQ ID NO: 110920 - DNA, 887 bp, Homo sapiens
  Payload ID: 1759
  Gene Symbol: BCL7B
  Gene Name: B-cell CLL/lymphoma 7B
  ENST ID: ENST00000454871
  CDS Start-End: 32-298
tgccccggcccccgccgctcccgccgccgccatgtcgggccggtcggtccgggcggagacccgcagccgggccaaggacgacatcaagaaggtgatggcggccatcgagaaagtgcggaaatgggagaagaagtgggtgactgtgggtgacacgtccctgaggatatttaagtgggttcctgtgacagacagcaaggagacgaaaacagcaaccagagttccgtgtctgacgtctatcagcttaaggtggacagcagcaccaactcaagccccagcccccagcagagtgagtccctgagcccagcacacacctccgacttccgcacggatgactcccagcccccaacgctgggccaggagatcctggaggagccctccctgccctcctcggaagttgctgatgaacctcctaccctcaccaaggaagaaccagttccactagagacacaggtcgttgaggaagaggaagactcaggtgccccgcccctgaagcgcttctgtgtggaccaacccacagtgccgcagacggcgtcagaaagctagcaccatcccggccctccgcctcctggccctgcctctatttattgcattctggttctggccgcgccgcgttgctggggtaagggcaagcactggggtcaagagcctgcacacatgagccttccgggctggaaggctggcgtaggacttggggctgtagcatcatcttcctgaccctggcacctgtgtctacttgctcccgagaagaggagcgctcatgtcttttttgcaccccaagttggctggagcatcggccaccccaagattcatctgtgacctccaggcagcagtctctgctccagaatctctggacggagctgctggcagcttctgcgagaagagagaga

SEQ ID NO: 110921 - DNA, 1740 bp, Homo sapiens
  Payload ID: 1760
  Gene Symbol: BCL7C
  Gene Name: B-cell CLL/lymphoma 7C
  Uniprot ID: Q8WUZ0
  ENST ID: ENST00000215115
  CDS Start-End: 1017-1670
catcatgcgacttgtctatgttgctgtgtgtagccgggcatgtcaatcccgttgctgtgtctatgtgcatggtagtgagtagggcatcattcattttccattctgttgatgggttatttccagtttggggctgttatgaaagggctctgaacattcccatgcaccctcttgatgctcacacctacacatttctgctgggtgttgacagcctaggagtggaactgctggatcacagaggtggcatatgttcggcttcattagaaaactgccagttttccaaaatgtctctaccaatttacactcccccagaaatacaagagaggtccagtcgctctactttctcgcctccacacggtgcggtctttttcactttagccattctggtggtggagacccactcgtattcgcagcgcctggagcgtaattggcactcagttaacaagactgttgaatgaatggatgactgagtaagttgggcggtgtagaccaacagcctggcgagggcggacacacgcacgcactccacacacagcgtttcgcggacacccaccgcggctcacgcagcgcaggacacagaccctgtcgcgcaccccgcgcccacgtggtctgaacacacggcctcggccctgcctcgcgcgtccggtcgcaactcccgctctccgtccccaactcgcgcgtccgtccccaactcccgctctcggcggcgggcagggggcgctgagcgtccaggcgctccaagggggcgggcccgggtcggggcggggccggccgggcttccaggcctgggctctggccgcccgcgccaccgggccgctccggggacaggccggggcggggcgcggcggcaggaaacggggcggggacttgcggaggcgttggggacgagagagggcgcggccaactccaggggggacggcaggccgagagcgcggcgcccgggcctggcgcggagcctgagcccgccggacgggaggcggccccgccgcgggctcggccccggccccagccccgccagcatggccggccggactgtacgggccgagacccggagccgggccaaggatgacatcaagaaggtgatggcgaccatcgagaaggtccggagatgggagaagcgatgggtgactgtgggcgacacttcccttcgtatcttcaagtgggtgccagtggtggatccccaggaggaggagcgaaggcgggcaggtggcggggcagagagatcccgtggccgggaacgtcggggcaggggcgccagtccccgagggggtggccctctcatcctgctggatcttaatgatgagaacagcaaccagagtttccattcggaaggttccctgcaaaagggcacagagcccagtcctgggggcaccccccagcccagccgccctgtgtcacctgccggacccccagaaggggtccctgaggaggctcagcccccacggctgggccaagagagagatcccgggggcataactgctggcagcaccgacgaacccccaatgctgaccaaggaggagcctgttccagaactgctggaagctgaggcccccgaagcttaccctgtctttgagccagtgccacctgtccctgaggcagcccagggtgacacagaggactcggagggtgcccccccactcaagcgcatctgcccaaatgcccctgacccctgagaagccggcctgcctgtcctgttgccccaggggcccctttggctttttacaaataaagacccttttgtaa

SEQ ID NO: 110922 - DNA, 2409 bp, Homo sapiens
  Payload ID: 1760
  Gene Symbol: BCL7C
  Gene Name: B-cell CLL/lymphoma 7C
  Uniprot ID: Q8WUZ0
  ENST ID: ENST00000380317
  CDS Start-End: 359-1087
tccgtccccaactcgcgcgtccgtccccaactcccgctctcggcggcgggcagggggcgctgagcgtccaggcgctccaagggggcgggcccgggtcggggcggggccggccgggcttccaggcctgggctctggccgcccgcgccaccgggccgctccggggacaggccggggcggggcgcggcggcaggaaacggggcggggacttgcggaggcgttggggacgagagagggcgcggccaactccaggggggacggcaggccgagagcgcggcgcccgggcctggcgcggagcctgagcccgccggacgggaggcggccccgccgcgggctcggccccggccccagccccgccagcatggccggccggactgtacgggccgagacccggagccgggccaaggatgacatcaagaaggtgatggcgaccatcgagaaggtccggagatgggagaagcgatgggtgactgtgggcgacacttcccttcgtatcttcaagtgggtgccagtggtggatccccaggaggaggagcgaaggcgggcaggtggcggggcagagagatcccgtggccgggaacgtcggggcaggggcgccagtccccgagggggtggccctctcatcctgctggatcttaatgatgagaacagcaaccagagtttccattcggaaggttccctgcaaaagggcacagagcccagtcctgggggcaccccccagcccagccgccctgtgtcacctgccggacccccagaaggggtccctgaggaggctcagcccccacggctgggccaagagagagatcccgggggcataactgctggcagcaccgacgaacccccaatgctgaccaaggaggagcctgttccagaactgctggaagctgaggattcgggagtgagaatgacgaggagagcccttcacgagaaggggctgaagacagagcccctcaggaggctcctgcccaggaggggcctccggacaaatgtccggcccagttccatggcggtgccggacaccagagctcccgggggaggcagcaaggccccgagggcacccagaacaatcccccagggtaaggggaggtgagtgggctccccaagcaagccaagacccctaaagcctcccttggctgccccaagatccagccactacctgtgccccgagggcggaaagagcttcccagctcacccaccgcggtaacatcggagggcgagcggccccacacctgcccgaacctaaggccacagcacccatctggctcgccactggcgcccgaatgcatgggaagggcttagggcagaactcggaccacatccagtgcctgaggccgccttgctagaggcctaggggaggggtgcactgggctgcctcgcccacctcctcacgcacccatgcggccaccctcccagcggtctgagtgtgccatgcgaggcgcctgccaccccgggagaggcgccgagtcccgagtcctgccggcactgagcctccgggtccacagcgggcaagggccgtggcggggacaagcgcaggggacccgccggcctcccgccttctgcagcaccacgagatgcccacgtggcacctggacgtccatgcatatgttgaggcccgtgcacgcgcagagaccccagcgcagaagccgccccgcacgccagggcttatgtatgccagcgctgggagacctccagcgcccgaggacatacggcaagtggttccaccagggtgtcagcctagcaggccaacctgggaacccatgtggacaagcggcctttcagcccaggcgcccgcctcgggtggaggcgtggagacttctggcgcagccctgagctggtggcctaacctacctggaaaatcctagcccgagaagcagcgcgagtgagccttttgggtggttccaaggcccttcaccaagctctcacttcctgacttcaccgttgggtctgttgtactaggaaataataacgcctcccatttatcaagggtttactctgtaccaggcattgtgactgatgtaatttagttctcactgcatccctgtggcatggatattctcattatctgcattttgcagatggagaaattgagtctctgagaggttaaggaacctgcccaaagtcagcaatgcagtaccacttcttgtgctgggacacagcggggttaaggccgtgggttaacagggcctccatttatggagagcattcatttttctctggtgaattacagaaaacgctttctacactgaagtgagtagatactccctgggatgaaagtcaacattcgtaccaatgattgagatgacagaaatttcacgcttcaagccaatgctttaggttcagcccatggaattctggaatgaccttttctcagtcgtcaccagggtgatgttggtgaaggaagctccattccag

SEQ ID NO: 110923 - DNA, 1603 bp, Homo sapiens
  Payload ID: 1760
  Gene Symbol: BCL7C
  Gene Name: B-cell CLL/lymphoma 7C
  ENST ID: ENST00000572628
  CDS Start-End: 1-880
ggccggccggactgtacgggccgagacccggagccgggccaaggatgacatcaagaaggtgatggcgaccatcgagaaggtccggagatgggagaagcgatgggtgactgtgggcgacacttcccttcgtatcttcaagtgggtgccagtggtggatccccaggaggaggagcgaaggcgggcaggtggcggggcagagagatcccgtggccgggaacgtcggggcaggggcgccagtccccgagggggtggccctctcatcctgctggatcttaatgatgagaacagcaaccagagtttccattcggaaggttccctgcaaaagggcacagagcccagtcctgggggcaccccccagcccagccgccctgtgtcacctgccggacccccagaaggggtccctgaggaggctcagcccccacggctgggccaagagagagatcccgggggcataactgctggcagcaccgacgaacccccaatgctgaccaaggaggagcctgttccagaactgctggaagctgagactatggaaatgatgttagacaaaaagcaaattcaagcgattttcttattcgagttaaaaatgggtcataaagcagtggagacacttcgcaacatcaacaacacacttggcccaggaactgctaatgaacatatagtacagtggtggttcaagaagttttgcaaagaagacaagagccttgaagatgagaagcatagtgtctggccatcggaagttgacaatgaccaactgaaagctctcattgaagctgatcctgttaaaactacacaagaagttgcccaagaactcaaccatcgaccattctatggccgtctggcatttgaagcaaattggaaaggtgaaaaagctcaataagtgggtgcctcatgaccttaccaaaaattaaaaaaatcgtcattttgaagtgtcatcttctcttattctatgcaacaacaacgaaccatttcttgatcagattgtgatgtgtgacaaaaagtcgattttatatgacaaccggcaacaaccagctctgtggctgtactgagaagcagctctaaagtacttcccaaagccaaccttgcaccaaaaaaaggtcacggtcactgtttggtggtctgctgctggtctgatccactgcaactttctgaatcccagtgaaaccattacatctgagaagtatgctcagcaaatcgatgagatgcaccaaaaactgcaaggcctgctgtggcactgctcaacagaaagggcccagttattctccatgacaacaaccacacatcgcataaccagcgcttcaaatattgaggccgggtgcggtggctcacgcctgtaatcccaacattttgggaggccaaggtggacggatcacttgaggtcaggagttcgagaacagcctggccaacatggtgaaacctgtctctactaaaaatacaaaaattagctgggtatggtagctggcgcctgtaatcccagctactcgagaggctgaggcaagagaactgcttgaacccggaaggtggaggttgcgatgagccaagattgtgccactgcactccagcctgggcgacagagtgagacttcatttcaaaaaaaaaaaaa

SEQ ID NO: 110924 - DNA, 1206 bp, Homo sapiens
  Payload ID: 1760
  Gene Symbol: BCL7C
  Gene Name: B-cell CLL/lymphoma 7C
  ENST ID: ENST00000574418
  CDS Start-End: 257-571
ggggccggccgggcttccaggcctgggctctggccgcccgcgccaccgggccgctccggggacaggccggggcggggcgcggcggcaggaaacggggcggggacttgcggaggcgttggggacgagagagggcgcggccaactccaggggggacggcaggccgagagcgcggcgcccgggcctggcgcggagcctgagcccgccggacgggaggcggccccgccgcgggctcggccccggccccagccccgccagcatggccggccggactgtacgggccgagacccggagccgggccaaggatgacatcaagaaggtgatggcgaccatcgagaaggtccggagatgggagaagcgatgggtgactgtgggcgacacttcccttcgtatcttcaagtgggtgccagtggtggatccccaggaggaggttccctgcaaaagggcacagagcccagtcctgggggcaccccccagcccagccgccctgtgtcacctgccggacccccagaaggggtccctgaggaggctcagcccccacggctgggccaagagagagatcccgggggcataactgctggcagcaccgacgaacccccaatgctgaccaaggaggagcctgttccagaactgctggaagctgaggattcgggagtgagaatgacgaggagagcccttcacgagaaggggctgaagacagagcccctcaggaggctcctgcccaggaggggcctccggacaaatgtccggcccagttccatggcggtgccggacaccagagctcccgggggaggcagcaaggccccgagggcacccagaacaatcccccagggtaaggggaggtgagtgggctccccaagcaagccaagacccctaaagcctcccttggctgccccaagatccagccactacctgtgccccgagggcggaaagagcttcccagctcacccaccgcggtaacatcggagggcgagcggccccacacctgcccgaacctaaggccacagcacccatctggctcgccactggcgcccgaatgcatgggaagggcttagggcagaactcggaccacatccagtgcctgaggccgccttgctagaggcctaggggaggggtgcactgggctgcctcgcccacctcctcacgcacccatgcggccaccctcccagcggtctgagtgtgccatgcgaggcgcctgccaccccggga

SEQ ID NO: 110925 - DNA, 6278 bp, Homo sapiens
  Payload ID: 1761
  Gene Symbol: BCL9
  Gene Name: B-cell CLL/lymphoma 9
  Uniprot ID: O00512
  ENST ID: ENST00000234739
  CDS Start-End: 741-5021
cttccatgtgtgaaagctacttggcatgaatgcctgggccgtaccaagtgtcaccgcagcaagagggggagtcagaagaaaaacagatcagaccagagcagacaataggcccctaaagtgttccccctaagttgctttgatgttgtcctggtgtcttgataccaggaggccagggattgcgggaaaagggtcttttttgtcttcattcactttcccccctcagtttctgaaatgattctccagaatttctcctcataaaaaaggactgaatgtgggcccagttggcgtcattctgctttgacctaaacattcccatctgattgggtggcagagatcatttttggaaagttcttccgtgtcccgatgtagaagaaatagcaaattggacatattgaaagacaagggtcatctttgagaagggggttcctggactcctcacctccaggatgagcactgcagtgtcgtgacccttggggttttgtatgccctggagatgcgagattttcctctggcagcaggaggcacgcacccagagaatgctggagctgcaaggggaaaggacccacttccacagcagagaaaaacaaagaggaaaaaggcatacaggcagcgagcgctaagggacgcacccagcaagcagtgggccagtgccactgcccccagcagctgtttctgctgcaacccgagaggaactcggtgagcctgtcccgtttgtgactgcaagctcaggatttcaatcaatgcattccagtaaccctaaagtgaggagctctccatcaggaaacacacagagtagccctaagtcaaagcaggaggtgatggtccgtccccctacagtgatgtccccatctggaaacccccagctggattccaaattctccaatcagggtaaacaggggggctcagccagccaatcccagccatccccctgtgactccaagagtgggggccatacccctaaagcactccctggcccaggtgggagcatggggctgaagaatggggctggaaatggtgccaagggcaaggggaaaagggagcgaagtatttccgccgactcctttgatcagagagatcctgggactccaaacgatgactctgacattaaagaatgtaattctgctgaccacataaagtcccaggattcccagcacacaccacactcgatgaccccatcaaatgctacagcccccaggtcttctaccccctcccatggccaaactactgccacagagcccacacctgctcagaagactccagccaaagtggtgtacgtgttttctactgagatggccaataaagctgcagaagctgttttgaagggccaggttgaaactatcgtctctttccacatccagaacatttctaacaacaagacagagagaagcacagcgcctctgaacacacagatatctgcccttcggaatgatccgaaacctctcccacaacagcccccagctccggccaaccaggaccagaattcttcccagaataccagactgcagccaactccacccattccggcaccagcacccaagcctgccgcacccccacgtcccctggaccgggagagtcctggggtagaaaacaaactgattccttctgtaggaagtcctgccagctccactccactgcccccagatggtactgggcccaactcaactcccaacaatagggcagtgacccctgtctcccaggggagcaatagctcttcagcagatcccaaagcccctccgcctccaccagtgtccagtggcgagccccccacactgggagagaatcccgatggcctatctcaggagcagctggagcaccgggagcgctccttacaaactctcagagatatccagcgcatgctttttcctgatgagaaagaattcacaggagcacaaagtgggggaccgcagcagaatcctggggtattagatgggcctcagaaaaaaccagaagggccaatacaggccatgatggcccaatcccaaagcctaggtaagggacctgggccccggacagacgtgggagctccatttggccctcaaggacatagagatgtacccttttctccagatgaaatggttccaccttctatgaactcccagtctgggaccataggacccgaccaccttgaccatatgactcccgagcagatagcgtggctgaaactgcagcaggagttttatgaagagaagaggaggaagcaggaacaagtggttgtccagcagtgttccctccaggacatgatggtccatcagcacgggcctcggggagtggtccgaggacccccccctccataccagatgacccctagtgaaggctgggcacctgggggtacagagccattttctgatggtatcaacatgccacattctctgcccccgaggggcatggctccccaccccaacatgccagggagccagatgcgcctccctggatttgcaggcatgataaactctgaaatggaagggccgaatgtccccaaccctgcatctagaccaggtctttctggagtcagttggccagatgatgtgccaaaaatcccagatggtcgaaattttcctcctggccagggcattttcagcggtcctggccgaggggaacgcttcccaaacccccaaggattgtctgaagagatgtttcagcagcagctggcagagaaacagctgggtctccccccagggatggccatggaaggcatcaggcccagcatggagatgaacaggatgattccaggctcccagcgccacatggagcctgggaataaccccattttccctcgaataccagttgagggccctctgagtccttctaggggtgactttccaaaaggaattcccccacagatgggccctggtcgggaacttgagtttgggatggttcctagtgggatgaagggagatgtcaatctaaatgtcaacatgggatccaactctcagatgatacctcagaagatgagagaggctggggcgggccctgaggagatgctgaaattacgcccaggtggctcagacatgctgcctgctcagcagaagatggtgccactgccatttggtgagcacccccagcaggagtatggcatgggccccagaccattccttcccatgtctcagggtccaggcagcaacagtggcttgcggaatctcagagaaccaattgggcccgaccagaggactaacagccggctcagtcatatgccaccactacctctcaacccttccagtaaccccaccagcctcaacacagctcctccagttcagcgcggcctggggcggaagcccttggatatatctgtggcaggcagccaggtgcattccccaggcattaaccctctgaagtctcccacgatgcaccaagtccagtcaccaatgctgggctcgccctcggggaacctcaagtccccccagactccatcgcagctggcaggcatgctggcgggcccagctgctgctgcttccattaagtccccccctgttttggggtctgctgctgcttcacctgtccacctcaagtctccatcacttcctgccccgtcacctggatggacctcttctccaaaacctccccttcagagtcctgggatccctccaaaccataaagcacccctcaccatggcctccccagccatgctgggaaatgtagagtcaggtggccccccacctcctacagccagccagcctgcctctgtgaatatccctggaagtcttccctctagtacaccttataccatgcctccagagccaaccctttcccagaacccactctctattatgatgtctcgaatgtccaagtttgcaatgcccagttccaccccgttataccatgatgctatcaagactgtggccagctcagatgacgactcccctccagctcgttctcccaacttgccatcaatgaataatatgccaggaatgggcattaatacacagaatcctcgaatttcaggtccaaaccccgtggttccgatgccaaccctcagcccaatgggaatgacccagccactttctcactccaatcagatgccctctccaaatgccgtgggacccaacatacctcctcatggggtcccaatggggcctggcttgatgtcacacaatcctatcatggggcatgggtcccaggagccaccgatggtacctcaaggacggatgggcttcccccagggcttccctccagtacagtctcccccacagcaggttccattccctcacaatggccccagtggggggcagggcagcttcccaggagggatgggtttcccaggagaaggcccccttggccgccccagcaacctgccccaaagttcagcagatgcagcactttgcaagcctggaggccccgggggtcctgactccttcactgtcctggggaacagcatgccttcggtgtttacagacccagatctgcaggaggtcatccgacctggagccaccggaatacctgagtttgatctatcccgcattattccatctgagaagcccagccagacgctgcaatatttccctcgaggggaagttccaggccgtaaacagccccagggtcctggacctgggttttcacacatgcaggggatgatgggcgaacaagcccccagaatgggactagcattacctggcatgggaggtccagggccagtgggaactccggacatccctcttggtacagctccatccatgccaggccacaaccccatgagaccaccagcctttctccaacaaggcatgatgggacctcaccatcggatgatgtcaccagcacaatctacaatgcccggccagcccaccctgatgagcaatccagctgctgccgtgggcatgattcctggcaaggatcgggggcctgccgggctctacacccaccctgggcctgtgggctctccaggcatgatgatgtccatgcagggcatgatgggaccccaacagaacatcatgatccccccacagatgaggccccggggcatggctgctgacgtgggcatgggtggatttagccaaggacctggcaacccaggaaacatgatgttttaagctgctaagatgggatgtgccgatccttgtcaagatgagattccaggtcctgagagctgctttgagggagttccaggagtacttactattggtcatgcaataggagaacagagacccgagggctgctttgggggaggggggaactcgagaatgtatggatttacctgaaaacaaattattcatttaatcaacaggtgtgttttttttaagatttattttttaaaaattatttttgtggacttgggtatcaatgatggcacctacttttgggaatctgtagctgtgctttgagaattgccatcggtcatgtgttgcaccgttctctgtatgtttacgtcctttggactggcttctcccaggattcttttctgtttttgtttttttgatttgggctttatttttttctgtgtactgtactatattgtaaaagggattttagcagagactttagtctttggggcaagaggagaacaggaatgctgggctgtttactttaggtggagaatccatcttcagacctttggactattttctttcaactgcagtgtatagaaaaaccaaactacgacctcagagcagagtattaatgaaaagcacaaaaaaaggaactaagttcagcgaggggtggggggaggggggagatttttcttttgaaaaataatgactcttaggacatttgtttttcagttcaagtgctcttcagcactgtcttgtctcccaatataccaacccactggcacatttttctcttgttttctctctccgattttgctctgtctcctcagttaagtgtttccttcctttgtgccccccgctggtgaccctctgcttccctctctctttccctttggcagctgcaatacacagtgttattttggggaaataaatctagcaaagcctcgccttccatgccgagcgtcctcttggctctgagagggaaaggtctgtccttgggatgctctctggtcttttttccccctaagtctttctctttcccatcatacccttccctgcccaccttgttttctgttctccttttattaggaattcccaagtgaattttattaatgtgggagtggaacagatgctaaaagctatccaggattttgtttctgtttgttttaaattttgtggttccttccctttcctccccctcccatgcgtaagacgttctgtgtaacctccattaaatttggtacaaaaccactcgccagagctgtggtgtcagaaaaataaaatatattgtttcttacaaaa

SEQ ID NO: 110926 - DNA, 6272 bp, Homo sapiens
  Payload ID: 1761
  Gene Symbol: BCL9
  Gene Name: B-cell CLL/lymphoma 9
  ENST ID: ENST00000622552
  CDS Start-End: 741-4925
cttccatgtgtgaaagctacttggcatgaatgcctgggccgtaccaagtgtcaccgcagcaagagggggagtcagaagaaaaacagatcagaccagagcagacaataggcccctaaagtgttccccctaagttgctttgatgttgtcctggtgtcttgataccaggaggccagggattgcgggaaaagggtcttttttgtcttcattcactttcccccctcagtttctgaaatgattctccagaatttctcctcataaaaaaggactgaatgtgggcccagttggcgtcattctgctttgacctaaacattcccatctgattgggtggcagagatcatttttggaaagttcttccgtgtcccgatgtagaagaaatagcaaattggacatattgaaagacaagggtcatctttgagaagggggttcctggactcctcacctccaggatgagcactgcagtgtcgtgacccttggggttttgtatgccctggagatgcgagattttcctctggcagcaggaggcacgcacccagagaatgctggagctgcaaggggaaaggacccacttccacagcagagaaaaacaaagaggaaaaaggcatacaggcagcgagcgctaagggacgcacccagcaagcagtgggccagtgccactgcccccagcagctgtttctgctgcaacccgagaggaactcggtgagcctgtcccgtttgtgactgcaagctcaggatttcaatcaatgcattccagtaaccctaaagtgaggagctctccatcaggaaacacacagagtagccctaagtcaaagcaggaggtgatggtccgtccccctacagtgatgtccccatctggaaacccccagctggattccaaattctccaatcagggtaaacaggggggctcagccagccaatcccagccatccccctgtgactccaagagtgggggccatacccctaaagcactccctggcccaggtgggagcatggggctgaagaatggggctggaaatggtgccaagggcaaggggaaaagggagcgaagtatttccgccgactcctttgatcagagagatcctgggactccaaacgatgactctgacattaaagaatgtaattctgctgaccacataaagtcccaggattcccagcacacaccacactcgatgaccccatcaaatgctacagcccccaggtcttctaccccctcccatggccaaactactgccacagagcccacacctgctcagaagactccagccaaagtggtgtacgtgttttctactgagatggccaataaagctgcagaagctgttttgaagggccaggttgaaactatcgtctctttccacatccagaacatttctaacaacaagacagagagaagcacagcgcctctgaacacacagatatctgcccttcggaatgatccgaaacctctcccacaacagcccccagctccggccaaccaggaccagaattcttcccagaataccagactgcagccaactccacccattccggcaccagcacccaagcctgccgcacccccacgtcccctggaccgggagagtcctggggtagaaaacaaactgattccttctgtaggaagtcctgccagctccactccactgcccccagatggtactgggcccaactcaactcccaacaatagggcagtgacccctgtctcccaggggagcaatagctcttcagcagatcccaaagcccctccgcctccaccagtgtccagtggcgagccccccacactgggagagaatcccgatggcctatctcaggagcagctggagcaccgggagcgctccttacaaactctcagagatatccagcgcatgctttttcctgatgagaaagaattcacaggagcacaaagtgggggaccgcagcagaatcctggggtattagatgggcctcagaaaaaaccagaagggccaatacaggccatgatggcccaatcccaaagcctaggtaagggacctgggccccggacagacgtgggagctccatttggccctcaaggacatagagatgtacccttttctccagatgaaatggttccaccttctatgaactcccagtctgggaccataggacccgaccaccttgaccatatgactcccgagcagatagcgtggctgaaactgcagcaggagttttatgaagagaagaggaggaagcaggaacaagtggttgtccagcagtgttccctccaggacatgatggtccatcagcacgggcctcggggagtggtccgaggacccccccctccataccagatgacccctagtgaaggctgggcacctgggggtacagagccattttctgatggtatcaacatgccacattctctgcccccgaggggcatggctccccaccccaacatgccagggagccagatgcgcctccctggatttgcaggcatgataaactctgaaatggaagggccgaatgtccccaaccctgcatctagaccaggtctttctggagtcagttggccagatgatgtgccaaaaatcccagatggtcgaaattttcctcctggccagggcattttcagcggtcctggccgaggggaacgcttcccaaacccccaaggattgtctgaagagatgtttcagcagcagctggcagagaaacagctgggtctccccccagggatggccatggaaggcatcaggcccagcatggagatgaacaggatgattccaggctcccagcgccacatggagcctgggaataaccccattttccctcgaataccagttgagggccctctgagtccttctaggggtgactttccaaaaggaattcccccacagatgggccctggtcgggaacttgagtttgggatggttcctagtgggatgaagggagatgtcaatctaaatgtcaacatgggatccaactctcagatgatacctcagaagatgagagaggctggggcgggccctgaggagatgctgaaattacgcccaggtggctcagacatgctgcctgctcagcagaagatggtgccactgccatttggtgagcacccccagcaggagtatggcatgggccccagaccattccttcccatgtctcagggtccaggcagcaacagtggcttgcggaatctcagagaaccaattgggcccgaccagaggactaacagccggctcagtcatatgccaccactacctctcaacccttccagtaaccccaccagcctcaacacagctcctccagttcagcgcggcctggggcggaagcccttggatatatctgtggcaggcagccaggtgcattccccaggcattaaccctctgaagtctcccacgatgcaccaagtccagtcaccaatgctgggctcgccctcggggaacctcaagtccccccagactccatcgcagctggcaggcatgctggcgggcccagctgctgctgcttccattaagtccccccctgttttggggtctgctgctgcttcacctgtccacctcaagtctccatcacttcctgccccgtcacctggatggacctcttctccaaaacctccccttcagagtcctgggatccctccaaaccataaagcacccctcaccatggcctccccagccatgctgggaaatgtagagtcaggtggccccccacctcctacagccagccagcctgcctctgtgaatatccctggaagtcttccctctagtacaccttataccatgcctccagagccaaccctttcccagaacccactctctattatgatgtctcgaatgtccaagtttgcaatgcccagttccaccccgttataccatgatgctatcaagactgtggccagctcagatgacgactcccctccagctcgttctcccaacttgccatcaatgaataatatgccaggaatgggcattaatacacagaatcctcgaatttcaggtccaaaccccgtggttccgatgccaaccctcagcccaatgggaatgacccagccactttctcactccaatcagatgccctctccaaatgccgtgggacccaacatacctcctcatggggtcccaatggggcctggcttgatgtcacacaatcctatcatggggcatgggtcccaggagccaccgatggtacctcaaggacggatgggcttcccccagggcttccctccagtacagtctcccccacagcaggttccattccctcacaatggccccagtggggggcagggcagcttcccaggagggatgggtttcccaggagaaggcccccttggccgccccagcaacctgccccaaagttcagcagatgcagcactttgcaagcctggaggccccgggggtcctgactccttcactgtcctggggaacagcatgccttcggtgtttacagacccagatctgcaggaggtcatccgacctggagccaccggaatacctgagtttgatctatcccgcattattccatctgagaagcccagccagacgctgcaatatttccctcgaggggaagttccaggccgtaaacagccccagggtcctggacctgggttttcacacatgcaggggatgatgggcgaacaagcccccagaatgggactagcattacctggcatgggaggtccagggccagtgggaactccggacatccctcttggtacagctccatccatgccaggccacaaccccatgagaccaccagcctttctccaacaaggcatgatgggacctcaccatcggatgatgtcaccagcacaatctacaatgcccggccagcccaccctgatgagcaatccagctgctgccgtgggcatgattcctggcaaggatcgggggcctgccgggctctacacccaccctgggcctgtgggctctccaggcatgatgatgtccatgcagggcatgatgggacccaacagaacatcatgatccccccacagatgaggccccggggcatggctgctgacgtgggcatgggtggatttagccaaggacctggcaacccaggaaacatgatgttttaagctgctaagatgggatgtgccgatccttgtcaagatgagattccaggtcctgagagctgctttgagggagttccaggagtacttactattggtcatgcaataggagaacagagacccgagggctgctttgggggaggggggaactcgagaatgtatggatttacctgaaaacaaattattcatttaatcaacaggtgtgttttttttaagatttattttttaaaaattatttttgtggacttgggtatcaatgatggcacctacttttgggaatctgtagctgtgctttgagaattgccatcggtcatgtgttgcaccgttctctgtatgtttacgtcctttggactggcttctcccaggattcttttctgtttttgtttttttgatttgggctttatttttttctgtgtactgtactatattgtaaaagggattttagcagagactttagtctttggggcaagaggagaacaggaatgctgggctgtttactttaggtggagaatccatcttcagacctttggactattttctttcaactgcagtgtatagaaaaaccaaactacgacctcagagcagagtattaatgaaaagcacaaaaaaaggaactaagttcagcgaggggtggggggaggggggagatttttcttttgaaaaataatgactcttaggacatttgtttttcagttcaagtgctcttcagcactgtcttgtctcccaatataccaacccactggcacatttttctcttgttttctctctccgattttgctctgtctcctcagttaagtgtttccttcctttgtgccccccgctggtgaccctctgcttccctctctctttccctttggcagctgcaatacacagtgttattttggggaaataaatctagcaaagcctcgccttccatgccgagcgtcctcttggctctgagagggaaaggtctgtccttgggatgctctctggtcttttttccccctaagtctttctctttcccatcatacccttccctgcccaccttgttttctgttctccttttattaggaattcccaagtgaattttattaatgtgggagtggaacagatgctaaaagctatccaggattttgtttctgtttgttttaaattttgtggttccttccctttcctccccctcccatgcgtaagacgttctgtgtaacctccattaaatttggtacaaaaccactcgccagagctgtggtgtcagaaaaataaaatatattgtttctta

SEQ ID NO: 110927 - DNA, 10005 bp, Homo sapiens
  Payload ID: 1762
  Gene Symbol: BCL9L
  Gene Name: B-cell CLL/lymphoma 9-like
  Uniprot ID: Q86UU0
  ENST ID: ENST00000334801
  CDS Start-End: 966-5465
cgtgcgtgtcttgtctccctgtccacgtgtgagctgtgagtgtgtgtgagtcagagttcgggtgtctgtgggtctctgagcctctgctggcagcacccggggctcgccaagctcttgccggctggcgcgcgcccagcccctggcgggacttgtccgtgtgtctgtccgcgcgcggggcctggagaagcacgctgcagtcctgtccgcctcccgctcgctgcctcgctggctgtcgctcgctcgctctgcctctccgcccgggctctgccgaagggggcggggtgggggtgcagggcggggggaggggaggctcctgcattcttgcggtcggggaggaatccgagccagcgttactggtctccagaagagcccagctgcagccccggggccccgccaggcctctcgctgcccgcccgggcctgctgggatgggcacgggctaggcctcgagctggggacggggcggggcgtggccccaaccccgggccccctccacggctggagcgctctgggggtggggcacgaggggtaccccaccctgggtgaggggcgcgtctgggagcaggaatccctcagggggccaggggagacctcacagccgccccacacggcacctttgctacctagccttttagtgaattctgtctctgccgcccgtcggggcggaggcttgctggagactgcaagccccctgagggcaaggtgcgggagggatggggacagggctggcctccaggatcgagaccccatctcgtaatcctctttttccagtgccaccccaccctatccagctccctagtcccagggctgttgggtcctcccttctcccctccccctctgacaccccctccccaagtcacgagttttctctttggggcttgttgctgcagtccgtgctccagtaccgagtacctggctgggccctgggcacgcacaggggccgtagccccactgtgtgtgggagccatgaggatcctggctaacaagacaaggttaccccaccccaggaggagagaagctccagggagcccgccgctgtccccccgcggtcattgcccccctgccccagccaagccaatgcacccagaaaataaattgaccaatcatggcaagacagggaatggcggggcccaatctcagcaccagaatgtgaaccaaggacccacctgcaacgtgggctcgaagggcgtgggggcggggaaccatggggccaaggccaaccagatctcgcctagcaactcaagtctgaagaacccccaggcaggggtgccccctttcagctcgctcaagggcaaggtgaagagggaccggagtgtgtctgtggactctggagagcagcgagaggctgggaccccatccctggattcagaggccaaagaggtggcgccgcggagtaagcggcgctgtgtgctggagcggaagcagccgtacagtggggacgaatggtgctctggaccggacagtgaggaggacgacaagcccattggggccacccacaattgtaatgtagcagacccagccatggcggccccacagctgggtcccggccaaaccacccaactgcccctcagcgagagcagcgtgccaggcgccccgcacggccctcctcctggccttcggcctgatgcccctgggggcgggggcgggggcgggggcgtccccggaaagcctccctcgcagttcgtatatgtcttcaccacccacctggccaacacggctgcagaggcagtgctgcagggccgggccgactccatcctcgcctaccaccagcagaacgtgccccgggccaagcttgaccaggcccctaaagtgccccccaccccagaaccgctacccctgagcacgccgtcagcaggcaccccgcagtcccagccacctccactgccgccgccgccacccccggcccctggcagtgccccgcctgctctgcccccagaggggcctcctgaggacagcagtcaggacctggcccccaactcggtgggagctgccagcacaggtggtgggactgggggcacccaccctaacaccccgacggctaccaccgccaacaaccctctgcctcctggaggagaccccagcagtgcccccggccctgccctgctgggggaggcagccgcccctggaaatgggcagcgcagcctggtgggctcagagggcttgtccaaagagcagctggagcatcgggaacggtccctccagacgctgcgagacattgagcgactgctgctccgcagcggagagactgagcccttcctcaaggggcccccaggaggagcgggtgaggggggcccaccagcacaagccccccctcccccccagcagccacccacggcccctcccagcgggctgaagaaatatgaggaacccttgcagtccatgatttcacagacacagagcctagggggccccccgctggagcatgaagtgcctgggcaccccccgggtggggacatggggcagcagatgaacatgatgatacagaggctgggccaggacagcctcacgcctgagcaggtggcctggcgcaagctgcaggaggagtactacgaagagaaacggcggaaagaggaacagattgggctgcatgggagccgtcctctgcaggacatgatgggcatggggggcatgatggtgagggggcccccgcctccttaccacagcaagcctggggatcagtggccacctggaatgggtgcgcagctgcgggggcccatggatgttcaagatcccatgcagctccggggcggacctccctttcctgggccccgtttcccaggcaaccagatacaacgggtacctgggtttgggggcatgcagagtatgcccatggaggtgcccatgaatgccatgcagaggcccgtgagaccaggcatgggctggaccgaagacttgccccctatggggggacccagcaattttgcccagaacaccatgccctacccaggtgggcagggtgaggcggagcgattcatgactccccgggtccgtgaggagctgctgcggcaccagctgctggagaagcggtcgatgggcatgcagcgccccctgggcatggcaggcagtggcatgggacagagcatggagatggagcggatgatgcaggcgcaccgacagatggatcctgccatgtttcccgggcagatggctggtggtgagggcctggcgggcactcccatgggcatggagtttggtggaggccggggcctcctgagccctcccatggggcagtctgggctgagggaggtggacccacccatggggccaggcaacctcaacatgaacatgaatgtcaacatgaacatgaacatgaacctgaacgtgcagatgaccccgcagcagcagatgctgatgtcgcagaagatgcggggccctggggacttgatggggccccagggcctcagtcctgaggagatggcccgggttcgggcccagaacagcagtggcgtgatgggcggcccgcagaagatgctgatgccttcacagtttcccaaccagggccagcagggattctctggaggccagggaccctaccaagccatgtcccaggacatgggcaatacccaagacatgttcagccctgatcagagctcaatgcccatgagcaacgtgggcaccacccggctcagccacatgcctctgccccctgcgtccaatcctcctgggaccgtgcattcagccccaaaccgggggctaggcaggcggccttcggacctcaccatcagtattaatcagatgggctcaccgggcatggggcacttgaagtcgcccacccttagccaggtgcactcacccctggtcacctcgccctctgccaacctcaagtcaccccagactccctcacagatggtgcccttgccttctgccaacccgccaggacctctcaagtcgccccaggtcctcggctcctccctcagtgtccgttcacccactggctcgcccagcaggctcaagtctccttccatggcggtgccttctccaggctgggttgcctcacctaagacggccatgcccagcccgggggtctcccagaacaagcagccgcctctcaacatgaactcttccaccaccctgagcaacatggaacagggtaccctcccgcctagcggcccccggagcagctcctcagcacctcccgccaaccctcccagcggcctcatgaaccccagcctaccattcacttcctccccagaccccacaccttcccagaaccccctgtcactgatgatgacccagatgtccaagtacgccatgcccagctccaccccgctctaccacaatgccatcaagaccatcgccacctcagacgacgagctgctgcccgaccggcccctgctgccccccccaccaccaccgcagggctccgggccagggatcagcaacagccagcccagccagatgcacctgaactcagccgctgcccagagccctatgggcatgaacctgccaggccagcagcccctgtcccatgagcccccgcccgccatgctgccctcccccacccctctgggctccaacattccactgcatcccaacgcacaggggacaggggggccccctcaaaactccatgatgatggccccagggggccccgactccctgaatgccccctgtggcccagtgcccagctcctcccagatgatgcccttcccccctcggctgcagcagccccatggtgccatggcccccactgggggtgggggcggggggcctggcctgcagcagcactacccgtcaggcatggccctgcctcccgaggacctgcccaaccagccgccaggccccatgcctccccagcagcacctgatgggcaaagccatggctgggcgcatgggcgacgcatacccaccgggtgtgctccctggggtggcatcagtgctgaacgaccccgagctgagcgaggtgatccggcccaccccaacggggatccccgagttcgacttgtcgaggatcatcccctctgagaagccaagcagcaccctccagtacttccccaagagcgagaaccagccccccaaggctcagccccctaatctgcatctcatgaacctgcagaacatgatggcggagcagactccctctcggcctcccaacctcccaggccagcagggcgtccagcgggggctcaacatgtccatgtgccaccctggacagatgtccttgctgggcaggacaggcgtgcccccacagcaggggatggtgccccatggcctgcaccagggggtcatgtcccctccacaaggcctcatgacccagcagaatttcatgctgatgaagcagcggggcgtggggggcgaggtctacagccagccgccccacatgctctccccgcagggctccctcatgggccccccgccccagcagaacctcatggtgtcccacccccttcggcagcgcagtgtgtccctggacagccagatgggctacctcccggcaccaggcggcatggccaacctgcccttctagaagtcgctgccagggctggagccggggcaatgttgcaaatacgataaccttaacaaagttcttcccctcaatgttgggatggcctgggtcgcggggtggggtggagggggtgggagggggcttgtgtagggagtggcatttgtggaaaccagatgtgctggcagcttagggggaagtggcagtgtggggtgggggattttgcattggggttggttccatttcggccaccaggactgcccctcccccactcctcccaattcctatggagcctctctattttacctctttccgtgcatccctgcacccgccacacccccttcagctatgcttttggagtcctggatgggaatctggggggagagaggaaggacaggtcaggtctcccccagccccttctgctcctgtctcctcgtgtccgcattgctggagctccacctccctcttggtttctccgcacccgcccattttccttctgtctttacctgcttcgtatcctttccctgctgatgtggctgacccctctcccacccctccctgcaggcggctggccaggtgggcaggtgccagccggagctgtaaatagagcgctgcgcttttgtgctggtttgtgcgtgtgctgtatttctgtgttttgatagaagtcacacaaaaaaaaaaggataaaagaaacccttccccccttcttcaagttattgctccctccattcccctggacccagggacatgcagccctacatggccacccactgtttgcagtgtctctgggtccctaagggataccattcctgtctcgtccccaaatggtaagatgacgtaaatgacccactcctaaactgaggtcagaccacctaggcttccacctggtgagccctagcagggctgagacccccagggcggcagcctgtctgctgctgagtgattcagggagaacatgtgtgcacgtgcatgtgtgtttgcccacaccggtgacacggggccctggctttccactttggatgcccgggcatccgctgctgctacatcttagccagaacttgaagtcttttgtcccagtttgggatgaaggaaaggaggaagaggcggtggctgtgtggcccccttgagtggagccatggaaggggtggcatggtgccactggggcctgtggctgtagtagccctgggccaggtaacctccagggccctgacttttccagaggctgctgccacctacttcttatcaaagaagggggagaacagttcatctgagtcagtgcacctcccctccagtctccactccctgaggatggaatcggggaaacagcatcctgccgcctcctctctgcctgcccactcaccggcaaggttgtccctctgcccagggctcagggccatgtaccagatctgtctgtgcccacccaggcacagccactgcctcccccttggctccctgctcctacccaggagagctccctatccgcctttggtcagagctgaagccatatacgactgggtgtttgtccccctactttggccccaggagtaaaaaaacttctccttttctcacttcctttcctgcctcgggaggtggcagggcagttccctggctgaggccttttgcgccccacctccaggaccaagggccattctagacagggtgtcttctaccaggacccgtccctagccttcctggcctggagggcctggtcttgcactggcagctgtaatacaaagggaactcgccccacttctcccagcctggtgctgtcctctcggcccaccatcggccaggtccagcgcttcctctggggctgacaacaggcccctgactcaccccggtcacctcccagggtccatggccagggcctctgtgtttggggggccacttgcccttcatcctgccaggcgctttgcccgccctgcctcagcctgggccctgtgcccttgagccctccacccctggcccaagacccccccaaactgtctgactctgtgtttcctgccctgaggagagaggggtcagattgcagcgggccgagtgccctctccgtcccctctcctcccacccacgccacaggccagcctactcttccctccatccatggccacacccccagccattttgtaccattatataaatatatatataaatataaatatataaatacaatatgtgaagacatcttcttggtttttattttgaaacaatttttaggcttgttccgggggtctctgtgctgcctgtactgtattgacctgttttataggtgcctttttattaaaaagaaaattcaaaatccagcctcttgcctctttgcatctgcttcagactcccccatcgattacccagcttgcgaggagatactcagagaaaaaagggacgtcttagggcttcctcgttgtcctgccgtgaagacactctcacgtgagccacagctgttatttccccagtggggcctcccaaggagcttggctgcttggcttgagtgggacaagggcaggggtccctgactccccacctgatcaaaggctggggaggtggtagggagcacccagaactgccggacgggcctcccacaccccaggtgagcaaacaagcacggagcagcttcctgcggttccatctgagtgacatcctcacgggggcagggcacggcttcctggggcctggggacttccctgcctcagtgtgtttcttacacttccctgcctaaggtgatgccacggaggggatggttgagatgactcccacgggccccttccagtccacctttctccgttccgactctgagtttcctcgggtctatagcttatgggaagggagtgaggaggggacaagccagcctccttccccatcaatgcccacaacctcccatcccctggacccagccaccctaggagttctccaccccaccccatctcgcctggcggaggggaccgccgggtttgattgatccatctccctccttggggttcgggaagaaagctcttttcttccctctgtcgggtttctttcttgcttctcggccttcacgcttcctcaggtcactggctggcctccaagggcacctagagtcagccctgcctgcagaccacccaggatccggtgacatggggtggacccagcgctgtttcggtcagagccaggggcagctacctgaactcaaccagtctgagcttcctgcttggtcaagatgactgcaggcttgggggcctggcagaatgtctgtgtttttagggactgagttgtccgaaggccacactctgctgccagctggcctttcctcagccttaacctccactcatcccctggtgctcagcttctggctttgtttgacaggtgggcaggaggagagaggggaagctgtggaggtcagcagcccctaagctgatggagtgtgttctgggaggggcaggcgctctccgttggcaagggcagaagtagaagttgtttcttgagcattggatgattaggatgggaggtgcgtgaggttctctcagcccaggggggtgcagatgggtaaggacagccttcactgtgcctttgagctgctttccgctccctgggctccagcctagccccagggccggcagaagagctggcagggatgttctagaaatgggggttggttcctctagctaccccaaatgaggatactcctaggacactcttagccacggtgagcccttaggatcccagctcctgttggaaggagcatccagcatcactgcctgccccaaggaaaagcagcaataaaaggggacactgggacctagaacgtggtgagagaggtggcattctctgactcagagagactgctcctgcgccagctagggaagagctggcacagggaggcagggccggtacagcccagcttcgtcaggagccgcgacaggtcactgcggaacttcacgccggcgaaagtgtagagcatggggttgaggcagcagtgggccaggcccaggaactcacacatggtgatggccacggggagagagccattcagcttgcaggtattgtccacggccttcagcctcgccagggtgtccaggaagatgacgatgtggtagggtgaccagcagaggaagaagatgcttgtcaccaggatggccaccctgactgccttctgccgctgagggcgccgctgggcctggcgcaacctgtgcactacccccacgtagcaccagcccatcaccagcatgggcagcaggaatcccgccacatggtagaggaatcgggaggtgaaccaggcatgcgtttctgcttggttctcttgggagaaggtgcaacgtggcagggagttgttgtgatggccttggctgactttggcgaagagaatctctggcaaggcaaggaggaagcccaccagccagatggtcccacaggtgatgtggatggagaggaggcggcggtggcggtaggcatggacggcgtggacaatggccaggtagcggtccacggcgatgcaggccaggagcaggctgctgcagtagaagttgactttgtgcagggcaatcacagttttgcagaggaaggtccccaggacccagcccacagagcc

SEQ ID NO: 110928 - DNA, 611 bp, Homo sapiens
  Payload ID: 1762
  Gene Symbol: BCL9L
  Gene Name: B-cell CLL/lymphoma 9-like
  ENST ID: ENST00000532899
  CDS Start-End: 347-611
ggaggcaggaacccaggcacccagcgatccccggatagcctctcccgggccgggctggtattgagatcaaggcgtccaggatcaaaagatcaccgcctgcccgccccctctgcatctccaactggcgagcaggaggacccccatccacacaacgaccctgacctggtcatggcgtccagctccggcctggcgtgaggaccccccaatccgcgtgagggagcccccaacccagaccacacccttgagcctgagcccgacattattcctgagtccgtgctccagtaccgagtacctggctgggccctgggcacgcacaggggccgtagccccactgtgtgtgggagccatgaggatcctggctaacaagacaaggttaccccaccccaggaggagagaagctccagggagcccgccgctgtccccccgcggtcattgcccccctgccccagccaagccaatgcacccagaaaataaattgaccaatcatggcaagacagggaatggcggggcccaatctcagcaccagaatgtgaaccaaggacccacctgcaacgtgggctcgaagggcgtgggggcggggaaccatggggccaaggccaaccagatctcgc

SEQ ID NO: 110929 - DNA, 5514 bp, Homo sapiens
  Payload ID: 1762
  Gene Symbol: BCL9L
  Gene Name: B-cell CLL/lymphoma 9-like
  ENST ID: ENST00000526143
  CDS Start-End: 457-4845
gaaggaagcaagcaagcaagcaagggaaggaggagcaggagcaggagccggagccctgaggttcggggccgagaccccggccccgcgccccggccccggcgggtgtgcgcgctctcccgccactgcccggcgcccgcgaccatgctccgcggttgggaggcaggaacccaggcacccagcgatccccggatagcctctcccgggccgggctggtattgagatcaaggcgtccaggatcaaaagatcaccgcctgcccgccccctctgcatctccaactggcgagcaggaggacccccatccacacaacgaccctgacctggtcatggcgtccagctccggcctggcgtgaggaccccccaatccgcgtgaggttaccccaccccaggaggagagaagctccagggagcccgccgctgtccccccgcggtcattgcccccctgccccagccaagccaatgcacccagaaaataaattgaccaatcatggcaagacagggaatggcggggcccaatctcagcaccagaatgtgaaccaaggacccacctgcaacgtgggctcgaagggcgtgggggcggggaaccatggggccaaggccaaccagatctcgcctagcaactcaagtctgaagaacccccaggcaggggtgccccctttcagctcgctcaagggcaaggtgaagagggaccggagtgtgtctgtggactctggagagcagcgagaggctgggaccccatccctggattcagaggccaaagaggtggcgccgcggagtaagcggcgctgtgtgctggagcggaagcagccgtacagtggggacgaatggtgctctggaccggacagtgaggaggacgacaagcccattggggccacccacaattgtaatgtagcagacccagccatggcggccccacagctgggtcccggccaaaccacccaactgcccctcagcgagagcagcgtgccaggcgccccgcacggccctcctcctggccttcggcctgatgcccctgggggcgggggcgggggcgggggcgtccccggaaagcctccctcgcagttcgtatatgtcttcaccacccacctggccaacacggctgcagaggcagtgctgcagggccgggccgactccatcctcgcctaccaccagcagaacgtgccccgggccaagcttgaccaggcccctaaagtgccccccaccccagaaccgctacccctgagcacgccgtcagcaggcaccccgcagtcccagccacctccactgccgccgccgccacccccggcccctggcagtgccccgcctgctctgcccccagaggggcctcctgaggacagcagtcaggacctggcccccaactcggtgggagctgccagcacaggtggtgggactgggggcacccaccctaacaccccgacggctaccaccgccaacaaccctctgcctcctggaggagaccccagcagtgcccccggccctgccctgctgggggaggcagccgcccctggaaatgggcagcgcagcctggtgggctcagagggcttgtccaaagagcagctggagcatcgggaacggtccctccagacgctgcgagacattgagcgactgctgctccgcagcggagagactgagcccttcctcaaggggcccccaggaggagcgggtgaggggggcccaccagcacaagccccccctcccccccagcagccacccacggcccctcccagcgggctgaagaaatatgaggaacccttgcagtccatgatttcacagacacagagcctagggggccccccgctggagcatgaagtgcctgggcaccccccgggtggggacatggggcagcagatgaacatgatgatacagaggctgggccaggacagcctcacgcctgagcaggtggcctggcgcaagctgcaggaggagtactacgaagagaaacggcggaaagaggaacagattgggctgcatgggagccgtcctctgcaggacatgatgggcatggggggcatgatggtgagggggcccccgcctccttaccacagcaagcctggggatcagtggccacctggaatgggtgcgcagctgcgggggcccatggatgttcaagatcccatgcagctccggggcggacctccctttcctgggccccgtttcccaggcaaccagatacaacgggtacctgggtttgggggcatgcagagtatgcccatggaggtgcccatgaatgccatgcagaggcccgtgagaccaggcatgggctggaccgaagacttgccccctatggggggacccagcaattttgcccagaacaccatgccctacccaggtgggcagggtgaggcggagcgattcatgactccccgggtccgtgaggagctgctgcggcaccagctgctggagaagcggtcgatgggcatgcagcgccccctgggcatggcaggcagtggcatgggacagagcatggagatggagcggatgatgcaggcgcaccgacagatggatcctgccatgtttcccgggcagatggctggtggtgagggcctggcgggcactcccatgggcatggagtttggtggaggccggggcctcctgagccctcccatggggcagtctgggctgagggaggtggacccacccatggggccaggcaacctcaacatgaacatgaatgtcaacatgaacatgaacatgaacctgaacgtgcagatgaccccgcagcagcagatgctgatgtcgcagaagatgcggggccctggggacttgatggggccccagggcctcagtcctgaggagatggcccgggttcgggcccagaacagcagtggcgtgatgggcggcccgcagaagatgctgatgccttcacagtttcccaaccagggccagcagggattctctggaggccagggaccctaccaagccatgtcccaggacatgggcaatacccaagacatgttcagccctgatcagagctcaatgcccatgagcaacgtgggcaccacccggctcagccacatgcctctgccccctgcgtccaatcctcctgggaccgtgcattcagccccaaaccgggggctaggcaggcggccttcggacctcaccatcagtattaatcagatgggctcaccgggcatggggcacttgaagtcgcccacccttagccaggtgcactcacccctggtcacctcgccctctgccaacctcaagtcaccccagactccctcacagatggtgcccttgccttctgccaacccgccaggacctctcaagtcgccccaggtcctcggctcctccctcagtgtccgttcacccactggctcgcccagcaggctcaagtctccttccatggcggtgccttctccaggctgggttgcctcacctaagacggccatgcccagcccgggggtctcccagaacaagcagccgcctctcaacatgaactcttccaccaccctgagcaacatggaacagggtaccctcccgcctagcggcccccggagcagctcctcagcacctcccgccaaccctcccagcggcctcatgaaccccagcctaccattcacttcctccccagaccccacaccttcccagaaccccctgtcactgatgatgacccagatgtccaagtacgccatgcccagctccaccccgctctaccacaatgccatcaagaccatcgccacctcagacgacgagctgctgcccgaccggcccctgctgccccccccaccaccaccgcagggctccgggccagggatcagcaacagccagcccagccagatgcacctgaactcagccgctgcccagagccctatgggcatgaacctgccaggccagcagcccctgtcccatgagcccccgcccgccatgctgccctcccccacccctctgggctccaacattccactgcatcccaacgcacaggggacaggggggccccctcaaaactccatgatgatggccccagggggccccgactccctgaatgccccctgtggcccagtgcccagctcctcccagatgatgcccttcccccctcggctgcagcagccccatggtgccatggcccccactgggggtgggggcggggggcctggcctgcagcagcactacccgtcaggcatggccctgcctcccgaggacctgcccaaccagccgccaggccccatgcctccccagcagcacctgatgggcaaagccatggctgggcgcatgggcgacgcatacccaccgggtgtgctccctggggtggcatcagtgctgaacgaccccgagctgagcgaggtgatccggcccaccccaacggggatccccgagttcgacttgtcgaggatcatcccctctgagaagccaagcagcaccctccagtacttccccaagagcgagaaccagccccccaaggctcagccccctaatctgcatctcatgaacctgcagaacatgatggcggagcagactccctctcggcctcccaacctcccaggccagcagggcgtccagcgggggctcaacatgtccatgtgccaccctggacagatgtccttgctgggcaggacaggcgtgcccccacagcaggggatggtgccccatggcctgcaccagggggtcatgtcccctccacaaggcctcatgacccagcagaatttcatgctgatgaagcagcggggcgtggggggcgaggtctacagccagccgccccacatgctctccccgcagggctccctcatgggccccccgccccagcagaacctcatggtgtcccacccccttcggcagcgcagtgtgtccctggacagccagatgggctacctcccggcaccaggcggcatggccaacctgcccttctagaagtcgctgccagggctggagccggggcaatgttgcaaatacgataaccttaacaaagttcttcccctcaatgttgggatggcctgggtcgcggggtggggtggagggggtgggagggggcttgtgtagggagtggcatttgtggaaaccagatgtgctggcagcttagggggaagtggcagtgtggggtgggggattttgcattggggttggttccatttcggccaccaggactgcccctcccccactcctcccaattcctatggagcctctctattttacctctttccgtgcatccctgcacccgccacacccccttcagctatgcttttggagtcctggatgggaatctggggggagagaggaaggacaggtcaggtctcccccagccccttctgctcctgtctcctcgtgtccgcattgctggagctccacctccctcttggtttctccgcacccgcccattttccttctgtctttacctgcttcgtatcctttccctgctgatgtggctgacccctctcccacccctccctgcaggcggctggccaggtgggcaggtgccagccggagctgtaaatagagcgctgcgcttttgtgctggtttgtgcgtgtgctgtatttctgtgttttgatagaagtcacacaaaaaaaaaaggataaaagaaa

SEQ ID NO: 110930 - DNA, 1784 bp, Homo sapiens
  Payload ID: 1763
  Gene Symbol: BLNK
  Gene Name: B-cell linker
  Uniprot ID: Q8WV28
  ENST ID: ENST00000224337
  CDS Start-End: 143-1513
gcagcctgcactctcagaaatcagacttgagtggccggaacccttgagaccagaggcttaccatgctgctccctaggagggccaggaactgctgacgtgaccactggacagttattcgtgtctcttacaattaccaaacagaatggacaagcttaataaaataaccgtccccgccagtcagaagttgaggcagcttcaaaagatggtccatgatattaaaaacaatgaaggtggaataatgaataaaatcaaaaagctaaaagtcaaagcacctccaagtgttcctcgaagggactacgcttcagagagccctgctgacgaagaggagcagtggtccgatgactttgacagcgactatgaaaatccagatgagcactcggactcagagatgtacgtgatgcccgccgaggagaacgctgatgacagctacgagccgcctccagtagagcaggaaaccaggccggttcacccagccctgcccttcgccagaggcgagtatatagacaatcgatcaagccagaggcattccccacccttcagcaagacacttcccagtaagcccagctggccttcagagaaagcaaggctcacctccaccctgccggccctgactgctttgcagaaacctcaagtcccacccaaacccaaaggcctccttgaggatgaggctgattatgtggtccccgtggaagataatgatgaaaactatattcatcccacagaaagcagttcacctccacctgaaaaagctcccatggtgaatagatcaaccaagccaaattcctcaacgcccgcctctcctccaggaacagcttcaggtcgaaacagtggggcctgggaaaccaagtcacctccaccagctgcaccatccccgttgccacgggccgggaaaaaaccaacgacaccactgaagacaactccagttgcctctcaacagaatgcttcaagtgtttgtgaagaaaaacctatacctgctgaacgccaccgagggtcaagtcacagacaagaagctgtgcagtcaccagtgtttcctcctgcccagaaacaaatccaccaaaaacccatacctctgccaagatttacagaagggggaaacccaactgtggatgggcccctacccagcttttcatctaattccactatttcagaacaggaagctggcgttctctgcaagccatggtatgctggagcctgtgatcgaaagtctgctgaagaggcattgcacagatcaaacaaggatggatcatttcttattcggaaaagctctggccatgattccaaacaaccatatacactagttgtattctttaataagcgagtatataatattcctgtgcgatttattgaagcaacaaaacaatatgccttgggcagaaagaaaaatggtgaagagtactttggaagtgttgctgaaatcatcaggaatcatcaacatagtcctttggttcttattgacagtcagaataacacaaaagattccaccagactgaagtatgcagttaaagtttcataaagggggaaaaaaaagatcaataccattgcttcagacactttcccaaagtttctccttttgagaaaaagtcccaaaacttcatattttggattatgaatcatccagtaataaaatggaagatggagtcagctattgaagtggtcatccatttctttttaagaagctcatgtggacttgttctattgcctgacctgatgaactgttaatatctggtgaggttgagttatcatgctactaatattttccaaataaatatttttatttttaaaaa

SEQ ID NO: 110931 - DNA, 1715 bp, Homo sapiens
  Payload ID: 1763
  Gene Symbol: BLNK
  Gene Name: B-cell linker
  Uniprot ID: Q8WV28
  ENST ID: ENST00000371176
  CDS Start-End: 143-1444
gcagcctgcactctcagaaatcagacttgagtggccggaacccttgagaccagaggcttaccatgctgctccctaggagggccaggaactgctgacgtgaccactggacagttattcgtgtctcttacaattaccaaacagaatggacaagcttaataaaataaccgtccccgccagtcagaagttgaggcagcttcaaaagatggtccatgatattaaaaacaatgaaggtggaataatgaataaaatcaaaaagctaaaagtcaaagcacctccaagtgttcctcgaagggactacgcttcagagagccctgctgacgaagaggagcagtggtccgatgactttgacagcgactatgaaaatccagatgagcactcggactcagagatgtacgtgatgcccgccgaggagaacgctgatgacagctacgagccgcctccagtagagcaggaaaccaggccggttcacccagccctgcccttcgccagaggcgagtatatagacaatcgatcaagccagaggcattccccacccttcagcaagacacttcccagtaagcccagctggccttcagagaaagcaaggctcacctccaccctgccggccctgactgctttgcagaaacctcaagtcccacccaaacccaaaggcctccttgaggatgaggctgattatgtggtccccgtggaagataatgatgaaaactatattcatcccacagaaagcagttcacctccacctgaaaaaggtcgaaacagtggggcctgggaaaccaagtcacctccaccagctgcaccatccccgttgccacgggccgggaaaaaaccaacgacaccactgaagacaactccagttgcctctcaacagaatgcttcaagtgtttgtgaagaaaaacctatacctgctgaacgccaccgagggtcaagtcacagacaagaagctgtgcagtcaccagtgtttcctcctgcccagaaacaaatccaccaaaaacccatacctctgccaagatttacagaagggggaaacccaactgtggatgggcccctacccagcttttcatctaattccactatttcagaacaggaagctggcgttctctgcaagccatggtatgctggagcctgtgatcgaaagtctgctgaagaggcattgcacagatcaaacaaggatggatcatttcttattcggaaaagctctggccatgattccaaacaaccatatacactagttgtattctttaataagcgagtatataatattcctgtgcgatttattgaagcaacaaaacaatatgccttgggcagaaagaaaaatggtgaagagtactttggaagtgttgctgaaatcatcaggaatcatcaacatagtcctttggttcttattgacagtcagaataacacaaaagattccaccagactgaagtatgcagttaaagtttcataaagggggaaaaaaaagatcaataccattgcttcagacactttcccaaagtttctccttttgagaaaaagtcccaaaacttcatattttggattatgaatcatccagtaataaaatggaagatggagtcagctattgaagtggtcatccatttctttttaagaagctcatgtggacttgttctattgcctgacctgatgaactgttaatatctggtgaggttgagttatcatgctactaatattttccaaataaatatttttatttttaaaaa

SEQ ID NO: 110932 - DNA, 1284 bp, Homo sapiens
  Payload ID: 1763
  Gene Symbol: BLNK
  Gene Name: B-cell linker
  ENST ID: ENST00000427367
  CDS Start-End: 119-1018
acttgagtggccggaacccttgagaccagaggcttaccatgctgctccctaggagggccaggaactgctgacgtgaccactggacagttattcgtgtctcttacaattaccaaacagaatggacaagcttaataaaataaccgtccccgccagtcagaagttgaggcagcttcaaaagatggtccatgatattaaaaacaatgaaggtggaataatgaataaaatcaaaaagctaaaagtcaaagcacctccaagtgttcctcgaagggactacgcttcagagagccctgctgacgaagaggagcagtggtccgatgactttgacagcgactatgaaaatccagatgagcactcggactcagagatgtacgtgatgcccgccgaggagaacgctgatgacagctacgagccgcctccagtagagcaggaaaccaggccggttcacccagccctgcccttcgccagaggaacagcttcaggtcgaaacagtggggcctgggaaaccaagtcacctccaccagctgcaccatccccgttgccacgggccgggaaaaaaccaacgacaccactgaagacaactccagttgcctctcaacagaatgcttcaagtgtttgtgaagaaaaacctatacctgctgaacgccaccgagggtcaagtcacagacaagaagctgtgcagtcaccagtgtttcctcctgcccagaaacaaatccaccaaaaacccatacctctgccaagatttacagaagggggaaacccaactgtggatgggcccctacccagcttttcatctaattccactatttcagaacaggaagctggcgttctctgcaagccatggtatgctggagcctgtgatcgaaagtctgctgaagaggcattgcacagatcaaacaagtactttggaagtgttgctgaaatcatcaggaatcatcaacatagtcctttggttcttattgacagtcagaataacacaaaagattccaccagactgaagtatgcagttaaagtttcataaagggggaaaaaaaagatcaataccattgcttcagacactttcccaaagtttctccttttgagaaaaagtcccaaaacttcatattttggattatgaatcatccagtaataaaatggaagatggagtcagctattgaagtggtcatccatttctttttaagaagctcatgtggacttgttctattgcctgacctgatgaactgttaatatctggtgaggttgagttatcatgctactaatattttccaaataaatatttttattttt

SEQ ID NO: 110933 - DNA, 1599 bp, Homo sapiens
  Payload ID: 1763
  Gene Symbol: BLNK
  Gene Name: B-cell linker
  Uniprot ID: Q8WV28
  ENST ID: ENST00000413476
  CDS Start-End: 119-1333
acttgagtggccggaacccttgagaccagaggcttaccatgctgctccctaggagggccaggaactgctgacgtgaccactggacagttattcgtgtctcttacaattaccaaacagaatggacaagcttaataaaataaccgtccccgccagtcagaagttgaggcagcttcaaaagatggtccatgatattaaaaacaatgaaggtggaataatgaataaaatcaaaaagctaaaagtcaaagcacctccaagtgttcctcgaagggactacgcttcagagagccctgctgacgaagaggagcagtggtccgatgactttgacagcgactatgaaaatccagatgagcactcggactcagagatgtacgtgatgcccgccgaggagaacgctgatgacagctacgagccgcctccagtagagcaggaaaccaggccggttcacccagccctgcccttcgccagaggcgagtatatagacaatcgatcaagccagaggcattccccacccttcagcaagacacttcccagtaagcccagctggccttcagagaaagcaaggctcacctccaccctgccggccctgactgctttgcagaaacctcaagtcccacccaaacccaaaggcctccttgaggatgaggctgattatgtggtccccgtggaagataatgatgaaaactatattcatcccacagaaagcagttcacctccacctgaaaaagctcccatggtgaatagatcaaccaagccaaattcctcaacgcccgcctctcctccaggaacagcttcaggtcgaaacagtggggcctgggaaaccaagtcacctccaccagctgcaccatccccgttgccacgggccgggaaaaaaccaacgacaccactgaagacaactccagttgcctctcaacagaatgcttcaagtgtttgtgaagaaaaacctatacctgctgaacgccaccgagggtcaagtcacagacaagaagctgtgcagtcaccagtgtttcctcctgcccagaaacaaatccaccaaaaacccatacctctgccaagatttacagaagggggaaacccaactgtggatgggcccctacccagcttttcatctaattccactatttcagaacaggaagctggcgttctctgcaagccatggtatgctggagcctgtgatcgaaagtctgctgaagaggcattgcacagatcaaacaagtactttggaagtgttgctgaaatcatcaggaatcatcaacatagtcctttggttcttattgacagtcagaataacacaaaagattccaccagactgaagtatgcagttaaagtttcataaagggggaaaaaaaagatcaataccattgcttcagacactttcccaaagtttctccttttgagaaaaagtcccaaaacttcatattttggattatgaatcatccagtaataaaatggaagatggagtcagctattgaagtggtcatccatttctttttaagaagctcatgtggacttgttctattgcctgacctgatgaactgttaatatctggtgaggttgagttatcatgctactaatattttccaaataaatatttttattttt

SEQ ID NO: 110934 - DNA, 440 bp, Homo sapiens
  Payload ID: 1763
  Gene Symbol: BLNK
  Gene Name: B-cell linker
  ENST ID: ENST00000495266
  CDS Start-End: 1-198
atggacaagcttaataaaataaccgtccccgccagtcagaagttgaggcagcttcaaaagatggtccatgatattaaaaacaatgaaggtggaataatgaataaaatcaaaaagctaaaagtcaaagcacctccaagtgttcctcgaagggactacgcttcagacacctgctccctttcctggaacccttccaaatagtcttgatgtcagaacatttaatctctcctggaatgcagaagtgtggcccaacaggatcttctaagcctttgcaacacaaagtttgattcccagcaagatagcatcaacctcatctggagcttgttagaaatgcagaatcttggccccaccctagaactactggatcagaatttacattttagcaagatctccaggggatctgaatgtaaatcatatttaagaaaccctgctataaaccacca

SEQ ID NO: 110935 - DNA, 927 bp, Homo sapiens
  Payload ID: 1763
  Gene Symbol: BLNK
  Gene Name: B-cell linker
  ENST ID: ENST00000467799
  CDS Start-End: 190-555
tgtgctcgggcaagttttacttctccctagagcaggggtgtttgccagcagcctgcactctcagaaatcagacttgagtggccggaacccttgagaccagaggcttaccatgctgctccctaggagggccaggaactgctgacgtgaccactggacagttattcgtgtctcttacaattaccaaacagaatggacaagcttaataaaataaccgtccccgccagtcagaagttgaggcagcttcaaaagatggtccatgatattaaaaacaatgaaggtggaataatgaataaaatcaaaaagctaaaagtcaaagcacctccaagtgttcctcgaagggactacgcttcagagagccctgctgacgaagaggagcagtggtccgatgactttgacagcgactatgaaaatccagatgagcactcggactcagagatgtacgtgatgcccgccgaggagaacgctgatgacagctacgagccgcctccagtagagcaggaaaccaggccggttcacccagccctgcccttcgccagaggcgagtatataggctgattatgtggtccccgtggaagataatgatgaaaactatattcatcccacagaaagcagttcacctccacctgaaaaagctcccatggtgaatagatcaaccaagccaaattcctcaacgcccgcctctcctccaggaacagcttcaggtcgaaacagtggggcctgggaaaccaagtcacctccaccagctgcaccatccccgttgccacgggccgggaaaaaaccaacgacaccactgaagacaactccagttgcctctcaacagaatgcttcaagtgtttgtgaagaaaaacctatacctgctgaacgccaccgagggtcaagtcacagacaagaagctgtgcagtcaccagtgtttcctcctgcccagaa

SEQ ID NO: 110936 - DNA, 4572 bp, Homo sapiens
  Payload ID: 1764
  Gene Symbol: BCAP29
  Gene Name: B-cell receptor-associated protein 29
  Uniprot ID: Q9UHQ4
  ENST ID: ENST00000005259
  CDS Start-End: 340-1065
agacctggaccccggcaccctcccgccggggccgcacttagcagtggaaagtctgtcctcctgaagaagttgcgctccgacctccaagcatcaggtcaaaagtctaactcattctctgacctgccgccaattagaaaacaactgttgccaataaacgtggtcgcgccgcctgtgacctcagccgggacggacccgcgggcgggagcctgcggggcgtgaggcggggtggggccctggctcccctcccccgcccagccgcggcgtctgacgtcccgcgcgtcggcggccgcggagcagcgcagggagccaggcgggctgccggcgggtgtgaagaaaaaaatgacactccaatgggctgcagtggcaacctttctttatgccgaaataggactcattttaatcttctgcctaccttttattcctcctcagagatggcagaagattttttcatttaatgtctggggtaaaattgcaactttttggaacaaggctttccttaccattatcatcctattgattgttctatttctagatgctgtgagagaagtaaggaaatattcctcagttcataccattgagaagagctccaccagcagacctgatgcctatgaacacacacagatgaaactttttaggtctcaaagaaatctttacatttctggattttccctatttttttggctagttttgagacgtctggttacgcttattactcaactggcaaaagaactgtcaaacaaaggtgtacttaaaactcaagcagaaaatactaacaaggctgccaaaaaatttatggaagaaaacgaaaaactaaaaaggattttgaaaagccatggtaaagatgaagaatgtgttttggaagcagaaaataaaaaactagtagaagaccaggagaaactgaaaactgaattaaggaagacttcagatgccctttctaaggcacaaaatgatgtgatggaaatgaagatgcagtcagagagactttcgaaagaatatgatcaactcctgaaagaacactctgaacttcaggatcgtttagaaagaggcaacaagaaaagactgtgaactttataaaagacacttgcaatatactgtgtcaaaatgataattttgttatgttagcctctagaaaatttaagttcagaaaaatgcactatgaccggttcgtaatttttttaatgccacacataggttgtattgtaatggcattatcaaaatatttgatgatgtttcagatatattgcaaagtctgtattccagctcttaagaaaaatataagcatgttaaataccatatttacatattgataatgtcattggtatatggtggctgtttaccaataaaaggaaaaaattcattaaccggttgcttccaaaattagaagttttaagttgcatgaaaccattaatagccttgaaagctttgataagttttcagtaataataacctatttaatcagatgatgatgtgtttgaaaatagtgttcaatatcagcaaatttgtacacagggaatgtaaataaggataactgatcagagttatccactgtatttataaggaagagtcggaaaaaacaatgaccttagttttttttaagcctgatgatactatggtttactctaataagatagctatattgataattatatttttgttactgtgcccttgcacattttggtctttttgttaatatttttattaataacacataattagtaaccactctactgtttcaagttaatctagtaatagagcttacatatatttgtataactgctataccactgaactgaatttattttacaacagtgtagaattcttgaaaagttaacgtagaaaatatccaaaaagcagtatttctagaaagtgtccaaaaagcagtatttctttcccttggttgtgagagtaactaattatataaatattacctcaaaaatacatacactggtatcacacagtctttctacaatgtttctgtattctgaaagctaaatattaagtactatttttccattcaaatattcatttagaatttcctttagaagatggcagtgattataatattaatatgatttcatttgttccagtgtttagacatgaaatcatcttccttgtctcatgaaaacctaaatataaaaaaaaggaaaatactggagtttttatttctcttgtctttgttacatcctctgtttattataattttagcaccaacttcacacctagctaatttttttcatcataaagtggatgaaatgagcaagtacctaaaaattttatttcagataaaagtcaggagttactgctaaaaaacagacatgtaggagacattcaacaggagtatgaaatgagagttagaccatatgggctgacaacaccataaataacaagaaaagggagtgctgaaataggagagaacagagcaaatgttagctcaaagtatagacttagaaatatcaaagtaagagctatctggataaatatatagatattgagtgcttggaatcctagcctactatgtgaaaattaagtctaatgtcagaataacttacagaaaaatagaaaatgcacagctttaaaatgggcagagttaaaatctattcccagctttatcacttatttagccatgctagcctaggcctctatttccttgtctccaaaatgagaataataaaatttaggtcaggattactatataaactaagataatacagtgattctcaaagttgttcagactgtatagtaaggagaaagtctggttgcactttgaagagcttgaagatttgaaagattcccaaaaaagcattttaaagtttacatttaagggaccttggacctcaaccctctcaagtttacaagtctgaaactttagacatcaaaagtttgagcagtttttccaaggcaacattgatagttagattcagggccaggctgtaagtctagaatttagatatcctgatcccccagataccgctcttctggttatacacagaccagctataatttgctaaacataaaatattgcagtgtattagccggctgtggctccagagtctgtgccctttaccaccgtgcccaactgtttcacatgctgtgtttggtagtttttcctagtactctccttaataatggtggtgtttagcaaattgtattacataaataaatatttatttcatggattgagttatgttgcatattaaattactttccttcccattgtcaataatgacttctttatgtcttaggctgtattataaattcaaacacaggaatgttattcttgcctttttccatcagaattacctaaagttttattagactttccccctacttgcaaatctgcctggaggttctggtctttaggaagtagcacttagcaagttctggataagcactccagaatttgggatgagttatccttgttgtttgtccagctctatcttggaccccagtgctgctaattagattcatgccttgttctttagggcataagttcctctcttggctatttttcctagtatgctgagaactaggattccctttcagtgacagagtcctgccctggaaccccaatcaagagcctaaagtttaactactctctgagatattagcctgatgccagcagcctgcctggatctctaaatattacccattctgggagttgttagtggtctctgctttcctgcagtgtcactcctgcttcctcattgggcctgctagccacagctacttggatgtacccgaacctgttgccttgccctacctctgtgggctggttcagttctgcattcccattccagtgtccactgccttctcgctatccctcccatctgtgcgccaccaccagcttatccccagccctgctaacatgacaaactattgtgcatttgagtgcccactatacaatgtgtgaatataaccgtgcttttaagcattgactttaatgtctgggatgatccgtctagagtccatggaaccctcctgtgttttttcatccctttcttagtaatcttggaaatccacttatgaaattctttttctaacatttctttgctgaacggcatttttaaaattactttcacggtgtttctttccagtttgatctctacacaaacacaactttattacttgcaccagaaatgatttcaaacactttaggaactgtggtaggcttaattatgacttcccaaaagatatccctataccaatccctggaacctggaaatgttctcttctatagcaaaagatatgattaagttaaagtcttgagatggagagattattctgggtaatctgggagtgccctaaatgcagctacatctatgcttatatagaagcaaagggagatattaccacacagaagaggagaaagcacagtgaccacagaggcagagattggagtgatggagccgcagcaaaggaatgctgacagccaccagaagctggaggaggcaaagaacagattcttccccagagcctcttccagcaggagcatggccctacagataccgataaaactgatattggacttcctggcctccagaactatgggaataaatttattgtttcaagcta

SEQ ID NO: 110937 - DNA, 1946 bp, Homo sapiens
  Payload ID: 1764
  Gene Symbol: BCAP29
  Gene Name: B-cell receptor-associated protein 29
  Uniprot ID: Q9UHQ4
  ENST ID: ENST00000379117
  CDS Start-End: 138-863
gagcgggagggccgggaagccgggcgttggtggagggaggcgttgggcttctgtcgccgcgaagctggcggaaaaggcagtggccagcgagccgcctcgccagttcccacgactcccagggaggtgtgaagaaaaaaatgacactccaatgggctgcagtggcaacctttctttatgccgaaataggactcattttaatcttctgcctaccttttattcctcctcagagatggcagaagattttttcatttaatgtctggggtaaaattgcaactttttggaacaaggctttccttaccattatcatcctattgattgttctatttctagatgctgtgagagaagtaaggaaatattcctcagttcataccattgagaagagctccaccagcagacctgatgcctatgaacacacacagatgaaactttttaggtctcaaagaaatctttacatttctggattttccctatttttttggctagttttgagacgtctggttacgcttattactcaactggcaaaagaactgtcaaacaaaggtgtacttaaaactcaagcagaaaatactaacaaggctgccaaaaaatttatggaagaaaacgaaaaactaaaaaggattttgaaaagccatggtaaagatgaagaatgtgttttggaagcagaaaataaaaaactagtagaagaccaggagaaactgaaaactgaattaaggaagacttcagatgccctttctaaggcacaaaatgatgtgatggaaatgaagatgcagtcagagagactttcgaaagaatatgatcaactcctgaaagaacactctgaacttcaggatcgtttagaaagaggcaacaagaaaagactgtgaactttataaaagacacttgcaatatactgtgtcaaaatgataattttgttatgttagcctctagaaaatttaagttcagaaaaatgcactatgaccggttcgtaatttttttaatgccacacataggttgtattgtaatggcattatcaaaatatttgatgatgtttcagatatattgcaaagtctgtattccagctcttaagaaaaatataagcatgttaaataccatatttacatattgataatgtcattggtatatggtggctgtttaccaataaaaggaaaaaattcattaaccggttgcttccaaaattagaagttttaagttgcatgaaaccattaatagccttgaaagctttgataagttttcagtaataataacctatttaatcagatgatgatgtgtttgaaaatagtgttcaatatcagcaaatttgtacacagggaatgtaaataaggataactgatcagagttatccactgtatttataaggaagagtcggaaaaaacaatgaccttagttttttttaagcctgatgatactatggtttactctaataagatagctatattgataattatatttttgttactgtgcccttgcacattttggtctttttgttaatatttttattaataacacataattagtaaccactctactgtttcaagttaatctagtaatagagcttacatatatttgtataactgctataccactgaactgaatttattttacaacagtgtagaattcttgaaaagttaacgtagaaaatatccaaaaagcagtatttctagaaagtgtccaaaaagcagtatttctttcccttggttgtgagagtaactaattatataaatattacctcaaaaatacatacactggtatcacacagtctttctacaatgtttctgtattctgaaagctaaatattaagtactatttttccattcaaatattcatttagaatttcctttagaagatggcagtgattataatattaatatgatttcatttgttccagtgtttagacatgaaatcatcttccttgtctcatgaaaacctaaatataaaaaaaaggaaaa

SEQ ID NO: 110938 - DNA, 5773 bp, Homo sapiens
  Payload ID: 1764
  Gene Symbol: BCAP29
  Gene Name: B-cell receptor-associated protein 29
  Uniprot ID: Q9UHQ4
  ENST ID: ENST00000379119
  CDS Start-End: 15-1061
gtgtgaagaaaaaaatgacactccaatgggctgcagtggcaacctttctttatgccgaaataggactcattttaatcttctgcctaccttttattcctcctcagagatggcagaagattttttcatttaatgtctggggtaaaattgcaactttttggaacaaggctttccttaccattatcatcctattgattgttctatttctagatgctgtgagagaagtaaggaaatattcctcagttcataccattgagaagagctccaccagcagacctgatgcctatgaacacacacagatgaaactttttaggtctcaaagaaatctttacatttctggattttccctatttttttggctagttttgagacgtctggttacgcttattactcaactggcaaaagaactgtcaaacaaaggtgtacttaaaactcaagcagaaaatactaacaaggctgccaaaaaatttatggaagaaaacgaaaaactaaaaaggattttgaaaagccatggtaaagatgaagaatgtgttttggaagcagaaaataaaaaactagtagaagaccaggagaaactgaaaactgaattaaggaagacttcagatgccctttctaaggcacaaaatgatgtgatggaaatgaagatgcagtcagagagactttcgaaagaatatgatcaactcctgaaagaacactctgaacttcagcattccagttttggtgaatttttaagcaaaagaagccacaaaaatggcagcattggaaaacagactggttctagaaaaggatcgtttagaaagaggcaacaagaaaagactgtgaactttataaaagacacttgcaatatactgtgtcaaaatgataattttgttatgttagcctctagaaaatttaagttcagaaaaatgcactatgaccggttcgtaatttttttaatgccacacataggttgtattgtaatggcattatcaaaatatttgatgatgtttcagatatattgcaaagtctgtattccagctcttaagaaaaatataagcatgttaaataccatatttacatattgataatgtcattggtatatggtggctgtttaccaataaaaggaaaaaattcattaaccggttgcttccaaaattagaagttttaagttgcatgaaaccattaatagccttgaaagctttgataagttttcagtaataataacctatttaatcagatgatgatgtgtttgaaaatagtgttcaatatcagcaaatttgtacacagggaatgtaaataaggataactgatcagagttatccactgtatttataaggaagagtcggaaaaaacaatgaccttagttttttttaagcctgatgatactatggtttactctaataagatagctatattgataattatatttttgttactgtgcccttgcacattttggtctttttgttaatatttttattaataacacataattagtaaccactctactgtttcaagttaatctagtaatagagcttacatatatttgtataactgctataccactgaactgaatttattttacaacagtgtagaattcttgaaaagttaacgtagaaaatatccaaaaagcagtatttctagaaagtgtccaaaaagcagtatttctttcccttggttgtgagagtaactaattatataaatattacctcaaaaatacatacactggtatcacacagtctttctacaatgtttctgtattctgaaagctaaatattaagtactatttttccattcaaatattcatttagaatttcctttagaagatggcagtgattataatattaatatgatttcatttgttccagtgtttagacatgaaatcatcttccttgtctcatgaaaacctaaatataaaaaaaaggaaaatactggagtttttatttctcttgtctttgttacatcctctgtttattataattttagcaccaacttcacacctagctaatttttttcatcataaagtggatgaaatgagcaagtacctaaaaattttatttcagataaaagtcaggagttactgctaaaaaacagacatgtaggagacattcaacaggagtatgaaatgagagttagaccatatgggctgacaacaccataaataacaagaaaagggagtgctgaaataggagagaacagagcaaatgttagctcaaagtatagacttagaaatatcaaagtaagagctatctggataaatatatagatattgagtgcttggaatcctagcctactatgtgaaaattaagtctaatgtcagaataacttacagaaaaatagaaaatgcacagctttaaaatgggcagagttaaaatctattcccagctttatcacttatttagccatgctagcctaggcctctatttccttgtctccaaaatgagaataataaaatttaggtcaggattactatataaactaagataatacagtgattctcaaagttgttcagactgtatagtaaggagaaagtctggttgcactttgaagagcttgaagatttgaaagattcccaaaaaagcattttaaagtttacatttaagggaccttggacctcaaccctctcaagtttacaagtctgaaactttagacatcaaaagtttgagcagtttttccaaggcaacattgatagttagattcagggccaggctgtaagtctagaatttagatatcctgatcccccagataccgctcttctggttatacacagaccagctataatttgctaaacataaaatattgcagtgtattagccggctgtggctccagagtctgtgccctttaccaccgtgcccaactgtttcacatgctgtgtttggtagtttttcctagtactctccttaataatggtggtgtttagcaaattgtattacataaataaatatttatttcatggattgagttatgttgcatattaaattactttccttcccattgtcaataatgacttctttatgtcttaggctgtattataaattcaaacacaggaatgttattcttgcctttttccatcagaattacctaaagttttattagactttccccctacttgcaaatctgcctggaggttctggtctttaggaagtagcacttagcaagttctggataagcactccagaatttgggatgagttatccttgttgtttgtccagctctatcttggaccccagtgctgctaattagattcatgccttgttctttagggcataagttcctctcttggctatttttcctagtatgctgagaactaggattccctttcagtgacagagtcctgccctggaaccccaatcaagagcctaaagtttaactactctctgagatattagcctgatgccagcagcctgcctggatctctaaatattacccattctgggagttgttagtggtctctgctttcctgcagtgtcactcctgcttcctcattgggcctgctagccacagctacttggatgtacccgaacctgttgccttgccctacctctgtgggctggttcagttctgcattcccattccagtgtccactgccttctcgctatccctcccatctgtgcgccaccaccagcttatccccagccctgctaacatgacaaactattgtgcatttgagtgcccactatacaatgtgtgaatataaccgtgcttttaagcattgactttaatgtctgggatgatccgtctagagtccatggaaccctcctgtgttttttcatccctttcttagtaatcttggaaatccacttatgaaattctttttctaacatttctttgctgaacggcatttttaaaattactttcacggtgtttctttccagtttgatctctacacaaacacaactttattacttgcaccagaaatgatttcaaacactttaggaactgtggtaggcttaattatgacttcccaaaagatatccctataccaatccctggaacctggaaatgttctcttctatagcaaaagatatgattaagttaaagtcttgagatggagagattattctgggtaatctgggagtgccctaaatgcagctacatctatgcttatatagaagcaaagggagatattaccacacagaagaggagaaagcacagtgaccacagaggcagagattggagtgatggagccgcagcaaaggaatgctgacagccaccagaagctggaggaggcaaagaacagattcttccccagagcctcttccagcaggagcatggccctacagataccgataaaactgatattggacttcctggcctccagaactatgggaataaatttattgtttcaagctatcaagtttgtgattatttgttactgctgccatagtaaattaatacaggagcatgcaggacagatctgtaatggcctgaactgaatttcaaggggtgtggaaaacagttactctttaacaccactccgtcttccccattagccatttggataagtcaaagatagccttagccatctcctatcttagttacttttctccttcaactgtattttgccattgtcgttgccattgcctctgcctaactgcaagccatcatcatctctcacatggactatgacgacctcctcatctccctgtatcttctctaatgcttctctcatatacatgctctcagcagccacctggtttaaaacaaaaacaaaaaaaacactaatcatgtcattccctgcttgtcttcccgttctttccaactgtcattccctgcttgtcttccaattctttccaactgcagttaagatcaaaccaccaagacctcaccaggctcccatctacttttcagcctcaactcagtccacctgctctgccaatcacacctgtttctttttgttgttctttccctaggatatagatcctggcatacctgcattctgattcttcttggaacaagccaaattctttcccctgtcagtacgtttgcatgtgtagtacatgttgcatcccaggcctgtctgccttcttaccctattttattttcatcatagcacttactaccatctgaaatgatctcatttatggtttgtctcctcagtgattaacacagttcctgcacacagtaaatcagtagttctcaacaggaagtgaagaggtcatcctgaggggaacatttagcaatacctagagacatttctggttgtcataaccaggggaatgctcctagtggatagaagtcagggaggctgttaaacccattccacaatgcacaggactggaacaaagaatgatctctcactcagaatgtcagtgttgccaaggtggagacatcctgcagtagatgcttgtggcagagggtactggttgtaccccagtatccattctttcattcacctgtgttaatacatgctccagttttgtatttttttttataaacagctgtcaagcataaagataacattttccatctccttgtatgtaagtggaaataggactgtcatgtggggccagtttcttttttttcttcctctgtcctgctgcttgaaacatatgctgctatcttagatcatgaggtcgaggccatgcaaagtggagcaacaaggagctgtgtccctgacgccataagcaccacacctgtcctgaattgctgtgaatgacaccagctaactacaatgcattgtctcaacatcctagacataataaaaagccataaatatgtttgtcctatgcagcacaaaacctttgtatctttgccttttatgttgggatcttaattaaaaattacatcctctactgtc

SEQ ID NO: 110939 - DNA, 812 bp, Homo sapiens
  Payload ID: 1764
  Gene Symbol: BCAP29
  Gene Name: B-cell receptor-associated protein 29
  ENST ID: ENST00000442065
  CDS Start-End: 51-566
cggagcagcgcagggagccaggcgggctgccggcgggtgtgaagaaaaaaatgacactccaatgggctgcagtggcaacctttctttatgccgaaataggactcattttaatcttctgcctaccttttattcctcctcagagatggcagaagattttttcatttaatgtctggggtaaaattgcaactttttggaacaaggctttccttaccattatcatcctattgattgttctatttctagatgctgtgagagaagtaaggaaatattcctcagttcataccattgagaagagctccaccagcagacctgatgcctatgaacacacacagatgaaactttttaggtctcaaagaaatctttacatttctggattttccctatttttttggctagttttgagacgtctggttacgcttattactcaactggcaaaagaactgtcaaacaaaggtgtacttaaaactcaagcagaaaatactaacaaggctgccaaaaaatttatggaagaaaacgaaaaactaaaaaggtttctgttagcaaaagtacattgtagaaaactataaaattctgaaaaggacaaagaataaattataaacagattttgaaaagccatggtaaagatgaagaatgtgttttggaagcagaaaataaaaaactagtagaagaccaggagaaactgaaaactgaattaaggaagacttcagatgccctttctaaggcacaaaatgatgtgatggaaatgaagatgcagtcagagagactttcgaaagaatatgatcaactcctgaaagaacactctgaacttcagg

SEQ ID NO: 110940 - DNA, 474 bp, Homo sapiens
  Payload ID: 1764
  Gene Symbol: BCAP29
  Gene Name: B-cell receptor-associated protein 29
  ENST ID: ENST00000421217
  CDS Start-End: 76-474
gggcttctgcgacccggggacccgtggggcgtaggccgcggagggagagcgccgctgcctggtgtgaagaaaaaaatgacactccaatgggctgcagtggcaacctttctttatgccgaaataggactcattttaatcttctgcctaccttttattcctcctcagagatggcagaagattttttcatttaatgtctggggtaaaattgcaactttttggaacaaggctttccttaccattatcatcctattgattgttctatttctagatgctgtgagagaagtaaggaaatattcctcagttcataccattgagaagagctccaccagcagacctgatgcctatgaacacacacagatgaaactttttaggtctcaaagaaatctttacatttctggattttccctatttttttggctagttttgagacgtctggttacgcttattactcaactggcaaaagaactgtcaaac

SEQ ID NO: 110941 - DNA, 1157 bp, Homo sapiens
  Payload ID: 1764
  Gene Symbol: BCAP29
  Gene Name: B-cell receptor-associated protein 29
  Uniprot ID: Q9UHQ4
  ENST ID: ENST00000445771
  CDS Start-End: 52-1098
gcggagcagcgcagggagccaggcgggctgccggcgggtgtgaagaaaaaaatgacactccaatgggctgcagtggcaacctttctttatgccgaaataggactcattttaatcttctgcctaccttttattcctcctcagagatggcagaagattttttcatttaatgtctggggtaaaattgcaactttttggaacaaggctttccttaccattatcatcctattgattgttctatttctagatgctgtgagagaagtaaggaaatattcctcagttcataccattgagaagagctccaccagcagacctgatgcctatgaacacacacagatgaaactttttaggtctcaaagaaatctttacatttctggattttccctatttttttggctagttttgagacgtctggttacgcttattactcaactggcaaaagaactgtcaaacaaaggtgtacttaaaactcaagcagaaaatactaacaaggctgccaaaaaatttatggaagaaaacgaaaaactaaaaaggattttgaaaagccatggtaaagatgaagaatgtgttttggaagcagaaaataaaaaactagtagaagaccaggagaaactgaaaactgaattaaggaagacttcagatgccctttctaaggcacaaaatgatgtgatggaaatgaagatgcagtcagagagactttcgaaagaatatgatcaactcctgaaagaacactctgaacttcagcattccagttttggtgaatttttaagcaaaagaagccacaaaaatggcagcattggaaaacagactggttctagaaaaggatcgtttagaaagaggcaacaagaaaagactgtgaactttataaaagacacttgcaatatactgtgtcaaaatgataattttgttatgttagcctctagaaaatttaagttcagaaaaatgcactatgaccggttcgtaatttttttaatgccacacataggttgtattgtaatggcattatcaaaatatttgatgatgtttcagatatattgcaaagtctgtattccagctcttaagaaaaatataagcatgttaaataccatatttacatattgataatgtcattggtatatggtggctgtttaccaataaaaggaaaaaattcattaaccggt

SEQ ID NO: 110942 - DNA, 998 bp, Homo sapiens
  Payload ID: 1764
  Gene Symbol: BCAP29
  Gene Name: B-cell receptor-associated protein 29
  ENST ID: ENST00000457837
  CDS Start-End: 309-998
gagcgccgctgcctggtctggagaaccccgcggagctggcctggcccgacccggcccggcccggtccgcggcgcggtggtcgagggcccgcggcgccttctgggagcgggagggccgggaagccgggcgttggtggagggaggcgttgggcttctgtcgccgcgaagctggcggaaaaggcagtggccagcgagccgcctcgccagttcccacgactcccagggaggtggcgacacccgcttcccgggccacccttttccccttcctgaccggggtccgtgcttgccttcccaggtgtgaagaaaaaaatgacactccaatgggctgcagtggcaacctttctttatgccgaaataggactcattttaatcttctgcctaccttttattcctcctcagagatggcagaagattttttcatttaatgtctggggtaaaattgcaactttttggaacaaggctttccttaccattatcatcctattgattgttctatttctagatgctgtgagagaagtaaggaaatattcctcagttcataccattgagaagagctccaccagcagacctgatgcctatgaacacacacagatgaaactttttaggtctcaaagaaatctttacatttctggattttccctatttttttggctagttttgagacgtctggttacgcttattactcaactggcaaaagaactgtcaaacaaaggtgtacttaaaactcaagcagaaaatactaacaaggctgccaaaaaatttatggaagaaaacgaaaaactaaaaaggattttgaaaagccatggtaaagatgaagaatgtgttttggaagcagaaaataaaaaactagtagaagaccaggagaaactgaaaactgaattaaggaagacttcagatgccctttctaaggcacaaaatgatgtgatggaaatgaagatgcagtcagagagactttcgaaagaatatgatcaactcctgaaagaacactctgaacttcag

SEQ ID NO: 110943 - DNA, 1059 bp, Homo sapiens
  Payload ID: 1764
  Gene Symbol: BCAP29
  Gene Name: B-cell receptor-associated protein 29
  ENST ID: ENST00000436699
  CDS Start-End: 1-490
tgatgcctatgaacacacacagatgaaactttttaggtctcaaagaaatctttacatttctggattttccctatttttttggctagttttgagacgtctggttacgcttattactcaactggcaaaagaactgtcaaacaaaggtgtacttaaaactcaagcagaaaatactaacaaggctgccaaaaaatttatggaagaaaacgaaaaactaaaaaggattttgaaaagccatggtaaagatgaagaatgtgttttggaagcagaaaataaaaaactagtagaagaccaggagaaactgaaaactgaattaaggaagacttcagatgccctttctaaggcacaaaatgatgtgatggaaatgaagatgcagtcagagagactttcgaaagaatatgatcaactcctgaaagaacactctgaacttcagaaaagccacagtcagcctggagctgctgcattcttggtaaaggaagtagaaagcttttaagagtgattcctggctgagcgtggtggctcacacctttctttaatcccagcactttggaaggctgaggcgggcggatcatgggagatcaagaccatcctggctaacaaggtgaaaccctgtctctactaaaaatacaaaaaattagccgggcatggtggcaagtgcctgtaatcccagctactcgggaggctgaggcaggagaatcacttgaacctgggaggcagaggttgcagtgagccgagatcgcgcttttgcactccagcctgggtgacagagcgagactccatctcagaaaaaaaaaaagtgattccttcccaagaaaatagttgttataatagttgtcatacctgtttctgtggaaaagaccccatcccagattatgccagacaccatgccgagagtagggccttgtttgatagcacttcaggacttgatctaatttctgcttgtatccagtttttgaaatatttaatagatgtcatttgttgagagtatgctctggactaagcacttggctaagggcttcgtatatgttgttttgtttactctccatgacagctcaataattg

SEQ ID NO: 110944 - DNA, 746 bp, Homo sapiens
  Payload ID: 1764
  Gene Symbol: BCAP29
  Gene Name: B-cell receptor-associated protein 29
  ENST ID: ENST00000479917
  CDS Start-End: 158-746
agcgcagggagccaggcgggctgccggcgggtgggggaaggtggaacactgtccatcccctggacaaaaacgctgcgcctcggggccttgaacccggttttgtttgaaaggaagcaagagaaaataagtgtttttccatttaggtgtgaagaaaaaaatgacactccaatgggctgcagtggcaacctttctttatgccgaaataggactcattttaatcttctgcctaccttttattcctcctcagagatggcagaagattttttcatttaatgtctggggtaaaattgcaactttttggaacaaggctttccttaccattatcatcctattgattgttctatttctagatgctgtgagagaagtaaggaaatattcctcagttcataccattgagaagagctccaccagcagacctgatgcctatgaacacacacagatgaaactttttaggtctcaaagaaatctttacatttctggattttccctatttttttggctagttttgagacgtctggttacgcttattactcaactggcaaaagaactgtcaaacaaaggtgtacttaaaactcaagcagaaaatactaacaaggctgccaaaaaatttatggaagaaaacgaaaaactaaaaaggattttgaaaagccatggtaaagatgaagaatgtgttttggaagcagaaaataaaaaactagtagaagaccaggagaaactgaaaactgaattaaggaagacttcagatg

SEQ ID NO: 110945 - DNA, 942 bp, Homo sapiens
  Payload ID: 1764
  Gene Symbol: BCAP29
  Gene Name: B-cell receptor-associated protein 29
  ENST ID: ENST00000465919
  CDS Start-End: 247-690
gtcccgcgcgtcggcggccgcggagcagcgcagggagccaggcgggctgccggcggatggcagaagattttttcatttaatgtctggggtaaaattgcaactttttggaacaaggctttccttaccattatcatcctattgattgttctatttctagatgctgtgagagaagtaaggaaatattcctcagttcataccattgagaagagctccaccagcagacctgatgcctatgaacacacacagatgaaactttttaggtctcaaagaaatctttacatttctggattttccctatttttttggctagttttgagacgtctggttacgcttattactcaactggcaaaagaactgtcaaacaaaggtgtacttaaaactcaagcagaaaatactaacaaggctgccaaaaaatttatggaagaaaacgaaaaactaaaaaggattttgaaaagccatggtaaagatgaagaatgtgttttggaagcagaaaataaaaaactagtagaagaccaggagaaactgaaaactgaattaaggaagacttcagatgccctttctaaggcacaaaatgatgtgatggaaatgaagatgcagtcagagagactttcgaaagaatatgatcaactcctgaaagaacactctgaacttcaggatcgtttagaaagaggcaacaagaaaagactgtgaactttataaaagacacttgcaatatactgtgtcaaaatgataattttgttatgttagcctctagaaaatttaagttcagaaaaatgcactatgaccggttcgtaatttttttaatgccacacataggttgtattgtaatggcattatcaaaatatttgatgatgtttcagatatattgcaaagtctgtattccagctcttaagaaaaatataagcatgttaaataccatatttacatattgataatgtcatt

SEQ ID NO: 110946 - DNA, 885 bp, Homo sapiens
  Payload ID: 1764
  Gene Symbol: BCAP29
  Gene Name: B-cell receptor-associated protein 29
  ENST ID: ENST00000491150
  CDS Start-End: 1-885
attgcaactttttggaacaaggctttccttaccattatcatcctattgattgttctatttctagatgctgtgagagaagtaaggaaatattcctcagttcataccattgagaagagctccaccagcagacctgatgcctatgaacacacacagatgaaactttttaggtctcaaagaaatctttacatttctggattttccctatttttttggctagttttgagacgtctggttacgcttattactcaactggcaaaagaactgtcaaacaaaggtgtacttaaaactcaagcagaaaatactaacaaggctgccaaaaaatttatggaagaaaacgaaaaactaaaaaggattttgaaaagccatggtaaagatgaagaatgtgttttggaagcagaaaataaaaaactagtagaagaccaggagaaactgaaaactgaattaaggaagacttcagatgccctttctaaggcacaaaatgatgtgatggaaatgaagatgcagtcagagagactttcgaaagaatatgatcaactcctgaaagaacactctgaacttcagaagcaaagggagatattaccacacagaagaggagaaagcacagtgaccacagaggcagagattggagtgatggagccgcagcaaaggaatgctgacagccaccagaagctggaggaggcaaagaacagattcttccccagagcctcttccagcaggagcatggccctacagataccgataaaactgatattggacttcctggcctccagaactatgggaataaatttattgtttcaagctatcaagtttgtgattatttgttactgctgccatagtaaattaatacaggagcatgcaggacagatctgtaatggcctgaactga

SEQ ID NO: 110947 - DNA, 498 bp, Homo sapiens
  Payload ID: 1764
  Gene Symbol: BCAP29
  Gene Name: B-cell receptor-associated protein 29
  ENST ID: ENST00000473124
  CDS Start-End: 306-498
gggaagccgggcgttggtggagggaggcgttgggcttctgtcgccgcgaagctggcggaaaaggcagtggccagcgagccgcctcgccagttcccacgactcccagggaggtggcgacacccgcttcccgggccacccttttccccttcctgaccggggtccgtgcttgccttcccaggtgggggaaggtggaacactgtccatcccctggacaaaaacgctgcgcctcggggccttgaacccggttttgtttgaaaggaagcaagagaaaataagtgtttttccatttaggtgtgaagaaaaaaatgacactccaatgggctgcagtggcaacctttctttatgccgaaataggactcattttaatcttctgcctaccttttattcctcctcagagatggcagaagattttttcatttaatgtctggggtaaaattgcaactttttggaacaaggctttccttaccattatcatcctattgattgttctatttctag

SEQ ID NO: 110948 - DNA, 943 bp, Homo sapiens
  Payload ID: 1764
  Gene Symbol: BCAP29
  Gene Name: B-cell receptor-associated protein 29
  ENST ID: ENST00000482371
  CDS Start-End: 56-256
ggccgcggagcagcgcagggagccaggcgggctgccggcgggtgtgaagaaaaaaatgacactccaatgggctgcagtggcaacctttctttatgccgaaataggactcattttaatcttctgcctaccttttattcctcctcagagatggcagaagattttttcatttaatgtctggggtaaaattgcaactttttggaacaaggctttccttaccattatcatcctattgattgttctatttctagagttttgagacgtctggttacgcttattactcaactggcaaaagaactgtcaaacaaaggtgtacttaaaactcaagcagaaaatactaacaaggctgccaaaaaatttatggaagaaaacgaaaaactaaaaaggattttgaaaagccatggtaaagatgaagaatgtgttttggaagcagaaaataaaaaactagtagaagaccaggagaaactgaaaactgaattaaggaagacttcagatgccctttctaaggcacaaaatgatgtgatggaaatgaagatgcagtcagagagactttcgaaagaatatgatcaactcctgaaagaacactctgaacttcaggtttttgctaaactacttaactacctccttatgaggaagtggtgagccagcctccaactcctcccccagcatacagtgacttccagctacgcagcagcagcagctcctgcctccacagtgaggcctggcagatggcagtcccccagcgccaatcccaccaggggatccaagggaatcccttgtctgagcccagcagaagcatcacaagacccccaagcatcgctgatcctgagccctctgacctaccaggtgaccgagtagccaccaaagccctggggatgcagcccagtggctctgtagccagcctgggagagctggacccaggggccttcctggacaaggaggcaga

SEQ ID NO: 110949 - DNA, 1589 bp, Homo sapiens
  Payload ID: 1765
  Gene Symbol: BCAP31
  Gene Name: B-cell receptor-associated protein 31
  Uniprot ID: P51572
  ENST ID: ENST00000345046
  CDS Start-End: 409-1149
tctcgcccctcggcggggcccctcccgcaccacagagacgtgggacggccgcgcggactagagaagcggccctcgccggcccgacaaagccccgccccgccccgcccgcgtgctcgctccaccccgccctgctcgcccggagcccgaggcgcctcttcctctcccgctcggagcgccggccctccgctccggggcggggtgggaagcggaggtgggcggagcctccggggcctcgcgagggctggtgggcggtgcccggcgggcgcttccggtttccggccgcggtatgaggggcggggccggggctgctgtgggagagttctgttgctgcggcggggcctgcacgttgactgtgggaaactcggaaacaagctcacatcttcctgtgggaaaccttctagcaacaggatgagtctgcagtggactgcagttgccaccttcctctatgcggaggtctttgttgtgttgcttctctgcattcccttcatttctcctaaaagatggcagaagattttcaagtcccggctggtggagttgttagtgtcctatggcaacaccttctttgtggttctcattgtcatccttgtgctgttggtcatcgatgccgtgcgcgaaattcggaagtatgatgatgtgacggaaaaggtgaacctccagaacaatcccggggccatggagcacttccacatgaagcttttccgtgcccagaggaatctctacattgctggcttttccttgctgctgtccttcctgcttagacgcctggtgactctcatttcgcagcaggccacgctgctggcctccaatgaagcctttaaaaagcaggcggagagtgctagtgaggcggccaagaagtacatggaggagaatgaccagctcaagaagggagctgctgttgacggaggcaagttggatgtcgggaatgctgaggtgaagttggaggaagagaacaggagcctgaaggctgacctgcagaagctaaaggacgagctggccagcactaagcaaaaactagagaaagctgaaaaccaggttctggccatgcggaagcagtctgagggcctcaccaaggagtacgaccgcttgctggaggagcacgcaaagctgcaggctgcagtagatggtcccatggacaagaaggaagagtaagggcctccttcctcccctgcctgcagctggcttccacctggcacgtgcctgctgcttcctgagagcccggcctctccctccagtacttctgtttgtgcccttctgcttcccccattcccttccacagctcatagctcgtcatctcggcccttgtccacactctccaagcacattacaggggacctgattgctacacgttcagaatgcgtttgctgtcatcctgcttggcctggccaggcctggcacagccttggcttccacgcctgagcgtggagagcacgagttagttgtagtccggcttgcggtggggctgacttcctgttggtttgagcccctttttgttttgccctctgggtgttttctttggtcccgcaggagggtgggtggagcaggtggactggagtttctcttgagggcaataaaagttgtcatggtgtgta

SEQ ID NO: 110950 - DNA, 669 bp, Homo sapiens
  Payload ID: 1765
  Gene Symbol: BCAP31
  Gene Name: B-cell receptor-associated protein 31
  ENST ID: ENST00000423827
  CDS Start-End: 135-669
ggtgggcgctggggcccgcgagggctactgtaaggacccctggcttctgaggatactgcgtctagaactttctccgtatggggccttgaggaaacaagctcacatcttcctgtgggaaaccttctagcaacaggatgagtctgcagtggactgcagttgccaccttcctctatgcggaggtctttgttgtgttgcttctctgcattcccttcatttctcctaaaagatggcagaagattttcaagtcccggctggtggagttgttagtgtcctatggcaacaccttctttgtggttctcattgtcatccttgtgctgttggtcatcgatgccgtgcgcgaaattcggaagtatgatgatgtgacggaaaaggtgaacctccagaacaatcccggggccatggagcacttccacatgaagcttttccgtgcccagaggaatctctacattgctggcttttccttgctgctgtccttcctgcttagacgcctggtgactctcatttcgcagcaggccacgctgctggcctccaatgaagcctttaaaaagcaggcggagagtgctagtgaggcggccaagaagtacatggaggagaatgaccagctcaagaagggagctgctgttgacggaggcaagttggatgtcgggaatgctgaggtgaagttggagg

SEQ ID NO: 110951 - DNA, 1810 bp, Homo sapiens
  Payload ID: 1765
  Gene Symbol: BCAP31
  Gene Name: B-cell receptor-associated protein 31
  Uniprot ID: P51572
  ENST ID: ENST00000458587
  CDS Start-End: 431-1372
ctccgggacggtgtgccaggccggggccaagtcggaggcccctcgctctgggtgggcgctggggcccgcgagggctactgtaaggacccctggcttctgaggatactgcgtctagaactttctccgtatggggccttgaggtgcttggtcgagacctgcctttgcgcttggtcccgaatcctgccctctaggagtcgctcttgcgggcctccagcccaccggaggcgaagcggccccgggcggaaggccgctggatcctcgagggaggtgccggtttctctccgcgggcgccgtggggacggtgggaggcgggggcgtcggcagcgcttggactaggtgcggccttgggcctgcctggtagcggggatttgggcccgcagagcgcccgcctctgcggctgagttctgcctggcggggaagggagcgcccgatgggtgccgaggcgtcctcctcttggtgccctggcactgctcttcccgaagaacgcctttcagttaaacgggcgtcggaaatctcgggcttcctggggcagggatcgtcgggagaggccgctctggacgtgttgacacacgtgctggagggggcaggaaacaagctcacatcttcctgtgggaaaccttctagcaacaggatgagtctgcagtggactgcagttgccaccttcctctatgcggaggtctttgttgtgttgcttctctgcattcccttcatttctcctaaaagatggcagaagattttcaagtcccggctggtggagttgttagtgtcctatggcaacaccttctttgtggttctcattgtcatccttgtgctgttggtcatcgatgccgtgcgcgaaattcggaagtatgatgatgtgacggaaaaggtgaacctccagaacaatcccggggccatggagcacttccacatgaagcttttccgtgcccagaggaatctctacattgctggcttttccttgctgctgtccttcctgcttagacgcctggtgactctcatttcgcagcaggccacgctgctggcctccaatgaagcctttaaaaagcaggcggagagtgctagtgaggcggccaagaagtacatggaggagaatgaccagctcaagaagggagctgctgttgacggaggcaagttggatgtcgggaatgctgaggtgaagttggaggaagagaacaggagcctgaaggctgacctgcagaagctaaaggacgagctggccagcactaagcaaaaactagagaaagctgaaaaccaggttctggccatgcggaagcagtctgagggcctcaccaaggagtacgaccgcttgctggaggagcacgcaaagctgcaggctgcagtagatggtcccatggacaagaaggaagagtaagggcctccttcctcccctgcctgcagctggcttccacctggcacgtgcctgctgcttcctgagagcccggcctctccctccagtacttctgtttgtgcccttctgcttcccccattcccttccacagctcatagctcgtcatctcggcccttgtccacactctccaagcacattacaggggacctgattgctacacgttcagaatgcgtttgctgtcatcctgcttggcctggccaggcctggcacagccttggcttccacgcctgagcgtggagagcacgagttagttgtagtccggcttgcggtggggctgacttcctgttggtttgagcccctttttgttttgccctctgggtgttttctttggtcccgcaggagggtgggtggagcaggtggactggagtttctcttgagggcaataaaagttgtcatggtgtg

SEQ ID NO: 110952 - DNA, 688 bp, Homo sapiens
  Payload ID: 1765
  Gene Symbol: BCAP31
  Gene Name: B-cell receptor-associated protein 31
  ENST ID: ENST00000416815
  CDS Start-End: 143-688
aggagcggccgggatgggcctccgggacggtgtgccaggccggggccaagtcggaggcccctcgctctgggtgggcgctggggcccgcgagggctactgaaacaagctcacatcttcctgtgggaaaccttctagcaacaggatgagtctgcagtggactgcagttgccaccttcctctatgcggaggtctttgttgtgttgcttctctgcattcccttcatttctcctaaaagatggcagaagattttcaagtcccggctggtggagttgttagtgtcctatggcaacaccttctttgtggttctcattgtcatccttgtgctgttggtcatcgatgccgtgcgcgaaattcggaagtatgatgatgtgacggaaaaggtgaacctccagaacaatcccggggccatggagcacttccacatgaagcttttccgtgcccagaggaatctctacattgctggcttttccttgctgctgtccttcctgcttagacgcctggtgactctcatttcgcagcaggccacgctgctggcctccaatgaagcctttaaaaagcaggcggagagtgctagtgaggcggccaagaagtacatggaggagaatgaccagctcaagaagggagctgctgttgacggaggcaagttggatgtcgggaatgctgaggtgaagttggaggaagagaacagg

SEQ ID NO: 110953 - DNA, 793 bp, Homo sapiens
  Payload ID: 1765
  Gene Symbol: BCAP31
  Gene Name: B-cell receptor-associated protein 31
  ENST ID: ENST00000442093
  CDS Start-End: 228-793
gagagttctgttgctgcggcggggcctgcacgttgactgtgggaaactcggtgagcgggctccgcgcgccgggctgggctccgggaccgcggaggctccccggcccatcgacgagggagagaggcgagcggcgcggggaggcccgggggccggggaatctcggggcccgcagcctacctgcgtgaaacaagctcacatcttcctgtgggaaaccttctagcaacaggatgagtctgcagtggactgcagttgccaccttcctctatgcggaggtctttgttgtgttgcttctctgcattcccttcatttctcctaaaagatggcagaagattttcaagtcccggctggtggagttgttagtgtcctatggcaacaccttctttgtggttctcattgtcatccttgtgctgttggtcatcgatgccgtgcgcgaaattcggaagtatgatgatgtgacggaaaaggtgaacctccagaacaatcccggggccatggagcacttccacatgaagcttttccgtgcccagaggaatctctacattgctggcttttccttgctgctgtccttcctgcttagacgcctggtgactctcatttcgcagcaggccacgctgctggcctccaatgaagcctttaaaaagcaggcggagagtgctagtgaggcggccaagaagtacatggaggagaatgaccagctcaagaagggagctgctgttgacggaggcaagttggatgtcgggaatgctgaggtgaagttggaggaagagaacaggagcctgaaggctgacctgca

SEQ ID NO: 110954 - DNA, 570 bp, Homo sapiens
  Payload ID: 1765
  Gene Symbol: BCAP31
  Gene Name: B-cell receptor-associated protein 31
  ENST ID: ENST00000430088
  CDS Start-End: 156-570
agtgcagggggtcagggtggagagtggcggccccagcctcgcagggtaactgaactggatgttcttggctgcccagcgcttacaagtcccgtaccttttgtgccctgccaggaaacaagctcacatcttcctgtgggaaaccttctagcaacaggatgagtctgcagtggactgcagttgccaccttcctctatgcggaggtctttgttgtgttgcttctctgcattcccttcatttctcctaaaagatggcagaagattttcaagtcccggctggtggagttgttagtgtcctatggcaacaccttctttgtggttctcattgtcatccttgtgctgttggtcatcgatgccgtgcgcgaaattcggaagtatgatgatgtgacggaaaaggtgaacctccagaacaatcccggggccatggagcacttccacatgaagcttttccgtgcccagaggaatctctacattgctggcttttccttgctgctgtccttcctgcttagacgcctggtgactctcatttcgcagcaggccacgctgctggcctccaatgaagcctttaaaaagc

SEQ ID NO: 110955 - DNA, 684 bp, Homo sapiens
  Payload ID: 1765
  Gene Symbol: BCAP31
  Gene Name: B-cell receptor-associated protein 31
  ENST ID: ENST00000429550
  CDS Start-End: 124-684
tcgcccggagcccgaggcgcctcttcctctcccgctcggagcgccggccctccgctccggggcggggtgggaagcggaggaaacaagctcacatcttcctgtgggaaaccttctagcaacaggatgagtctgcagtggactgcagttgccaccttcctctatgcggaggtctttgttgtgttgcttctctgcattcccttcatttctcctaaaagatggcagaagattttcaagtcccggctggtggagttgttagtgtcctatggcaacaccttctttgtggttctcattgtcatccttgtgctgttggtcatcgatgccgtgcgcgaaattcggaagtatgatgatgtgacggaaaaggtgaacctccagaacaatcccggggccatggagcacttccacatgaagcttttccgtgcccagaggaatctctacattgctggcttttccttgctgctgtccttcctgcttagacgcctggtgactctcatttcgcagcaggccacgctgctggcctccaatgaagcctttaaaaagcaggcggagagtgctagtgaggcggccaagaagtacatggaggagaatgaccagctcaagaagggagctgctgttgacggaggcaagttggatgtcgggaatgctgaggtgaagttggaggaagagaacaggagcctgaaggctgac

SEQ ID NO: 110956 - DNA, 3372 bp, Homo sapiens
  Payload ID: 1766
  Gene Symbol: BANK1
  Gene Name: B-cell scaffold protein with ankyrin repeats 1
  Uniprot ID: Q8NDB2
  ENST ID: ENST00000322953
  CDS Start-End: 275-2632
aaaccaaagcggccttttgagaagggatgtaagagcaggcccctgagcagtttcacttcctctgggcgcccagcagagcggagccctggccttgcgggcatgagccccggggctgcgtttcctgagacctggccgcagcctccgcgggtggcaagcgggctggggagagccgagggccaaaggaagagaaaatcgcggggagtctctggccgggagagtccaggtagcgctcggcgggcagcagtgcgcaggcccctcggcttcaaccgccacaatgctgccagcagcgccaggcaaggggcttgggagcccggaccccgccccctgcggcccagcgcccccaggaaatacaaaagatataataatgatatatgaagaagatgctgaggaatgggctctgtacttgacagaagtatttttacatgttgtgaaaagggaagccatcctgttatatcgcttggagaatttctcttttcggcatttggagttgctgaacttaacgtcttacaaatgtaaacttttgatattatcaaatagcctgcttagagacctaactccaaagaaatgtcagtttctggaaaagatacttcattcaccaaaaagtgtagttactttgctttgtggagtgaagagttcagatcagctctatgaattactaaatatctctcaaagcagatgggagatctcaactgaacaggaacctgaagactacatctctgtaatccagagtatcatattcaaagattctgaagactactttgaggtcaacattccaacagacctacgagcaaaacattctggggaaataagtgagagaaaggaaattgaagaactatcagaagcttcaagaaacaccataccactagcagtggtgcttcccactgaaattccatgtgagaatcctggtgaaatattcataattttgagagatgaagtaattggtgatactgtagaggttgaatttacatcaagtaataagcgcattagaacacggccagccctttggaataagaaagtctggtgcatgaaagctttagagtttcctgctggttcagtccatgtcaatgtctactgtgatggaatcgttaaagctacaaccaaaattaagtactacccaacagcaaaggcaaaggaatgcctattcagaatggcagattcaggagagagtttgtgccagaatagcattgaagaacttgatggtgtccttacatccatattcaaacatgagataccatattatgagttccagtctcttcaaactgaaatttgttctcaaaacaaatatactcatttcaaagaacttccaactcttctccactgtgcagcaaaatttggcttaaagaacctggctattcatttgcttcaatgttcaggagcaacctgggcatctaagatgaaaaatatggagggttcagaccccgcacatattgctgaaaggcatggtcacaaagaactcaagaaaatcttcgaagacttttcaatccaagaaattgacataaataatgagcaagaaaatgattatgaagaggatattgcctcattttccacatatattccttccacacagaacccagcatttcatcatgaaagcaggaagacatacgggcagagtgcagatggagctgaggcaaatgaaatggaaggggaaggaaaacagaatggatcaggcatggagaccaaacacagcccactagaggttggcagtgagagttctgaagaccagtatgatgacttgtatgtgttcattcctggtgctgatccagaaaataattcacaagagccactcatgagcagcagacctcctctccccccgccgcgacctgtagctaatgccttccaactggaaagacctcacttcaccttaccagggacaatggtggaaggccaaatggaaagaagtcaaaactggggtcatcctggtgttagacaagaaacaggagatgaacccaaaggagaaaaagagaagaaagaagaggaaaaagagcaggaggaggaagaagacccatatacttttgctgagattgatgacagtgaatatgacatgatattggccaatctgagtataaagaaaaaaactgggagtcggtctttcattataaatagacctcctgcccccacaccccgacccacaagtatacctccaaaagaggaaactacaccttacatagctcaagtgtttcaacaaaagacagccagaagacaatctgatgatgacaagttctgtggtcttcctaagaaacaagacagagctcggatagagagtccagccttttctactctcaggggctgtctaactgatggtcaggaagaactcatcctcctgcaggagaaagtaaagaatgggaaaatgtctatggatgaagctctggagaaatttaaacactggcagatgggaaaaagtggcctggaaatgattcagcaggagaaattacgacaactacgagactgcattattgggaaaaggccagaagaagaaaatgtctataataaactcaccattgtgcaccatccaggtggtaaggaaactgcccacaatgaaaataagttttataatgtacacttcagcaataagcttcctgctcgaccccaagttgaaaaggaatttggtttctgttgcaagaaagatcattaaagaaggttattataatgaaactcacgaatctacggacattttgctttcagggtgaagcaagcttgaatttggattgcctgctctctttaaagcgaattcatactatgacagcagaaacaaaacttcagatttcagaatttgttattggcaaaatttattctcattatacctgcttcatatgggtatattactattaaaacagaataccatagagtaattgcattatttgaaaattctctcattttacaatgcacttcaccaatgaaacagctaatttccattttgaaaattaaaagaaaacagcacagagaagttaaatgcggtgtagcaaagttatggggtctgcttgagggcactaacctcaacagattattcctcctctccttagaataaccatgaaaatacaaatttacttagcacatttttgctttttaagtagctggttcattttctgaatttctcacattcagagttccagtcattattgttacatcatgtttgcagaaaccttgtcttatttagtgtctatttgcatataaccctgaaaacattattatttgaaaacttttctatatctcaaattaatatacattttcataacctacctttgtattaagacttgcaattttatcaatctattatttcttagaaacaatttactagcttagaatagaaagcaatgttatcgtcatataattttcatgtacaaatgccacaaataaattgaatgtttaaagcta

SEQ ID NO: 110957 - DNA, 3141 bp, Homo sapiens
  Payload ID: 1766
  Gene Symbol: BANK1
  Gene Name: B-cell scaffold protein with ankyrin repeats 1
  Uniprot ID: Q8NDB2
  ENST ID: ENST00000444316
  CDS Start-End: 134-2401
ctggccaacaagggctgcagaggatgcacacatcaggaagagggtgggggactacttgcttgctggttttgcttgcatctgatgagtagaaattcagcctattctttgttttggaaatacaaaagatataataatgatatatgaagaagatgctgaggaatgggctctgtacttgacagaagtatttttacatgttgtgaaaagggaagccatcctgttatatcgcttggagaatttctcttttcggcatttggagttgctgaacttaacgtcttacaaatgtaaacttttgatattatcaaatagcctgcttagagacctaactccaaagaaatgtcagtttctggaaaagatacttcattcaccaaaaagtgtagttactttgctttgtggagtgaagagttcagatcagctctatgaattactaaatatctctcaaagcagatgggagatctcaactgaacaggaacctgaagactacatctctgtaatccagagtatcatattcaaagattctgaagactactttgaggtcaacattccaacagacctacgagcaaaacattctggggaaataagtgagagaaaggaaattgaagaactatcagaagcttcaagaaacaccataccactagcagtggtgcttcccactgaaattccatgtgagaatcctggtgaaatattcataattttgagagatgaagtaattggtgatactgtagaggttgaatttacatcaagtaataagcgcattagaacacggccagccctttggaataagaaagtctggtgcatgaaagctttagagtttcctgctggttcagtccatgtcaatgtctactgtgatggaatcgttaaagctacaaccaaaattaagtactacccaacagcaaaggcaaaggaatgcctattcagaatggcagattcaggagagagtttgtgccagaatagcattgaagaacttgatggtgtccttacatccatattcaaacatgagataccatattatgagttccagtctcttcaaactgaaatttgttctcaaaacaaatatactcatttcaaagaacttccaactcttctccactgtgcagcaaaatttggcttaaagaacctggctattcatttgcttcaatgttcaggagcaacctgggcatctaagatgaaaaatatggagggttcagaccccgcacatattgctgaaaggcatggtcacaaagaactcaagaaaatcttcgaagacttttcaatccaagaaattgacataaataatgagcaagaaaatgattatgaagaggatattgcctcattttccacatatattccttccacacagaacccagcatttcatcatgaaagcaggaagacatacgggcagagtgcagatggagctgaggcaaatgaaatggaaggggaaggaaaacagaatggatcaggcatggagaccaaacacagcccactagaggttggcagtgagagttctgaagaccagtatgatgacttgtatgtgttcattcctggtgctgatccagaaaataattcacaagagccactcatgagcagcagacctcctctccccccgccgcgacctgtagctaatgccttccaactggaaagacctcacttcaccttaccagggacaatggtggaaggccaaatggaaagaagtcaaaactggggtcatcctggtgttagacaagaaacaggagatgaacccaaaggagaaaaagagaagaaagaagaggaaaaagagcaggaggaggaagaagacccatatacttttgctgagattgatgacagtgaatatgacatgatattggccaatctgagtataaagaaaaaaactgggagtcggtctttcattataaatagacctcctgcccccacaccccgacccacaagtatacctccaaaagaggaaactacaccttacatagctcaagtgtttcaacaaaagacagccagaagacaatctgatgatgacaagttctgtggtcttcctaagaaacaagacagagctcggatagagagtccagccttttctactctcaggggctgtctaactgatggtcaggaagaactcatcctcctgcaggagaaagtaaagaatgggaaaatgtctatggatgaagctctggagaaatttaaacactggcagatgggaaaaagtggcctggaaatgattcagcaggagaaattacgacaactacgagactgcattattgggaaaaggccagaagaagaaaatgtctataataaactcaccattgtgcaccatccaggtggtaaggaaactgcccacaatgaaaataagttttataatgtacacttcagcaataagcttcctgctcgaccccaagttgaaaaggaatttggtttctgttgcaagaaagatcattaaagaaggttattataatgaaactcacgaatctacggacattttgctttcagggtgaagcaagcttgaatttggattgcctgctctctttaaagcgaattcatactatgacagcagaaacaaaacttcagatttcagaatttgttattggcaaaatttattctcattatacctgcttcatatgggtatattactattaaaacagaataccatagagtaattgcattatttgaaaattctctcattttacaatgcacttcaccaatgaaacagctaatttccattttgaaaattaaaagaaaacagcacagagaagttaaatgcggtgtagcaaagttatggggtctgcttgagggcactaacctcaacagattattcctcctctccttagaataaccatgaaaatacaaatttacttagcacatttttgctttttaagtagctggttcattttctgaatttctcacattcagagttccagtcattattgttacatcatgtttgcagaaaccttgtcttatttagtgtctatttgcatataaccctgaaaacattattatttgaaaacttttctatatctcaaattaatatacattttcataacctacctttgtattaagacttgcaattttatcaatctattatttcttagaaacaatttactagcttagaatagaaagcaatgttatcgtcatataattttcatgtacaaatgccacaaataaattgaatgtttaaagcta

SEQ ID NO: 110958 - DNA, 3044 bp, Homo sapiens
  Payload ID: 1766
  Gene Symbol: BANK1
  Gene Name: B-cell scaffold protein with ankyrin repeats 1
  Uniprot ID: Q8NDB2
  ENST ID: ENST00000428908
  CDS Start-End: 275-2233
aaaccaaagcggccttttgagaagggatgtaagagcaggcccctgagcagtttcacttcctctgggcgcccagcagagcggagccctggccttgcgggcatgagccccggggctgcgtttcctgagacctggccgcagcctccgcgggtggcaagcgggctggggagagccgagggccaaaggaagagaaaatcgcggggagtctctggccgggagagtccaggtagcgctcggcgggcagcagtgcgcaggcccctcggcttcaaccgccacaatgctgccagcagcgccaggcaaggggcttgggagcccggaccccgccccctgcggcccagcgcccccagattctgaagactactttgaggtcaacattccaacagacctacgagcaaaacattctggggaaataagtgagagaaaggaaattgaagaactatcagaagcttcaagaaacaccataccactagcagtggtgcttcccactgaaattccatgtgagaatcctggtgaaatattcataattttgagagatgaagtaattggtgatactgtagaggttgaatttacatcaagtaataagcgcattagaacacggccagccctttggaataagaaagtctggtgcatgaaagctttagagtttcctgctggttcagtccatgtcaatgtctactgtgatggaatcgttaaagctacaaccaaaattaagtactacccaacagcaaaggcaaaggaatgcctattcagaatggcagattcaggagagagtttgtgccagaatagcattgaagaacttgatggtgtccttacatccatattcaaacatgagataccatattatgagttccagtctcttcaaactgaaatttgttctcaaaacaaatatactcatttcaaagaacttccaactcttctccactgtgcagcaaaatttggcttaaagaacctggctattcatttgcttcaatgttcaggagcaacctgggcatctaagatgaaaaatatggagggttcagaccccgcacatattgctgaaaggcatggtcacaaagaactcaagaaaatcttcgaagacttttcaatccaagaaattgacataaataatgagcaagaaaatgattatgaagaggatattgcctcattttccacatatattccttccacacagaacccagcatttcatcatgaaagcaggaagacatacgggcagagtgcagatggagctgaggcaaatgaaatggaaggggaaggaaaacagaatggatcaggcatggagaccaaacacagcccactagaggttggcagtgagagttctgaagaccagtatgatgacttgtatgtgttcattcctggtgctgatccagaaaataattcacaagagccactcatgagcagcagacctcctctccccccgccgcgacctgtagctaatgccttccaactggaaagacctcacttcaccttaccagggacaatggtggaaggccaaatggaaagaagtcaaaactggggtcatcctggtgttagacaagaaacaggagatgaacccaaaggagaaaaagagaagaaagaagaggaaaaagagcaggaggaggaagaagacccatatacttttgctgagattgatgacagtgaatatgacatgatattggccaatctgagtataaagaaaaaaactgggagtcggtctttcattataaatagacctcctgcccccacaccccgacccacaagtatacctccaaaagaggaaactacaccttacatagctcaagtgtttcaacaaaagacagccagaagacaatctgatgatgacaagttctgtggtcttcctaagaaacaagacagagctcggatagagagtccagccttttctactctcaggggctgtctaactgatggtcaggaagaactcatcctcctgcaggagaaagtaaagaatgggaaaatgtctatggatgaagctctggagaaatttaaacactggcagatgggaaaaagtggcctggaaatgattcagcaggagaaattacgacaactacgagactgcattattgggaaaaggccagaagaagaaaatgtctataataaactcaccattgtgcaccatccaggtggtaaggaaactgcccacaatgaaaataagttttataatgtacacttcagcaataagcttcctgctcgaccccaagttgaaaaggaatttggtttctgttgcaagaaagatcattaaagaaggttattataatgaaactcacgaatctacggacattttgctttcagggtgaagcaagcttgaatttggattgcctgctctctttaaagcgaattcatactatgacagcagaaacaaaacttcagatttcagaatttgttattggcaaaatttattctcattatacctgcttcatatgggtatattactattaaaacagaataccatagagtaattgcattatttgaaaattctctcattttacaatgcacttcaccaatgaaacagctaatttccattttgaaaattaaaagaaaacagcacagagaagttaaatgcggtgtagcaaagttatggggtctgcttgagggcactaacctcaacagattattcctcctctccttagaataaccatgaaaatacaaatttacttagcacatttttgctttttaagtagctggttcattttctgaatttctcacattcagagttccagtcattattgttacatcatgtttgcagaaaccttgtcttatttagtgtctatttgcatataaccctgaaaacattattatttgaaaacttttctatatctcaaattaatatacattttcataacctacctttgtattaagacttgcaattttatcaatctattatttcttagaaacaatttactagcttagaatagaaagcaatgttatcgtcatataattttcatgtacaaatgccacaaataaattgaatgtttaaagctatgtctgagtttttaaagtaaatttataagaattagccaataaaattgcttctcggccttttggctaagatc

SEQ ID NO: 110959 - DNA, 3544 bp, Homo sapiens
  Payload ID: 1766
  Gene Symbol: BANK1
  Gene Name: B-cell scaffold protein with ankyrin repeats 1
  Uniprot ID: Q8NDB2
  ENST ID: ENST00000504592
  CDS Start-End: 419-2731
tttggtttctcttcaagaattaacaaaccacttactcttgaattctcttctagttaacacaggcatcactacttccaattgatctcaggatgtgggatcctcatacacattttgaacaaaatcctctgtttcagcaaggaattcatatttgcatatggtgaagatggtttctgaagtgagatcagaagtagagcttctaatgacccccagaagcactgagtgaccaagtgacatacctgccaggcccattgtgtccatcgctctcagagcagctggggattgtgcttggctcccagagctatggtgcaaaaggcggggtcgctagggccactcagggaaagagaacccagaaacatggcatgctgacaaaaggtagtctctgcttatccagcttcactttctgctgatttagttacccatggtcaactgccatctgaaaataggaaatacaaaagatataataatgatatatgaagaagatgctgaggaatgggctctgtacttgacagaagtatttttacatgttgtgaaaagggaagccatcctgttatatcgcttggagaatttctcttttcggcatttggagttgctgaacttaacgtcttacaaatgtaaacttttgatattatcaaatagcctgcttagagacctaactccaaagaaatgtcagtttctggaaaagatacttcattcaccaaaaagtgtagttactttgctttgtggagtgaagagttcagatcagctctatgaattactaaatatctctcaaagcagatgggagatctcaactgaacaggaacctgaagactacatctctgtaatccagagtatcatattcaaagattctgaagactactttgaggtcaacattccaacagacctacgagcaaaacattctggggaaataagtgagagaaaggaaattgaagaactatcagaagcttcaagaaacaccataccactagcagtggtgcttcccactgaaattccatgtgagaatcctggtgaaatattcataattttgagagatgaagtaattggtgatactgtagaggttgaatttacatcaagtaataagcgcattagaacacggccagccctttggaataagaaagtctggtgcatgaaagctttagagtttcctgctggttcagtccatgtcaatgtctactgtgatggaatcgttaaagctacaaccaaaattaagtactacccaacagcaaaggcaaaggaatgcctattcagaatggcagattcaggagagagtttgtgccagaatagcattgaagaacttgatggtgtccttacatccatattcaaacatgagataccatattatgagttccagtctcttcaaactgaaatttgttctcaaaacaaatatactcatttcaaagaacttccaactcttctccactgtgcagcaaaatttggcttaaagaacctggctattcatttgcttcaatgttcaggagcaacctgggcatctaagatgaaaaatatggagggttcagaccccgcacatattgctgaaaggcatggtcacaaagaactcaagaaaatcttcgaagacttttcaatccaagaaattgacataaataatgagcaagaaaatgattatgaagaggatattgcctcattttccacatatattccttccacacagaacccagcatttcatcatgaaagcaggaagacatacgggcagagtgcagatggagctgaggcaaatgaaatggaaggggaaggaaaacagaatggatcaggcatggagaccaaacacagcccactagaggttggcagtgagagttctgaagaccagtatgatgacttgtatgtgttcattcctggtgctgatccagaaaataattcacaagagccactcatgagcagcagacctcctctccccccgccgcgacctgtagctaatgccttccaactggaaagacctcacttcaccttaccagggacaatggtggaaggccaaatggaaagaagtcaaaactggggtcatcctggtgttagacaagaaacaggagatgaacccaaaggagaaaaagagaagaaagaagaggaaaaagagcaggaggaggaagaagacccatatacttttgctgagattgatgacagtgaatatgacatgatattggccaatctgagtataaagaaaaaaactgggagtcggtctttcattataaatagacctcctgcccccacaccccgacccacaagtatacctccaaaagaggaaactacaccttacatagctcaagtgtttcaacaaaagacagccagaagacaatctgatgatgacaagttctgtggtcttcctaagaaacaagacagagctcggatagagagtccagccttttctactctcaggggctgtctaactgatggtcaggaagaactcatcctcctgcaggagaaagtaaagaatgggaaaatgtctatggatgaagctctggagaaatttaaacactggcagatgggaaaaagtggcctggaaatgattcagcaggagaaattacgacaactacgagactgcattattgggaaaaggccagaagaagaaaatgtctataataaactcaccattgtgcaccatccaggtggtaaggaaactgcccacaatgaaaataagttttataatgtacacttcagcaataagcttcctgctcgaccccaagttgaaaaggaatttggtttctgttgcaagaaagatcattaaagaaggttattataatgaaactcacgaatctacggacattttgctttcagggtgaagcaagcttgaatttggattgcctgctctctttaaagcgaattcatactatgacagcagaaacaaaacttcagatttcagaatttgttattggcaaaatttattctcattatacctgcttcatatgggtatattactattaaaacagaataccatagagtaattgcattatttgaaaattctctcattttacaatgcacttcaccaatgaaacagctaatttccattttgaaaattaaaagaaaacagcacagagaagttaaatgcggtgtagcaaagttatggggtctgcttgagggcactaacctcaacagattattcctcctctccttagaataaccatgaaaatacaaatttacttagcacatttttgctttttaagtagctggttcattttctgaatttctcacattcagagttccagtcattattgttacatcatgtttgcagaaaccttgtcttatttagtgtctatttgcatataaccctgaaaacattattatttgaaaacttttctatatctcaaattaatatacattttcataacctacctttgtattaagacttgcaattttatcaatctattatttcttagaaacaatttactagcttagaatagaaagcaatgttatcgtcatataattttcatgtacaaatgccacaaataaattgaatgtttaaagctatgtctgagtttttaaagtaaatttataagaattagccaataaaattgcttctcggccttttggctaagatcaa

SEQ ID NO: 110960 - DNA, 2115 bp, Homo sapiens
  Payload ID: 1766
  Gene Symbol: BANK1
  Gene Name: B-cell scaffold protein with ankyrin repeats 1
  Uniprot ID: Q8NDB2
  ENST ID: ENST00000508653
  CDS Start-End: 152-2110
gagacctggccgcagcctccgcgggtggcaagcgggctggggagagccgagggccaaaggaagagaaaatcgcggggagtctctggccgggagagtccaggtagcgctcggcgggcagcagtgcgcaggcccctcggcttcaaccgccacaatgctgccagcagcgccaggcaaggggcttgggagcccggaccccgccccctgcggcccagcgcccccagattctgaagactactttgaggtcaacattccaacagacctacgagcaaaacattctggggaaataagtgagagaaaggaaattgaagaactatcagaagcttcaagaaacaccataccactagcagtggtgcttcccactgaaattccatgtgagaatcctggtgaaatattcataattttgagagatgaagtaattggtgatactgtagaggttgaatttacatcaagtaataagcgcattagaacacggccagccctttggaataagaaagtctggtgcatgaaagctttagagtttcctgctggttcagtccatgtcaatgtctactgtgatggaatcgttaaagctacaaccaaaattaagtactacccaacagcaaaggcaaaggaatgcctattcagaatggcagattcaggagagagtttgtgccagaatagcattgaagaacttgatggtgtccttacatccatattcaaacatgagataccatattatgagttccagtctcttcaaactgaaatttgttctcaaaacaaatatactcatttcaaagaacttccaactcttctccactgtgcagcaaaatttggcttaaagaacctggctattcatttgcttcaatgttcaggagcaacctgggcatctaagatgaaaaatatggagggttcagaccccgcacatattgctgaaaggcatggtcacaaagaactcaagaaaatcttcgaagacttttcaatccaagaaattgacataaataatgagcaagaaaatgattatgaagaggatattgcctcattttccacatatattccttccacacagaacccagcatttcatcatgaaagcaggaagacatacgggcagagtgcagatggagctgaggcaaatgaaatggaaggggaaggaaaacagaatggatcaggcatggagaccaaacacagcccactagaggttggcagtgagagttctgaagaccagtatgatgacttgtatgtgttcattcctggtgctgatccagaaaataattcacaagagccactcatgagcagcagacctcctctccccccgccgcgacctgtagctaatgccttccaactggaaagacctcacttcaccttaccagggacaatggtggaaggccaaatggaaagaagtcaaaactggggtcatcctggtgttagacaagaaacaggagatgaacccaaaggagaaaaagagaagaaagaagaggaaaaagagcaggaggaggaagaagacccatatacttttgctgagattgatgacagtgaatatgacatgatattggccaatctgagtataaagaaaaaaactgggagtcggtctttcattataaatagacctcctgcccccacaccccgacccacaagtatacctccaaaagaggaaactacaccttacatagctcaagtgtttcaacaaaagacagccagaagacaatctgatgatgacaagttctgtggtcttcctaagaaacaagacagagctcggatagagagtccagccttttctactctcaggggctgtctaactgatggtcaggaagaactcatcctcctgcaggagaaagtaaagaatgggaaaatgtctatggatgaagctctggagaaatttaaacactggcagatgggaaaaagtggcctggaaatgattcagcaggagaaattacgacaactacgagactgcattattgggaaaaggccagaagaagaaaatgtctataataaactcaccattgtgcaccatccaggtggtaaggaaactgcccacaatgaaaataagttttataatgtacacttcagcaataagcttcctgctcgaccccaagttgaaaaggaatttggtttctgttgcaagaaagatcattaaagaag

SEQ ID NO: 110961 - DNA, 4680 bp, Homo sapiens
  Payload ID: 1767
  Gene Symbol: BTG1
  Gene Name: B-cell translocation gene 1, anti-proliferative
  Uniprot ID: P62324
  ENST ID: ENST00000256015
  CDS Start-End: 363-878
acttccttttcgtggcactataaagggtgctgcacggcgcttgcatctcttcgcctctcggagctggaaatgcagctattgagatcttcgaatgctgcggagctggaggcggaggcagctggggaggtccgagcgatgtgaccaggccgccatcgctcgtctcttcctctctcctgccgcctcctgtctcgaaaataacttttttagtctaaagaaagaaagacaaaagtagtcgtccgcccctcacgccctctcttcctctcagccttccgcccggtgaggaagcccggggtggctgctccgccgtcggggccgcgccgccgagccccagccgccccgggccgcccccgcacgccgcccccatgcatcccttctacacccgggccgccaccatgataggcgagatcgccgccgccgtgtccttcatctccaagtttctccgcaccaaggggctcacgagcgagcgacagctgcagaccttcagccagagcctgcaggagctgctggcagaacattataaacatcactggttcccagaaaagccatgcaagggatcgggttaccgttgtattcgcatcaaccataaaatggatcctctgattggacaggcagcacagcggattggactgagcagtcaggagctgttcaggcttctcccaagtgaactcacactctgggttgacccctatgaagtgtcctacagaattggagaggatggctccatctgtgtgctgtatgaagcctcaccagcaggaggtagcactcaaaacagcaccaacgtgcaaatggtagacagccgaatcagctgtaaggaggaacttctcttgggcagaacgagcccttccaaaaactacaatatgatgactgtatcaggttaagatatagtctgtggatggatcatctgatgatgatggataaatttgatttttgctttgggtgggctcctcttggggatggattatggaatttaaaccatgtcacagctgtgaagatctggcacaagatagaatggtaaaaaaaaaaaaaattttaagtgacagtgccatagtttggacagtacctttcaatgattaattttaatagcctgtgagtccaagtaaatgatcactttatttgctagggagggaagtcctagggtggtttcagtttctcccagacatacctaaatttttacatcaatccttttaaagaaaatctgtatttcaaagaatctttctctgcagtaaatctcgcaggggaatttgcactattacacttgaaagttgttattgttaaccttttcggcagcttttaataggaaagttaaacgttttaaacatggtagtactggaaattttacaagacttttacctagcacttaaatatgtataaatgtacataaagacaaactagtaagcatgacctggggaaatggtcagaccttgtattgtgtttttggccttgaaagtagcaagtgaccagaatctgccatggcaacaggctttaaaaaagacccttaaaaagacactgtctcaactgtggtgttagcaccagccagctctctgtacatttgctagcttgtagttttctaagactgagtaaacttcttatttttagaaagtggaggtctggtttgtaactttccttgtacttaattgggtaaaagtcttttccacaaaccaccatctattttgtgaactttgttagtcatcttttatttggtaaattatgaactggtgtaaatttgtacagttcatgtatattgattgtggcaaagttgtacagatttctatattttggatgagaaatttttcttctctctataataaatcgtttcttatcttggcattttaatcaatctcttgtcatgattatagaggtttagctaaaagtattttttcttagaagacaggttctataaactgaatctctgttgcacactggtcatgctggaaaaacatttgatgaggaatgaagatgctctgtatatacatgtttaggttttacaggaaacacaggagtagcatgttttaaaaatttctaaagtcaaaacatggacacattcacaggctaatgatctcatgaaataaggataagagaccacggtagcatctaccaaaaatgtgatactcaaaggattacatttcattgcttccctgttgaagtgaagatataaatgttccattctgacccacctttgaaaaacaattactttgccccatggattctttgttcaattagaaatttccccggggcaggtgacccatagtcttaaagaacaggctaaacaccacagagagattggttgctttttgcttttcatcacctgcaagatgtacataaaaatcacataagctggaattcaacaaaaggtatgtttatgaacttttattctcaaaagttgaaatgctgactttctcgattcctcattttcagacttttatttcagataaatactaaaaacctaagtgaaccttgataatgctgtagtgtagattacttcactaccccatataatagaaggacttgctgtttagttgtagaggataacagcgtttttcagtggaaattgaaagtggaaaaattgaattttgctctacacagttaacatatagtggcctttttttggtatatatgtaaacatgttgacactggaaatacgcagtctgaaataaaattagtaattacttgaaattagtaatctcaaataacttttaagaagttatttctacacccaggaataaattattctgattttgtagacaacacaggaataggccactgaatatgcaggtatttagagtacaaatgtctgtggatattattggcacaccattctcgagagttagaattcgtagacccgcaacacatggactacccttgccaattgttatggttttatttttaaacctattctgtgaaaaagctcctcggtatttcaaacttgaattacaataaaaacaccaggtagggttgtttttaaatgggtctcaccccagtgctgactactgttgtttaccaactacatttcatctggtaactccattgaaactaagtacctcaaccattttttttttttatcataaagccttttttcaaatggaaagttgtttttgaagatcttgacatcagactttttcaatctttgaaaatgatggaaacagttaataaaaatgtttattttagaattcaggtgatgtctggcttgtgaggagctgtttataagtttgtctttgaaaaaggcttgcacacatcactctgagaccagctgtttcctgtgactttaaccttaccttccccagacaattgagctgaacctgtatctgcggtacagtagctgtttgtgatgtatttcttgttcactgtttctggggaatgttttgaaatattttattataaatccttttaagataggatgactactttcaaaattattgttgcctttggcaccaggaattcatagttgtgattggcagtaagtttgaggagtgttactttctaagttttaacaggtagttttgaaattatttccttttttccaaatttaagtagtgcctccctctgtaatgttgaaacaaggcttcaagtggattgtatagcaagagttaccctggttcatgcaggataatgcggctgttatctttgtcatctggaatgggaatctcatgtctttatccttatgtgcaatatttctataataatagactggaaaggccaccagaaagtggctttcaggtacattgcacaaatagtttccttaagtcattataactcacacattgcaagtaattaattttgttttgtataggtgttgcagtttatgaaattggccttcaagttaaaaggaaggaagccgtattcccgatggctagtgtttaatgactacaggtttccaggctccctttaatcttgggagcaaataaatctactattggacttctccctgcgtgacttttaacatttctgatactctctcttcttcctctttacagaagagaggtatgataactgaagttgtactttgcatattgaagtttaaagatacttcctctccccttttcacccctatttcaaatgatgtgataaaatcctcttgataggctatatggagaacatttgtcaatagttttatctatgcatggaagtcttcaaaaagtatatcttggattgtctaaaactgaatagatttcttatttatctgaaggtatacagactgccaacattttagacttatctctcagtctctgccactgaacttttatatatggctgctatcaaaatataaccggtttattttcatatttggaactaatataacagtatcacaaaatcttttacagtaagatagtttgtaataccagccgacccagctgcttaactgagtccttaaatcatttaatatatgggactgtaaatagagaaatctgtacattatgagatctgatttctggttatgcctatagatctttattttctttatccctatagatcattttcttctgatgttaagtgttatatttttgaaatgctcctaaacaagtaagccttagattgtattaatcctgaggattgataccatttcctcaacactttgtggagtatgattgacaccagtttttttttgactgcaggtttaacttggcttatcacttttcgtattgctcagtatgtccaagataggaataaaaaaatgtagttcaa

SEQ ID NO: 110962 - DNA, 504 bp, Homo sapiens
  Payload ID: 1767
  Gene Symbol: BTG1
  Gene Name: B-cell translocation gene 1, anti-proliferative
  ENST ID: ENST00000552315
  CDS Start-End: 252-504
agcggttccccgcgaggctttaggggctggacggagggcgcccccttccccccagctggcaaaacggagaggagaagacaacacgcacaacaaagaaacttaagcccaccgaggcgggagctgcggtccgaggaccgtcggcggatttggggacaaaggagccgtggggctgggaacattataaacatcactggttcccagaaaagccatgcaagggatcgggttaccgttgtattcgcatcaaccataaaatggatcctctgattggacaggcagcacagcggattggactgagcagtcaggagctgttcaggcttctcccaagtgaactcacactctgggttgacccctatgaagtgtcctacagaattggagaggatggctccatctgtgtgctgtatgaagcctcaccagcaggaggtagcactcaaaacagcaccaacgtgcaaatggtagacagccgaatcagctgtaaggaggaacttctcttgggcagaacgagcc

SEQ ID NO: 110963 - DNA, 1018 bp, Homo sapiens
  Payload ID: 1768
  Gene Symbol: BTG4
  Gene Name: B-cell translocation gene 4
  Uniprot ID: Q9NY30
  ENST ID: ENST00000356018
  CDS Start-End: 201-872
cctgaagggcctccaagggagacgcctagaagatggaggcccagattcttgagacgtttctctttctgatctagcaggagggacaaagagctcctccactccctcattccccaagaaggcccccagcctacccagtttccgtgaccattccgccctgggaaagcggcttcccagacctccttatctatttttcttgaatcatgagagatgaaattgcaacaacagttttctttgtcacaagattggtgaaaaaacatgataaactaagtaaacagcaaatagaagactttgcagaaaagctgatgacgatcttgtttgaaacatacagaagtcactggcactctgattgcccttctaaagggcaagccttcaggtgcatcaggataaacaacaatcagaataaagatcccattctagaaagggcatgtgtggaaagtaatgtagatttttctcacctgggacttccgaaggagatgaccatatgggtagatccctttgaagtatgctgtaggtatggtgagaaaaaccatccatttacagttgcttcttttaaaggcagatgggaggaatgggaactatatcaacaaatcagttatgccgttagtagagcctcatcagacgtttcctctggcacttcctgcgatgaagaaagttgtagcaaggaacctcgtgtcattcctaaagtcagcaatccgaagagtatttatcaggttgaaaacttgaaacagccctttcaatcttggttacaaatcccccgcaaaaagaatgtggtggacggccgtgttggcctcctgggaaacacttaccatggctcgcagaagcatcctaagtgttacaggcctgctatgcaccggctggacagaattttataacccacatctgggaatgaatttgcagcacctggtagaagaaggcaccttggaaggcactgccttgggcttccatggcaggaagatgagaagaaatcttcagggtgatttctggagcctgaaaagaataaaaaacaaaaccaaaccta

SEQ ID NO: 110964 - DNA, 754 bp, Homo sapiens
  Payload ID: 1768
  Gene Symbol: BTG4
  Gene Name: B-cell translocation gene 4
  ENST ID: ENST00000456861
  CDS Start-End: 273-754
ccaagggagacgcctagaagatggaggcccagattcttgagacgtttctctttctgatctagcaggagggacaaagagctcctccactccctcattccccaagaaggcccccagcctacccagtttccgtgaccattccgccctgggaaagcggcttcccagttgaagtcacgaggagttctccaagaaaggtctgctggctgattcttcattgacctaccagtccctgctatcaaggacactagaacctccttatctatttttcttgaatcatgagagatgaaattgcaacaacagttttctttgtcacaagattggtgaaaaaacatgataaactaagtaaacagcaaatagaagactttgcagaaaagctgatgacgatcttgtttgaaacatacagaagtcactggcactctgattgcccttctaaagggcaagccttcaggtgcatcaggataaacaacaatcagaataaagatcccattctagaaagggcatgtgtggaaagtaatgtagatttttctcacctgggacttccgaaggagatgaccatatgggtagatccctttgaagtatgctgtaggtatggtgagaaaaaccatccatttacagttgcttcttttaaaggcagatgggaggaatgggaactatatcaacaaatcagttatgccgttagtagagcctcatcagacgtttcctctggcacttcctgcgatgaagaaagttgtagcaaggaacctcgtgtcattcctaa

SEQ ID NO: 110965 - DNA, 1394 bp, Homo sapiens
  Payload ID: 1768
  Gene Symbol: BTG4
  Gene Name: B-cell translocation gene 4
  Uniprot ID: Q9NY30
  ENST ID: ENST00000525791
  CDS Start-End: 186-806
agggagacgcctagaagatggaggcccagattcttgagacgtttctctttctgatctagcaggagggacaaagagctcctccactccctcattccccaagaaggcccccagcctacccagtttccgtgaccattccgccctgggaaagcggcttcccagacctccttatctatttttcttgaatcatgagagatgaaattgcaacaacagttttctttgtcacaagattggtgaaaaaacatgataaactaagtaaacagcaaatagaagactttgcagaaaagctgatgacgatcttgtttgaaacatacagaagtcactggcactctgattgcccttctaaagggcaagccttcaggtgcatcaggataaacaacaatcagaataaagatcccattctagaaagggcatgtgtggaaagtaatgtagatttttctcacctgggacttccgaaggagatgaccatatgggtagatccctttgaagtatgctgtaggtatggtgagaaaaaccatccatttacagttgcttcttttaaaggcagatgggaggaatgggaactatatcaacaaatcagttatgccgttagtagagcctcatcagacgtttcctctggcacttcctgcgatgaagaaagttgtagcaaggaacctcgtgtcattcctaaagtcagcaatccgaagagtatttatcaggtcaagagtgttccagttcttttctatactttttttctatctaattctaaaaagaatgcactcattatgaaaacaaagaagcaaaaaaacatggaaagaacaaaactgtagatttttaaaagccagactcttaatattttggcaaaactttttctgtctccttcactgcacaatgtattccctacacttggctgagcttttaggatccacataatcttttattgtcctatttcttcatacagtatttgaagatacacaggtttccttccacttaaattcctacagaatcaaagattaagattagtgggatttttttttctgtcaattgaaaataccacggcatttatagaaaatttggatataggaaaggtcaaaggcctataaattctgccactagagcagtttttctcagctatttttttcttctttttaaaccataacccattcaaaatatgtatatttacatttaaaaagtttcatgaaacagtgcttatctttactaggagcaatgctcccaatgctcccaatacttccaattaaattcatttgatttcaagtatctaaattgatttcatgacccacaatttgaaaaacactgatctagagagaatttgttaacactatatgtatatatttgtttgtatgttctcttaatcacctatgtattaaatgttaaagcaattaaaattttaatattca

SEQ ID NO: 110966 - DNA, 1347 bp, Homo sapiens
  Payload ID: 1769
  Gene Symbol: BBC3
  Gene Name: BCL2 binding component 3
  Uniprot ID: Q96PG8
  ENST ID: ENST00000300880
  CDS Start-End: 165-470
gaggcgattgcgattgggtgagacccagtaaggatggaaagtgtagaggagacaggaatccacggctttggaaaaaggaaggacaaaactcaccaaaccagagcagggcaggaagtaacaatgagaaactgaaaaagaaacggaatggaaagctatgagacaggatgaaatttggcatggggtctgcccaggcatgtccatgccaggtgcccagggctgcttccacgacgtgggtcccctgccagatttgtgagacaagaggagcagcagcggcaccgcccctcaccctggagggtcctgtacaatctcatcatgggactcctgcccttacccaggggccacagagcccccgagatggagcccaattaggtgcctgcacccgcccggtggacgtcagggactcggggggcaggcccctcccacctcctgacaccctggccagcgcgggggactttctctgcaccatgtagcatactggactcccagccctgcctgtcccgggggcgggccggggcagccactccagccccagcccagcctggggtgcactgacggagatgcggactcctgggtccctggccaagaagccaggagagggacggctgatggactcagcatcggaaggtggcggtgaccgagggggtggggactgagccgcccgcctctgccgcccaccaccatctcaggaaaggctgttgtgctggtgcccgttccagctgcaggggtgacactgggaggggggggctctcctctcggtgctccttcactctgggcctggcctcaggcccctggtgcttccccccctcctcctgggagggggcccgtgaagagcaaatgagccaaacgtgaccactagcctcctggagccagagagtggggctcgtttgccggttgctccagcccggcgcccagccatcttccctgagccagccggcgggtggtgggcatgcctgcctcaccttcatcagggggtggccaggaggggcccagactgtgaatcctgtgctctgcccgtgaccgccccccgccccatcaatcccattgcataggtttagagagagcacgtgtgaccactggcattcatttggggggtgggagattttggctgaagccgccccagccttagtccccagggccaagcgctggggggaagacggggagtcagggagggggggaaatctcggaagagggaggagtctgggagtggggagggatggcccagcctgtaagatactgtatatgcgctgctgtagataccggaatgaattttctgtacatgtttggttaattttttttgtacatgatttttgtatgtttccttttcaataaaatcagattggaacagtg

SEQ ID NO: 110967 - DNA, 1538 bp, Homo sapiens
  Payload ID: 1769
  Gene Symbol: BBC3
  Gene Name: BCL2 binding component 3
  Uniprot ID: Q9BXH1
  ENST ID: ENST00000341983
  CDS Start-End: 165-560
gaggcgattgcgattgggtgagacccagtaaggatggaaagtgtagaggagacaggaatccacggctttggaaaaaggaaggacaaaactcaccaaaccagagcagggcaggaagtaacaatgagaaactgaaaaagaaacggaatggaaagctatgagacaggatgaaatttggcatggggtctgcccaggcatgtccatgccaggtgcccagggctgcttccacgacgtgggtcccctgccagatttgtggtcctcagccctcgctctcgctggcggagcagcacctggagtcgcccgtgcccagcgccccgggggctctggcgggcggtcccacccaggcggccccgggagtccgcggggaggaggaacagtgggcccgggagatcggggcccagctgcggcggatggcggacgacctcaacgcacagtacgagcggcggagacaagaggagcagcagcggcaccgcccctcaccctggagggtcctgtacaatctcatcatgggactcctgcccttacccaggggccacagagcccccgagatggagcccaattaggtgcctgcacccgcccggtggacgtcagggactcggggggcaggcccctcccacctcctgacaccctggccagcgcgggggactttctctgcaccatgtagcatactggactcccagccctgcctgtcccgggggcgggccggggcagccactccagccccagcccagcctggggtgcactgacggagatgcggactcctgggtccctggccaagaagccaggagagggacggctgatggactcagcatcggaaggtggcggtgaccgagggggtggggactgagccgcccgcctctgccgcccaccaccatctcaggaaaggctgttgtgctggtgcccgttccagctgcaggggtgacactgggaggggggggctctcctctcggtgctccttcactctgggcctggcctcaggcccctggtgcttccccccctcctcctgggagggggcccgtgaagagcaaatgagccaaacgtgaccactagcctcctggagccagagagtggggctcgtttgccggttgctccagcccggcgcccagccatcttccctgagccagccggcgggtggtgggcatgcctgcctcaccttcatcagggggtggccaggaggggcccagactgtgaatcctgtgctctgcccgtgaccgccccccgccccatcaatcccattgcataggtttagagagagcacgtgtgaccactggcattcatttggggggtgggagattttggctgaagccgccccagccttagtccccagggccaagcgctggggggaagacggggagtcagggagggggggaaatctcggaagagggaggagtctgggagtggggagggatggcccagcctgtaagatactgtatatgcgctgctgtagataccggaatgaattttctgtacatgtttggttaattttttttgtacatgatttttgtatgtttccttttcaataaaatcagattggaacagtg

SEQ ID NO: 110968 - DNA, 1838 bp, Homo sapiens
  Payload ID: 1769
  Gene Symbol: BBC3
  Gene Name: BCL2 binding component 3
  Uniprot ID: Q9BXH1
  ENST ID: ENST00000439096
  CDS Start-End: 282-863
gcggcgcgagccacatgcgagcgggcgcctggcggcggcggcggcggcaccagcgatcccagcagcggccacgacgcggacgcgcctgcggcccggggagcagcagcagccacagccacagcagccgccactgcagttagagcggcagcagcagcgacagccacagcagcagccgccgcggagagcggcgctcggcgggcgcgccctcctgaaggaagccgcccgccccccaccgccgccccctccggcgtgttcatgcccccggggccccagggagcgccatggcccgcgcacgccaggagggcagctccccggagcccgtagagggcctggcccgcgacggcccgcgccccttcccgctcggccgcctggtgccctcggcagtgtcctgcggcctctgcgagcccggcctggctgccgcccccgccgcccccaccctgctgcccgctgcctacctctgcgcccccaccgccccacccgccgtcaccgccgccctggggggttcccgctggcctgggggtccccgcagccggccccgaggcccgcgcccggacggtcctcagccctcgctctcgctggcggagcagcacctggagtcgcccgtgcccagcgccccgggggctctggcgggcggtcccacccaggcggccccgggagtccgcggggaggaggaacagtgggcccgggagatcggggcccagctgcggcggatggcggacgacctcaacgcacagtacgagcggcggagacaagaggagcagcagcggcaccgcccctcaccctggagggtcctgtacaatctcatcatgggactcctgcccttacccaggggccacagagcccccgagatggagcccaattaggtgcctgcacccgcccggtggacgtcagggactcggggggcaggcccctcccacctcctgacaccctggccagcgcgggggactttctctgcaccatgtagcatactggactcccagccctgcctgtcccgggggcgggccggggcagccactccagccccagcccagcctggggtgcactgacggagatgcggactcctgggtccctggccaagaagccaggagagggacggctgatggactcagcatcggaaggtggcggtgaccgagggggtggggactgagccgcccgcctctgccgcccaccaccatctcaggaaaggctgttgtgctggtgcccgttccagctgcaggggtgacactgggaggggggggctctcctctcggtgctccttcactctgggcctggcctcaggcccctggtgcttccccccctcctcctgggagggggcccgtgaagagcaaatgagccaaacgtgaccactagcctcctggagccagagagtggggctcgtttgccggttgctccagcccggcgcccagccatcttccctgagccagccggcgggtggtgggcatgcctgcctcaccttcatcagggggtggccaggaggggcccagactgtgaatcctgtgctctgcccgtgaccgccccccgccccatcaatcccattgcataggtttagagagagcacgtgtgaccactggcattcatttggggggtgggagattttggctgaagccgccccagccttagtccccagggccaagcgctggggggaagacggggagtcagggagggggggaaatctcggaagagggaggagtctgggagtggggagggatggcccagcctgtaagatactgtatatgcgctgctgtagataccggaatgaattttctgtacatgtttggttaattttttttgtacatgatttttgtatgtttccttttcaataaaatcagattggaaca

SEQ ID NO: 110969 - DNA, 1827 bp, Homo sapiens
  Payload ID: 1769
  Gene Symbol: BBC3
  Gene Name: BCL2 binding component 3
  Uniprot ID: Q96PG8
  ENST ID: ENST00000449228
  CDS Start-End: 165-950
gaggcgattgcgattgggtgagacccagtaaggatggaaagtgtagaggagacaggaatccacggctttggaaaaaggaaggacaaaactcaccaaaccagagcagggcaggaagtaacaatgagaaactgaaaaagaaacggaatggaaagctatgagacaggatgaaatttggcatggggtctgcccaggcatgtccatgccaggtgcccagggctgcttccacgacgtgggtcccctgccagatttgtggccccagggagcgccatggcccgcgcacgccaggagggcagctccccggagcccgtagagggcctggcccgcgacggcccgcgccccttcccgctcggccgcctggtgccctcggcagtgtcctgcggcctctgcgagcccggcctggctgccgcccccgccgcccccaccctgctgcccgctgcctacctctgcgcccccaccgccccacccgccgtcaccgccgccctggggggttcccgctggcctgggggtccccgcagccggccccgaggcccgcgcccggacggtcctcagccctcgctctcgctggcggagcagcacctggagtcgcccgtgcccagcgccccgggggctctggcgggcggtcccacccaggcggccccgggagtccgcggggaggaggaacagtgggcccgggagatcggggcccagctgcggcggatggcggacgacctcaacgcacagtacgagcggcggagacaagaggagcagcagcggcaccgcccctcaccctggagggtcctgtacaatctcatcatgggactcctgcccttacccaggggccacagagcccccgagatggagcccaattaggtgcctgcacccgcccggtggacgtcagggactcggggggcaggcccctcccacctcctgacaccctggccagcgcgggggactttctctgcaccatgtagcatactggactcccagccctgcctgtcccgggggcgggccggggcagccactccagccccagcccagcctggggtgcactgacggagatgcggactcctgggtccctggccaagaagccaggagagggacggctgatggactcagcatcggaaggtggcggtgaccgagggggtggggactgagccgcccgcctctgccgcccaccaccatctcaggaaaggctgttgtgctggtgcccgttccagctgcaggggtgacactgggaggggggggctctcctctcggtgctccttcactctgggcctggcctcaggcccctggtgcttccccccctcctcctgggagggggcccgtgaagagcaaatgagccaaacgtgaccactagcctcctggagccagagagtggggctcgtttgccggttgctccagcccggcgcccagccatcttccctgagccagccggcgggtggtgggcatgcctgcctcaccttcatcagggggtggccaggaggggcccagactgtgaatcctgtgctctgcccgtgaccgccccccgccccatcaatcccattgcataggtttagagagagcacgtgtgaccactggcattcatttggggggtgggagattttggctgaagccgccccagccttagtccccagggccaagcgctggggggaagacggggagtcagggagggggggaaatctcggaagagggaggagtctgggagtggggagggatggcccagcctgtaagatactgtatatgcgctgctgtagataccggaatgaattttctgtacatgtttggttaattttttttgtacatgatttttgtatgtttccttttcaataaaatcagattggaacagtg

SEQ ID NO: 110970 - DNA, 4687 bp, Homo sapiens
  Payload ID: 1770
  Gene Symbol: BMF
  Gene Name: Bcl2 modifying factor
  Uniprot ID: Q96LC9
  ENST ID: ENST00000354670
  CDS Start-End: 236-790
ggaaacaataccgcaccgtgcggagtggcctcctcccgccccggcctgtgcccgccgccgccgccgcccctgcctgcgcctcccgcctcctgccgcagcccgctgggctttttccctccttcccaatcgagtctgggcgtccagcccccgagtgctcgtcacgctggaccctggcgcggagccctggcatcacgactcggaggccgagactctctcctggagtcacccaggagagatggagccatctcagtgtgtggaggagctggaggatgatgtgttccaaccagaggatggggagccggtgacccaacccgggagcttgctctctgctgacctgtttgcccagagcctactggactgccccctcagccgacttcagctcttccctctcacccactgctgtggccctggccttcgacccaccagccaggaagacaaagctacccagactctcagcccagcctcccccagccaaggtgtcatgctgccttgtggggtgactgaggaaccccagcgactcttttatggcaatgctggctatcggcttcctctccctgccagtttcccagcagtcttgcccattggggagcagccccccgaagggcagtggcaacatcaagcagaggtacagattgcccgaaagcttcagtgcattgcagaccagttccaccggcttcatgtgcagcaacaccagcagaaccaaaatcgtgtgtggtggcagatcctcctcttcctgcacaaccttgctttgaatggagaagagaacaggaacggggcaggccctaggtgagggtgggctgccctcttcacatggggcaccaggaacaccgtctggaacaggaaggacatcgggcaggactgacactgtgtcttgtgaaattgtttttttgttgttattttgtgttttaattttttttaatttctctctgagtgtacatacaacatactcaagcgggaccttctttctctgtcaggcccttgacctggaatgggggcctttgtcaaacactgttgaaggagaggctgatgtgtctgtgatggtgagaattcccaagggctctgacaagtagattcttcgactgaggaatctaccagttgtcgaagatgatccgttagtgatgttctctgggaagtggactgtggtttttccagaggaactcagttaagaaatcgagagtggattagactcccagttccaccaaacctatgagccttccactgtggatgggggccgtgatcctgatggtcacattgctttaacccagcagggcttcggccaggggctttccacttgaggatagcagcttcactaggctggccggccagctccacatctgactgggttcttacttctcagccagtacctgccccatgggctcaaggattcctggccagctcctgccacctccagcagacctcagggagggttgagtttctctaaggacccctcaaacatgtcgcaaaatgaaccaaacttctggctaggcctcaaaactgacttggtcccacttggaggccccaggattggtcctgaggtacagagccactgccaccactggcggcctgggaccagctgggtgtcagccacggatgagccgaatagccagtcagcatgttgctgctggcagcctgtgcctttgtcagctcttctttcaaaagaccccaccgacagaccgcattccacccccaacatcggcactgagggacatcgggggcaagtttgcagtggggccggaaaatatggtggccaccctaccatgagagtcagccgtaggggaccccagaccccttggtttccttggaaacaacatacctcttcccccttatccccagtcctttttcatacctagtgggatacagaagaagccaggacagtggctttgccagctaagtgacttttagagtaacagataacgattagagtggggaaccgtcaaagctgggtacacatttcctatcttcctccagcttccagctaggccagaagggcatgctctggaacccagcaggatcacagctgcctgtgcacgtcttcccttctctccctgctgcggcacttatggagaggatctaaagcagccggtgtggcagctccgatagcaggcacagggaatctgttaaccagacgctagaaactaaattataacttttgcatatgtgagaaaagacaacattggtgctaacagtgaagtaaggcccaaaggaaagacggcttccctggacaaagaagacctcagggctacccaaggaaataggaggagtctagagtagactcacaaatctgaacaagcccaagtcttccagttctgaggagaggaggtcttcagtactattgaaggagacattgatcttctggatgtacagttgtgcaggttgttcactgcacaagggcacctgcagctaatggaggctggaattcagcttgtgttctgctcactaagctgtgtgcgtgccctggtgtggggctacttctcccaagaagaaggggtgcctttcctaatttgcaaaggtgccatatgggctcacagcaccctggaggagaagggcctcaaactgtgcatgtaagcctttgttttgttctgctcagatattctggatattacctcttcttggtcagaattctattctcagggtgtgtaccatgatttgtctgctaagaagacgggttcctgctttgcagagaaggagccggggaccagcttgaagactggctctgggacacactgaccattgtgaaattcagccttccctgtgggtctccataccattttatgatgtgtatgggacatacgttgttctcccctctctggatcaaggtggtgacaggcagcctgctgccgtatgcttcagtggcacacaccaaaaaaccgggattatttacagcagccactattcaccccttttggcagactctccacctgagttcagtgagagagaaaatgatttagatcttggtgctggggcaaggccatcagcttcagagaccttgccaggcccaggctgggtgccctgtggcctgagaactgagcccagactttgacaaacccacctcaacatcaagcctggggcaggtggaaggtggtctgactgcactgtctccatcttatgcaaagccaggaactcactcactgtcttaagtgagccagggcaaaatttacacccctcacgtttccctctcccttcttccccaccaacaaaacccaggaggtagctggcagagtagctgtcaggaaggagaaaggttctttctggctggttgtttttaattggcttagtgatctaaactggccccttcctcctctgcctggtgagttggcctaaacattcctcaagtctagcctcaggagacctgcccctcccccccgacctccaccccctcagactccatcccccacccccaggagcctggctgtctctagcgaggggtggagaatcagatttagagggagggagagtctgacctggatcctgacctgtaaccagctgaagacggtggaggctttgtggcttgctgagggtgggggttgggagagggactggaaaccttcctcctcgggaaagaaatgcctgggaggaagggaagcctgatattcagggtcaaaacagcccttctaattcacaaccccaaagcaggggtttctagaagttggtcaacagatctggtgagggaagtccccaggccagacgctggactcctgcaatgagggtggaggactcagcctggcctctgcctggcctgtttcaaagtctgggccactggcagccttctcttgctcaatccgaggtggaaaaagatcacctcccagtgacctccctcagcccccaggggagtaggtctgtgtccaaagctatgtggcaggcttgtttgaaggacccagaggggcccagctgacctgtctcactgctcctggcagcccagccccatcggcaggtggcccctgcctgggggttattcgggatggttcagccagggcctcccaggaagagtgctgtggagccacggtgactgtcctggacagcaaggagcatgctaccccagtgagcacttctttttgagggacttgatggggaggtggggtaggcagaagggacgtggcagaagcgggaagactttggtcaccatggctctgcaggccttctgcaaatcagtgctggcctgggctggaaacagctctgtgtgtgaaggtgaggactcttggaagcaggccatcctggccagacaccctagcaggaaggggctcacctgtcacccttaggcagcctgagggctggtggggacttttgagtcttgaggggatagcggaaaaagctgagctcataggtgcccagccagcctcccagctaaaggtgctcagagccccactgccccctctctctgtgcaggtggccagtgcccctccctgctctgggagcattgctagccttctaccccatccctggatccacaggggctatcgaggagacccagtgagaatgtagcattttgttcatccccagggtagctgccctggggtctgggcactctgcctctgggagagaggaagaagaaaggggccccattttttaaaaaactgtacagagcctttggctttatgtgtttatgttcttcacatgcatatgtgtgtatgtgtgtatatctttccccccatcaattggtacaatttttaataaaatcatttaaagcaaa

SEQ ID NO: 110971 - DNA, 4545 bp, Homo sapiens
  Payload ID: 1770
  Gene Symbol: BMF
  Gene Name: Bcl2 modifying factor
  Uniprot ID: Q96LC9
  ENST ID: ENST00000397573
  CDS Start-End: 97-651
attttcccaggtaccctgcatgcatatagctgctgattctactcctgctattgctcacaaccctcagagtcaaactttgtgaccggcctaggagagatggagccatctcagtgtgtggaggagctggaggatgatgtgttccaaccagaggatggggagccggtgacccaacccgggagcttgctctctgctgacctgtttgcccagagcctactggactgccccctcagccgacttcagctcttccctctcacccactgctgtggccctggccttcgacccaccagccaggaagacaaagctacccagactctcagcccagcctcccccagccaaggtgtcatgctgccttgtggggtgactgaggaaccccagcgactcttttatggcaatgctggctatcggcttcctctccctgccagtttcccagcagtcttgcccattggggagcagccccccgaagggcagtggcaacatcaagcagaggtacagattgcccgaaagcttcagtgcattgcagaccagttccaccggcttcatgtgcagcaacaccagcagaaccaaaatcgtgtgtggtggcagatcctcctcttcctgcacaaccttgctttgaatggagaagagaacaggaacggggcaggccctaggtgagggtgggctgccctcttcacatggggcaccaggaacaccgtctggaacaggaaggacatcgggcaggactgacactgtgtcttgtgaaattgtttttttgttgttattttgtgttttaattttttttaatttctctctgagtgtacatacaacatactcaagcgggaccttctttctctgtcaggcccttgacctggaatgggggcctttgtcaaacactgttgaaggagaggctgatgtgtctgtgatggtgagaattcccaagggctctgacaagtagattcttcgactgaggaatctaccagttgtcgaagatgatccgttagtgatgttctctgggaagtggactgtggtttttccagaggaactcagttaagaaatcgagagtggattagactcccagttccaccaaacctatgagccttccactgtggatgggggccgtgatcctgatggtcacattgctttaacccagcagggcttcggccaggggctttccacttgaggatagcagcttcactaggctggccggccagctccacatctgactgggttcttacttctcagccagtacctgccccatgggctcaaggattcctggccagctcctgccacctccagcagacctcagggagggttgagtttctctaaggacccctcaaacatgtcgcaaaatgaaccaaacttctggctaggcctcaaaactgacttggtcccacttggaggccccaggattggtcctgaggtacagagccactgccaccactggcggcctgggaccagctgggtgtcagccacggatgagccgaatagccagtcagcatgttgctgctggcagcctgtgcctttgtcagctcttctttcaaaagaccccaccgacagaccgcattccacccccaacatcggcactgagggacatcgggggcaagtttgcagtggggccggaaaatatggtggccaccctaccatgagagtcagccgtaggggaccccagaccccttggtttccttggaaacaacatacctcttcccccttatccccagtcctttttcatacctagtgggatacagaagaagccaggacagtggctttgccagctaagtgacttttagagtaacagataacgattagagtggggaaccgtcaaagctgggtacacatttcctatcttcctccagcttccagctaggccagaagggcatgctctggaacccagcaggatcacagctgcctgtgcacgtcttcccttctctccctgctgcggcacttatggagaggatctaaagcagccggtgtggcagctccgatagcaggcacagggaatctgttaaccagacgctagaaactaaattataacttttgcatatgtgagaaaagacaacattggtgctaacagtgaagtaaggcccaaaggaaagacggcttccctggacaaagaagacctcagggctacccaaggaaataggaggagtctagagtagactcacaaatctgaacaagcccaagtcttccagttctgaggagaggaggtcttcagtactattgaaggagacattgatcttctggatgtacagttgtgcaggttgttcactgcacaagggcacctgcagctaatggaggctggaattcagcttgtgttctgctcactaagctgtgtgcgtgccctggtgtggggctacttctcccaagaagaaggggtgcctttcctaatttgcaaaggtgccatatgggctcacagcaccctggaggagaagggcctcaaactgtgcatgtaagcctttgttttgttctgctcagatattctggatattacctcttcttggtcagaattctattctcagggtgtgtaccatgatttgtctgctaagaagacgggttcctgctttgcagagaaggagccggggaccagcttgaagactggctctgggacacactgaccattgtgaaattcagccttccctgtgggtctccataccattttatgatgtgtatgggacatacgttgttctcccctctctggatcaaggtggtgacaggcagcctgctgccgtatgcttcagtggcacacaccaaaaaaccgggattatttacagcagccactattcaccccttttggcagactctccacctgagttcagtgagagagaaaatgatttagatcttggtgctggggcaaggccatcagcttcagagaccttgccaggcccaggctgggtgccctgtggcctgagaactgagcccagactttgacaaacccacctcaacatcaagcctggggcaggtggaaggtggtctgactgcactgtctccatcttatgcaaagccaggaactcactcactgtcttaagtgagccagggcaaaatttacacccctcacgtttccctctcccttcttccccaccaacaaaacccaggaggtagctggcagagtagctgtcaggaaggagaaaggttctttctggctggttgtttttaattggcttagtgatctaaactggccccttcctcctctgcctggtgagttggcctaaacattcctcaagtctagcctcaggagacctgcccctcccccccgacctccaccccctcagactccatcccccacccccaggagcctggctgtctctagcgaggggtggagaatcagatttagagggagggagagtctgacctggatcctgacctgtaaccagctgaagacggtggaggctttgtggcttgctgagggtgggggttgggagagggactggaaaccttcctcctcgggaaagaaatgcctgggaggaagggaagcctgatattcagggtcaaaacagcccttctaattcacaaccccaaagcaggggtttctagaagttggtcaacagatctggtgagggaagtccccaggccagacgctggactcctgcaatgagggtggaggactcagcctggcctctgcctggcctgtttcaaagtctgggccactggcagccttctcttgctcaatccgaggtggaaaaagatcacctcccagtgacctccctcagcccccaggggagtaggtctgtgtccaaagctatgtggcaggcttgtttgaaggacccagaggggcccagctgacctgtctcactgctcctggcagcccagccccatcggcaggtggcccctgcctgggggttattcgggatggttcagccagggcctcccaggaagagtgctgtggagccacggtgactgtcctggacagcaaggagcatgctaccccagtgagcacttctttttgagggacttgatggggaggtggggtaggcagaagggacgtggcagaagcgggaagactttggtcaccatggctctgcaggccttctgcaaatcagtgctggcctgggctggaaacagctctgtgtgtgaaggtgaggactcttggaagcaggccatcctggccagacaccctagcaggaaggggctcacctgtcacccttaggcagcctgagggctggtggggacttttgagtcttgaggggatagcggaaaaagctgagctcataggtgcccagccagcctcccagctaaaggtgctcagagccccactgccccctctctctgtgcaggtggccagtgcccctccctgctctgggagcattgctagccttctaccccatccctggatccacaggggctatcgaggagacccagtgagaatgtagcattttgttcatccccagggtagctgccctggggtctgggcactctgcctctgggagagaggaagaagaaaggggccccattttttaaaaaactgtacagagcctttggctttatgtgtttatgttcttcacatgcatatgtgtgtatgtgtgtatatctttccccccatcaattggtacaatttttaataaaatcatttaaagc

SEQ ID NO: 110972 - DNA, 492 bp, Homo sapiens
  Payload ID: 1770
  Gene Symbol: BMF
  Gene Name: Bcl2 modifying factor
  Uniprot ID: Q96LC9
  ENST ID: ENST00000431415
  CDS Start-End: 1-492
atggagccatctcagtgtgtggaggagctggaggatgatgtgttccaaccagaggatggggagccggtgacccaacccgggagcttgctctctgctgacctgtttgcccagagcctactggactgccccctcagccgacttcagctcttccctctcacccactgctgtggccctggccttcgacccaccagccaggaagacaaagctacccagactctcagcccagcctcccccagccaaggtgtcatgctgccttgtggggtgactgaggaaccccagcgactcttttatggcaatgctggctatcggcttcctctccctgccagtttcccagcagtcttgcccattggggagcagccccccgaagggcagtggcaacatcaagcagagcaccagcagaaccaaaatcgtgtgtggtggcagatcctcctcttcctgcacaaccttgctttgaatggagaagagaacaggaacggggcaggccctaggtga

SEQ ID NO: 110973 - DNA, 490 bp, Homo sapiens
  Payload ID: 1770
  Gene Symbol: BMF
  Gene Name: Bcl2 modifying factor
  ENST ID: ENST00000560430
  CDS Start-End: 452-490
ggagtcgcgctgcgcacgggggcccgggaagggtttgggctgcggacgtctggggtgaccatgaagaactggggcgctggggtgagggaacggggtgcagaacccacagttgggtgcgctgctccaagagggaacttgggggtagcatttgggactcgaaggagttgggtccaggtaggcaggggaacctggggtgcactgctgagcagacctgggcgcccgagaacggcccagcctctgggtctgactttgggataggacaggagctgtggggcatcctgcctctctgcggagtctgaaggctcctctccttaacagctgggctttttccctccttcccaatcgagtctgggcgtccagcccccgagtgctcgtcacgctggaccctggcgcggagccctggcatcacgactcggaggccgagactctctcctggagtcacccaggagagatggagccatctcagtgtgtggaggagctggaggatgat

SEQ ID NO: 110974 - DNA, 747 bp, Homo sapiens
  Payload ID: 1770
  Gene Symbol: BMF
  Gene Name: Bcl2 modifying factor
  Uniprot ID: Q96LC9
  ENST ID: ENST00000561282
  CDS Start-End: 124-678
tagctgctgattctactcctgctattgctcacaaccctcagagtcaaactttgtgaccggcctaggtcagaaaacgtgatcaagaaaaagggtggttccaggcgggcccagggaagaggagagatggagccatctcagtgtgtggaggagctggaggatgatgtgttccaaccagaggatggggagccggtgacccaacccgggagcttgctctctgctgacctgtttgcccagagcctactggactgccccctcagccgacttcagctcttccctctcacccactgctgtggccctggccttcgacccaccagccaggaagacaaagctacccagactctcagcccagcctcccccagccaaggtgtcatgctgccttgtggggtgactgaggaaccccagcgactcttttatggcaatgctggctatcggcttcctctccctgccagtttcccagcagtcttgcccattggggagcagccccccgaagggcagtggcaacatcaagcagaggtacagattgcccgaaagcttcagtgcattgcagaccagttccaccggcttcatgtgcagcaacaccagcagaaccaaaatcgtgtgtggtggcagatcctcctcttcctgcacaaccttgctttgaatggagaagagaacaggaacggggcaggccctaggtgagggtgggctgccctcttcacatggggcaccaggaacaccgtctggaacaggaaggacatcgggcaggac

SEQ ID NO: 110975 - DNA, 735 bp, Homo sapiens
  Payload ID: 1770
  Gene Symbol: BMF
  Gene Name: Bcl2 modifying factor
  Uniprot ID: Q96LC9
  ENST ID: ENST00000561360
  CDS Start-End: 70-624
gctgtcctaggattgctggcttttgtttttgctgctgagcctggagctcagctcagactgagaggagagatggagccatctcagtgtgtggaggagctggaggatgatgtgttccaaccagaggatggggagccggtgacccaacccgggagcttgctctctgctgacctgtttgcccagagcctactggactgccccctcagccgacttcagctcttccctctcacccactgctgtggccctggccttcgacccaccagccaggaagacaaagctacccagactctcagcccagcctcccccagccaaggtgtcatgctgccttgtggggtgactgaggaaccccagcgactcttttatggcaatgctggctatcggcttcctctccctgccagtttcccagcagtcttgcccattggggagcagccccccgaagggcagtggcaacatcaagcagaggtacagattgcccgaaagcttcagtgcattgcagaccagttccaccggcttcatgtgcagcaacaccagcagaaccaaaatcgtgtgtggtggcagatcctcctcttcctgcacaaccttgctttgaatggagaagagaacaggaacggggcaggccctaggtgagggtgggctgccctcttcacatggggcaccaggaacaccgtctggaacaggaaggacatcgggcaggactgacactgtgtcttgtgaaattgtttttttgttgttattttg

SEQ ID NO: 110976 - DNA, 671 bp, Homo sapiens
  Payload ID: 1770
  Gene Symbol: BMF
  Gene Name: Bcl2 modifying factor
  Uniprot ID: Q96LC9
  ENST ID: ENST00000558774
  CDS Start-End: 225-614
cccgagcaggcgtattttggaaacaataccgcaccgtgcggagtggcctcctcccgccccggcctgtgcccgccgccgccgccgcccctgcctgcgcctcccgcctcctgccgcagcccgtctgggcgtccagcccccgagtgctcgtcacgctggaccctggcgcggagccctggcatcacgactcggaggccgagactctctcctggagtcacccaggagagatggagccatctcagtgtgtggaggagctggaggatgatgtgttccaaccagaggatggggagccggtgacccaacccgggagcttgctctctgctgacctgtttgcccagagcctactggactgccccctcagccgacttcagctcttccctctcacccactgctgtggccctggccttcgacccaccagccaggaagacaaagctacccagactctcagcccagcctcccccagccaaggtgtcatgctgccttgtggggtgactgaggaaccccagcgactcttttatgcaccagcagaaccaaaatcgtgtgtggtggcagatcctcctcttcctgcacaaccttgctttgaatggagaagagaacaggaacggggcaggccctaggtgagggtgggctgccctcttcacatggggcaccaggaacaccgtctggaacaggaa

SEQ ID NO: 110977 - DNA, 630 bp, Homo sapiens
  Payload ID: 1770
  Gene Symbol: BMF
  Gene Name: Bcl2 modifying factor
  Uniprot ID: Q96LC9
  ENST ID: ENST00000559701
  CDS Start-End: 241-630
attttggaaacaataccgcaccgtgcggagtggcctcctcccgccccggcctgtgcccgccgccgccgccgcccctgcctgcgcctcccgcctcctgccgcagcccgctgggctttttccctccttcccaatcgagtctgggcgtccagcccccgagtgctcgtcacgctggaccctggcgcggagccctggcatcacgactcggaggccgagactctctcctggagtcacccaggagagatggagccatctcagtgtgtggaggagctggaggatgatgtgttccaaccagaggatggggagccggtgacccaacccgggagcttgctctctgctgacctgtttgcccagagcctactggactgccccctcagccgacttcagctcttccctctcacccactgctgtggccctggccttcgacccaccagccaggaagacaaagctacccagactctcagcccagcctcccccagccaaggtgtcatgctgccttgtggggtgactgaggaaccccagcgactcttttatgcaccagcagaaccaaaatcgtgtgtggtggcagatcctcctcttcctgcacaaccttgctttgaatggagaagagaacaggaacggggcaggccctag

SEQ ID NO: 110978 - DNA, 505 bp, Homo sapiens
  Payload ID: 1770
  Gene Symbol: BMF
  Gene Name: Bcl2 modifying factor
  ENST ID: ENST00000557870
  CDS Start-End: 322-505
attttggaaacaataccgcaccgtgcggagtggcctcctcccgccccggcctgtgcccgccgccgccgccgcccctgcctgcgcctcccgcctcctgccgcagcccgctgggctttttccctccttcccaatcgagtctgggcgtccagcccccgagtgctcgtcacgctggaccctggcgcggagccctggcatcacgactcggaggccgagactctctcctggagtcacccaggtaccctgcatgcatatagctgctgattctactcctgctattgctcacaaccctcagagtcaaactttgtgaccggcctaggagagatggagccatctcagtgtgtggaggagctggaggatgatgtgttccaaccagaggatggggagccggtgacccaacccgggagcttgctctctgctgacctgtttgcccagagcctactggactgccccctcagccgacttcagctcttccctctcacccactgctgtggccctggccttcgac

SEQ ID NO: 110979 - DNA, 2336 bp, Homo sapiens
  Payload ID: 1771
  Gene Symbol: BNIPL
  Gene Name: BCL2/adenovirus E1B 19kD interacting protein like
  Uniprot ID: Q7Z465
  ENST ID: ENST00000295294
  CDS Start-End: 610-1437
gagctacaacagctgagacagaaaagaggtaaggaagtgttgggggctgggacaaccagctccccaacaactcctaggtgtttaaagaaggaggcaggaagacttgtgaagatgggaactatacaagaggcaggaaaaaagacagatgttgggtggagcaactgctacagaggtaaatatgattaactttacattccatctttcgtctgctcccaaacttaacagcaggtaatctgcttctagcaagtggtgaaggtaagagaagcatctgtataggaggcaagagatctgagtccttttgaaggcctatcctctgctctgtatctcaattactgttcttcatttcaattattcttacctactattcagttcccttgatcttttcttcttgggggctgtcttagggtcagggagattgcagaagcaccagaactaggagcagccctgagacatggggagttggagctgaaggaggaatggcaggatgaagaattccctagattgcttcctgaggaggctggcacttctgaagatcctgaagaccctaaaggagattcacaggcagctgcaggtacccccagcactttagccctgtgtggccagcgccccatgcgcaagcgtctttctgccccagagttgcggctgagtctgactaaggggcctggaaatgatggagcttcacccacccagtctgcaccttcctctcctgatggcagttctgacctggagatagacgaattggagacaccttcagactcggagcagctggacagtggacatgaatttgaatgggaagatgaactaccccgggcagagggtctgggcaccagtgagacagctgaaaggctgggccgaggttgtatgtgggatgtgactggagaagatggacatcactggagggtgttccgaatgggaccacgggagcagcgcgtagacatgactgtcattgagccctataagaaagtcctgtctcatggaggttaccacggtgatggcctcaatgctgtcatcctttttgcttcctgttatctacccagaagcagcatccccaactacacctatgtcatggaacacttgtttaggtatatggtgggaactctggagctgctagtagctgaaaattacctgcttgttcatttgagtggaggcacaagcagggcccaagttccacctctaagctggatacgtcagtgttaccgtaccctggatcggcggctacggaaaaacctgcgagccctggtggttgtccatgctacatggtatgtgaaagcatttctggcactgcttcggcccttcatcagttccaaattcacacgaaaaatccgttttctggacagcctgggggagctggcccaactcatatccctggatcaagtccacatccctgaagctgtcagacagctggaccgggatctccatggctcaggagggacatagcacaggactggataaaaggccttagaaccagttagtgatctgcctacacctgaatccctgaaacatctgaactgttttgtaaatcatcttatccccaacctcagtaccaccggatcttcacttctcagtgggattttgtcctttgcatgaccctactttcagcagggctttgaggctgggaaactgatctgctgggtgactttcattccagttgctgggacggaaggctgaatgtagggtcattttgtatgggatatgcagagctctgggtttttttgttttttgttttttgagacggagtctcgctctgtcgccaggctggagtgcagtggtgcgatctcggctcactgcaacctccgcctcccggttcaagccattcttctgcctcagcctcagcgagtagctgagactaccggcgcacgccaccacgcccagctaattgttttgtatttttagtagagacggggtttcaccatgttggccaggatggtctcgatctcttgacctcgtgatctgcccgcctcggcctcccaaagtgccgagattacaggtgtgagccaccgcgctcggccagagctctgggttttaatcctactttagctgtagaaccttgggcaaataacttcatctttttgggtcctaattttcctcctgtctaactggagggactgtgatccttccaccttggatggaagaggcttacctgacagccagcctgcctgctgggagccaggagagtcagctcattaaatcttgaagaaccgctgtatgccctttttccttctaagtcatgtctgctgcctgtgagcctgggaaggagtgctttcaaaacctgtatttttgccctctttagtaaatttagaactgtagaggctaataaactgcgatgagacatttaa

SEQ ID NO: 110980 - DNA, 1183 bp, Homo sapiens
  Payload ID: 1771
  Gene Symbol: BNIPL
  Gene Name: BCL2/adenovirus E1B 19kD interacting protein like
  ENST ID: ENST00000361277
  CDS Start-End: 1-1025
tcagggagattgcagaagcaccagaactaggagcagccctgagacatggggagttggagctgaaggaggaatggcaggatgaagaattccctagattgcttcctgaggaggctggcacttctgaagatcctgaagaccctaaaggagattcacaggcaggtacccccagcactttagccctgtgtggccagcgccccatgcgcaagcgtctttctgccccagagttgcggctgagtctgactaaggggcctggaaatgatggagcttcacccacccagtctgcaccttcctctcctgatggcagttctgacctggagatagacgaattggagacaccttcagactcggagcagctggacagtggacatgaatttgaatgggaagatgaactaccccgggcagagggtctgggcaccagtgagacagctgaaaggctgggccgaggttgtatgtgggatgtgactggagaagatggacatcactggagggtgttccgaatgggaccacgggagcagcgcgtagacatgactgtcattgagccctataagaaagtcctgtctcatggaggttaccacggtgatggcctcaatgctgtcatcctttttgcttcctgttatctacccagaagcagcatccccaactacacctatgtcatggaacacttgtttaggtatatggtgggaactctggagctgctagtagctgaaaattacctgcttgttcatttgagtggaggcacaagcagggcccaagttccacctctaagctggatacgtcagtgttaccgtaccctggatcggcggctacggaaaaacctgcgagccctggtggttgtccatgctacatggtatgtgaaagcatttctggcactgcttcggcccttcatcagttccaaattcacacgaaaaatccgttttctggacagcctgggggagctggcccaactcatatccctggatcaagtccacatccctgaagctgtcagacagctggaccgggatctccatggctcaggagggacatagcacaggactggataaaaggccttagaaccagttagtgatctgcctacacctgaatccctgaaacatctgaactgttttgtaaatcatcttatccccaacctcagtaccaccggatcttcacttctcagtgggattttgtcctttgcatgaccctactt

SEQ ID NO: 110981 - DNA, 2143 bp, Homo sapiens
  Payload ID: 1771
  Gene Symbol: BNIPL
  Gene Name: BCL2/adenovirus E1B 19kD interacting protein like
  Uniprot ID: Q7Z465
  ENST ID: ENST00000368931
  CDS Start-End: 157-1230
gaagatgaggttacctcccttccacacctccctccttggaggcaagagctacaacagctgagacagaaaagaggtaaggaagtgttgggggctgggacaaccagctccccaacaactcctaggtgtttaaagaaggaggcaggaagacttgtgaagatgggaactatacaagaggcaggaaaaaagacagatgttggggtcagggagattgcagaagcaccagaactaggagcagccctgagacatggggagttggagctgaaggaggaatggcaggatgaagaattccctagattgcttcctgaggaggctggcacttctgaagatcctgaagaccctaaaggagattcacaggcagctgcaggtacccccagcactttagccctgtgtggccagcgccccatgcgcaagcgtctttctgccccagagttgcggctgagtctgactaaggggcctggaaatgatggagcttcacccacccagtctgcaccttcctctcctgatggcagttctgacctggagatagacgaattggagacaccttcagactcggagcagctggacagtggacatgaatttgaatgggaagatgaactaccccgggcagagggtctgggcaccagtgagacagctgaaaggctgggccgaggttgtatgtgggatgtgactggagaagatggacatcactggagggtgttccgaatgggaccacgggagcagcgcgtagacatgactgtcattgagccctataagaaagtcctgtctcatggaggttaccacggtgatggcctcaatgctgtcatcctttttgcttcctgttatctacccagaagcagcatccccaactacacctatgtcatggaacacttgtttaggtatatggtgggaactctggagctgctagtagctgaaaattacctgcttgttcatttgagtggaggcacaagcagggcccaagttccacctctaagctggatacgtcagtgttaccgtaccctggatcggcggctacggaaaaacctgcgagccctggtggttgtccatgctacatggtatgtgaaagcatttctggcactgcttcggcccttcatcagttccaaattcacacgaaaaatccgttttctggacagcctgggggagctggcccaactcatatccctggatcaagtccacatccctgaagctgtcagacagctggaccgggatctccatggctcaggagggacatagcacaggactggataaaaggccttagaaccagttagtgatctgcctacacctgaatccctgaaacatctgaactgttttgtaaatcatcttatccccaacctcagtaccaccggatcttcacttctcagtgggattttgtcctttgcatgaccctactttcagcagggctttgaggctgggaaactgatctgctgggtgactttcattccagttgctgggacggaaggctgaatgtagggtcattttgtatgggatatgcagagctctgggtttttttgttttttgttttttgagacggagtctcgctctgtcgccaggctggagtgcagtggtgcgatctcggctcactgcaacctccgcctcccggttcaagccattcttctgcctcagcctcagcgagtagctgagactaccggcgcacgccaccacgcccagctaattgttttgtatttttagtagagacggggtttcaccatgttggccaggatggtctcgatctcttgacctcgtgatctgcccgcctcggcctcccaaagtgccgagattacaggtgtgagccaccgcgctcggccagagctctgggttttaatcctactttagctgtagaaccttgggcaaataacttcatctttttgggtcctaattttcctcctgtctaactggagggactgtgatccttccaccttggatggaagaggcttacctgacagccagcctgcctgctgggagccaggagagtcagctcattaaatcttgaagaaccgctgtatgccctttttccttctaagtcatgtctgctgcctgtgagcctgggaaggagtgctttcaaaacctgtatttttgccctctttagtaaatttagaactgtagaggctaataaactgcgatgagacatttaagctctgctccaaag

SEQ ID NO: 110982 - DNA, 510 bp, Homo sapiens
  Payload ID: 1771
  Gene Symbol: BNIPL
  Gene Name: BCL2/adenovirus E1B 19kD interacting protein like
  ENST ID: ENST00000392802
  CDS Start-End: 211-510
gcataggtgataaaatcatggtggggagagagaacctatatattgagtcctggcttgatgcctttggtgtatatgtctgccgccttttaatctcttcccctctagattgcttcctgaggaggctggcacttctgaagatcctgaagaccctaaaggagattcacagctgcaggtacccccagcactttagccctgtgtggccagcgccccatgcgcaagcgtctttctgccccagagttgcggctgagtctgactaaggggcctggaaatgatggagcttcacccacccagtctgcaccttcctctcctgatggcagttctgacctggagatagacgaattggagacaccttcagactcggagcagctggacagtggacatgaatttgaatgggaagatgaactaccccgggcagagggtctgggcaccagtgagacagctgaaaggctgggccgaggttgtatgtgggatgtgactggagaagatggacatcactggagggtgttccga

SEQ ID NO: 110983 - DNA, 982 bp, Homo sapiens
  Payload ID: 1771
  Gene Symbol: BNIPL
  Gene Name: BCL2/adenovirus E1B 19kD interacting protein like
  Uniprot ID: Q7Z465
  ENST ID: ENST00000485855
  CDS Start-End: 1-615
atgcgcaagcgtctttctgccccagagttgcggctgagtctgactaaggggcctggaaatgatggagcttcacccacccagtctgcaccttcctctcctgatggcagttctgacctggagatagacgaattggagacaccttcagactcggagcagctggacagtggacatgaatttgaatgggaagatgaactaccccgggcagagggtctgggcaccagtgagacagctgaaaggctgggccgaggttgtatgtgggatgtgactggagaagatggacatcactggagggtgttccgaatgggaccacgggagcagcgcgtagacatgactgtcattgagccctataagaaagtcctgtctcatggaggttaccacggtgatggcctcaatgctgtcatcctttttgcttcctgttatctacccagaagcagcatccccaactacacctatgtcatggaacacttgtttaggtatatggtgggaactctggagctgctagtagctgaaaattacctgcttgttcatttgagtggaggcacaagcagggcccaagttccacctctaagctggatacgtcagtgttaccgtaccctggatcggcgagttttataagtaatcttggtcatggagcgatgtagaagcatgcaaaaggaacttacgcgagggtagagcacaagatggaaatggagcagaaaaagaccaggtggtcgggcgcggtggctcacgtctgtaatcccagcactttggaaggccgaggctacggaaaaacctgcgagccctggtggttgtccatgctacatggtatgtgaaagcatttctggcactgcttcggcccttcatcagttccaaattcacacgaaaaatccgttttctggacagcctgggggagctggcccaactcatatccctggatcaagtccacatccctgaagctgtcagacagctggaccgggatctccatggctcaggagggacatag

SEQ ID NO: 110984 - DNA, 1339 bp, Homo sapiens
  Payload ID: 1772
  Gene Symbol: BNIP1
  Gene Name: BCL2/adenovirus E1B 19kDa interacting protein 1
  Uniprot ID: Q12981
  ENST ID: ENST00000231668
  CDS Start-End: 105-920
ctctagggggcgctgccccgagactgggtggggagggaaagaaggtggtgcgaaaacgcgtttgaacttgggtcctgccgctgcccgtagccggcgtccccaacatggcggctccccaagacgtccacgtccggatctgtaaccaagagattgtcaaatttgacctggaggtgaaggcgcttattcaggatatccgtgattgttcaggacccttaagtgctcttactgaactgaatactaaagtaaaagagaaatttcaacagttgcgtcacagaatacagccagttctctatcaaagggcatttatttggactgcttccacatttttttttaagctaacttattccctgacagacttttcttcaactcagcatgacttcaactctccaactacacctgttaccttcagtgacctggagcagttggctaaagagcaagacaaagaatcagagaaacaacttctactccaggaagtggagaatcacaaaaagcagatgctcagcaatcaggcctcatggaggaaagctaatctcacctgcaaaattgcaatcgacaatctagagaaagcagaacttcttcagggaggagatctcttaaggcaaaggaaaaccaccaaagagagcctggcccagacatccagtaccatcactgagagcctcatggggatcagcaggatgatggcccagcaggtccagcagagcgaggaggccatgcagtctctagtcacttcttcacgaacgatcctggatgcaaatgaagaatttaagtccatgtcgggcaccatccagctgggccggaagcttatcacaaaatacaatcgccgggagctgacggacaagcttctcatcttccttgcgctagccctgtttcttgctacggtcctctatattgtgaaaaagcggctctttccatttttgtgagatcccaaaggtgccagttctggccctttcagctcctgtttcaggatctgtcctggttcctgagctctaggctgctaagctgagccacacacccctccgtttgcaccagttgcctgcaggttggatggaacacagtgccccacttttctgcaagtagctggcttgtaaagggtgaacagagccatgggaggaaggtctggcattgggatgccgccctggggacatacgaaccgcctccttccaccattgtgcactatgggaggccgctgctgcgtggagcacttaaagtccagcctccaggaccggatgcccctcctgtctcccgctcccatcgtgcccttaaatgccagatctggtggagggaagagagaagaggtaggaagaaaggtgatgaaaactcctggtcattccttgaataa

SEQ ID NO: 110985 - DNA, 1143 bp, Homo sapiens
  Payload ID: 1772
  Gene Symbol: BNIP1
  Gene Name: BCL2/adenovirus E1B 19kDa interacting protein 1
  Uniprot ID: Q12981
  ENST ID: ENST00000352523
  CDS Start-End: 10-723
gtccccaacatggcggctccccaagacgtccacgtccggatctgtaaccaagagattgtcaaatttgacctggaggtgaaggcgcttattcaggatatccgtgattgttcaggacccttaagtgctcttactgaactgaatactaaagtaaaagagaaatttcaacagttgcgtcacagaatacagccagttctctatcaaagggcatttatttggactgcttccacatttttttttaagctaacttattccctgacagacttttcttcaactcagcatgacttcaactctccaactacacctgttaccttcagtgacctggagcagttggctaaagagcaagacaaagaatcagagaaacaacttctactccaggaagtggagaatcacaaaaagcagatgctcaggaaaaccaccaaagagagcctggcccagacatccagtaccatcactgagagcctcatggggatcagcaggatgatggcccagcaggtccagcagagcgaggaggccatgcagtctctagtcacttcttcacgaacgatcctggatgcaaatgaagaatttaagtccatgtcgggcaccatccagctgggccggaagcttatcacaaaatacaatcgccgggagctgacggacaagcttctcatcttccttgcgctagccctgtttcttgctacggtcctctatattgtgaaaaagcggctctttccatttttgtgagatcccaaaggtgccagttctggccctttcagctcctgtttcaggatctgtcctggttcctgagctctaggctgctaagctgagccacacacccctccgtttgcaccagttgcctgcaggttggatggaacacagtgccccacttttctgcaagtagctggcttgtaaagggtgaacagagccatgggaggaaggtctggcattgggatgccgccctggggacatacgaaccgcctccttccaccattgtgcactatgggaggccgctgctgcgtggagcacttaaagtccagcctccaggaccggatgcccctcctgtctcccgctcccatcgtgcccttaaatgccagatctggtggagggaagagagaagaggtaggaagaaaggtgatgaaaactcctggtcattccttgaataaa

SEQ ID NO: 110986 - DNA, 1184 bp, Homo sapiens
  Payload ID: 1772
  Gene Symbol: BNIP1
  Gene Name: BCL2/adenovirus E1B 19kDa interacting protein 1
  Uniprot ID: Q12981
  ENST ID: ENST00000351486
  CDS Start-End: 32-718
cctgccgctgcccgtagccggcgtccccaacatggcggctccccaagacgtccacgtccggatctgtaaccaagagattgtcaaatttgacctggaggtgaaggcgcttattcaggatatccgtgattgttcaggacccttaagtgctcttactgaactgaatactaaagtaaaagagaaatttcaacagttgcgtcacagaatacaggacctggagcagttggctaaagagcaagacaaagaatcagagaaacaacttctactccaggaagtggagaatcacaaaaagcagatgctcagcaatcaggcctcatggaggaaagctaatctcacctgcaaaattgcaatcgacaatctagagaaagcagaacttcttcagggaggagatctcttaaggcaaaggaaaaccaccaaagagagcctggcccagacatccagtaccatcactgagagcctcatggggatcagcaggatgatggcccagcaggtccagcagagcgaggaggccatgcagtctctagtcacttcttcacgaacgatcctggatgcaaatgaagaatttaagtccatgtcgggcaccatccagctgggccggaagcttatcacaaaatacaatcgccgggagctgacggacaagcttctcatcttccttgcgctagccctgtttcttgctacggtcctctatattgtgaaaaagcggctctttccatttttgtgagatcccaaaggtgccagttctggccctttcagctcctgtttcaggatctgtcctggttcctgagctctaggctgctaagctgagccacacacccctccgtttgcaccagttgcctgcaggttggatggaacacagtgccccacttttctgcaagtagctggcttgtaaagggtgaacagagccatgggaggaaggtctggcattgggatgccgccctggggacatacgaaccgcctccttccaccattgtgcactatgggaggccgctgctgcgtggagcacttaaagtccagcctccaggaccggatgcccctcctgtctcccgctcccatcgtgcccttaaatgccagatctggtggagggaagagagaagaggtaggaagaaaggtgatgaaaactcctggtcattccttgaataaacttgattttatttaatagaataaaatgtatttgattttgtaagata

SEQ ID NO: 110987 - DNA, 721 bp, Homo sapiens
  Payload ID: 1772
  Gene Symbol: BNIP1
  Gene Name: BCL2/adenovirus E1B 19kDa interacting protein 1
  Uniprot ID: Q12981
  ENST ID: ENST00000393770
  CDS Start-End: 1-585
atggcggctccccaagacgtccacgtccggatctgtaaccaagagattgtcaaatttgacctggaggtgaaggcgcttattcaggatatccgtgattgttcaggacccttaagtgctcttactgaactgaatactaaagtaaaagagaaatttcaacagttgcgtcacagaatacaggacctggagcagttggctaaagagcaagacaaagaatcagagaaacaacttctactccaggaagtggagaatcacaaaaagcagatgctcaggaaaaccaccaaagagagcctggcccagacatccagtaccatcactgagagcctcatggggatcagcaggatgatggcccagcaggtccagcagagcgaggaggccatgcagtctctagtcacttcttcacgaacgatcctggatgcaaatgaagaatttaagtccatgtcgggcaccatccagctgggccggaagcttatcacaaaatacaatcgccgggagctgacggacaagcttctcatcttccttgcgctagccctgtttcttgctacggtcctctatattgtgaaaaagcggctctttccatttttgtgagatcccaaaggtgccagttctggccctttcagctcctgtttcaggatctgtcctggttcctgagctctaggctgctaagctgagccacacacccctccgtttgcaccagttgcctgcaggttggatggaacacagt

SEQ ID NO: 110988 - DNA, 1130 bp, Homo sapiens
  Payload ID: 1772
  Gene Symbol: BNIP1
  Gene Name: BCL2/adenovirus E1B 19kDa interacting protein 1
  ENST ID: ENST00000519459
  CDS Start-End: 1-123
actgagagcctcatggggatcagcaggatgatggcccagcaggtccagcagagcgaggaggccatgcagtctctagttccttttaaaagatgtgaatcagaggctacaggagagactgcttgagaccatctggtttcctccaatagttttcccagagtgtctcctctgtgatggagaagagtatcagccctctccagggtccttcagtataagacaacagaaaaagggcgtttactccttgaaacgcttttggaaaattgcacacgtggacaaaaggagaaagcatggtatcctgaatcccctgagccctgagtccattaccccagccagtctcgtttcagttctaccctcagcccatcccccatctggattattttgaagcaaatcccagacatcatccataaatatctcagtacatctctctaaaagataagggactctttggggaaaaagcagaagcaaccccataactacaataccatgatcacccctagaaattataattttggaccactgttttttcagtgcaccaaataggcagaagcaaaaggaaagcaagcaggtgaccccaaggtcactccttgagtttgcagcttacctgaacatctgggctcggaaccagccaggggcttcctctcagcgtgtgctgtgggagaggccttggagagagagggagcaaggcgacaacttggcctctgagcccagggcttttatgctctggtgtggcgacagcataccccccgctaacagtgggaaggaaacacaaatgctggtggcttctggggtgttgagagggtcccggtgttcttggggcccattttgtacaagcgataactattgaagaaaagagaagaatacagttcttaaccctttccttatgcctcacaaattcagcttgatttaaaagcctactaggaccataattttaaaacaaaaagcttattaggaatatggtgtctggaatttgctccacaattgcaggagtagttgcagttggggggagggggagcaggatttcagaggttggtggttcttggttatgggtggtggacacatggcatttcatgatattatgctgtctgctctgtgatggttcaaaattctccgtaataataaagtttaaaaagaaa

SEQ ID NO: 110989 - DNA, 6325 bp, Homo sapiens
  Payload ID: 1773
  Gene Symbol: BNIP2
  Gene Name: BCL2/adenovirus E1B 19kDa interacting protein 2
  ENST ID: ENST00000267859
  CDS Start-End: 95-1402
agtcgacgcgacgggtccgcccacaggcaaggaaggccgaccccgcgagtgcaggcgcgagcgctagcccgtgacgtctgagggggttggggggatgctgtgtgggtttcaagaagacgccacgcctccgccgccgccacgcccccgccgcctccaccgccggctgccgcgcccggaggaggtcgggatgttatcacttccgccggggcttctcactgtgtccgggtcagctgctgccgccgacgccgtaccgctgcggccgggggattgggccggggtctccaccgccgaccgaggggagcgggctccgctcggccctgctttttgcgacctggccgtcagccccacgtcgccggcctggaggggcgaagaggacgagggggccaaggcttcctccggggacattggctccctggattatcaagagtttgtagttgacattgaatccaggctgaggatggaaggtgtggaacttaaagaagaatggcaagatgaagattttccgatacctttaccagaagatgatagtattgaagcagatatactagctataactggaccagaggaccagcctggctcactagaagttaatggaaataaagtgagaaagaaactaatggctccagacattagcctgacactggatcctagtgatggctctgtattgtcagatgatttggatgaaagtggggagattgacttagatggcttagacacaccgtcagagaatagtaatgagtttgagtgggaagatgatcttccaaaacccaagactactgaagtaattaggaaaggctcaattactgaatacacagcagcagaggaaaaagaagatggacgacgctggcgtatgttcaggattggagaacaggaccacagggttgatatgaaggcaattgaaccctataaaaaagttatcagccatgggggatattatggggatggattaaatgccattgttgtgtttgctgtctgtttcatgcctgaaagtagtcagcctaactatagatacctgatggacaatctttttaaatatgttattggcactttggagctattagtagcagaaaactacatgatagtttatttaaatggtgcaacaactcgaagaaaaatgcccagtctgggatggctcaggaaatgttatcagcaaattgatagaaggttacggaaaaatctaaaatccctaatcattgtacatccttcttggtttatcagaacacttctggctgttacaagaccatttattagctcgaaattcagccaaaaaattagatacgtgtttaatttggcagaactagcagaacttgtccccatggaatacgttggcataccagaatgcataaaacaagttgatcaagaacttaatggaaaacaagatgaaccgaaaaatgaacagtaagtttggcatctagtccaaacaagactgaagaatgtgctgatggagcagtgctgtttctgcattcataatgcatttattggcccatatttttatgtaacctgttacaaaatagacttgactttttcataatggacttttgtattatacaagggactgttcactgctgtactggtttgcaaatttcttgaatttagctctttaatagctaactgtattattatcgttttatattttatattgctaaatagagaaccacactttatataaagtagtttttgcatttgtttattgaatgatgcatcttcttcggtgaaatatttatatgcataaatggcaaaggaaagaaataatatatatttttatgtcattgagcaatattttttaatgtgtacctgtcttatggaagaaatatgcaggtatataagaccacgattttctaaagtgcatattagaatttttgtttttgtaaatggttaaatacatttcctgggtaacttaggaaattaagtttttcataaggcaacagatggttaaactgattgtcatgaatacccaaagatcatgtatataatcgaagtgtattagtaccatcccaaggtttttttctcatttaacatatttgtttcataattcagcaagtacagatgcaagcgcattgcacactttttcctttctaaacttaaagacaagtcaaaaagccattcttagaactagaggatttaagagggtaggaattagggtttgtatatatgtatatatgggacattttatcttctggcccaaagtcagaactttataaaaatcttgagtttgttcactaatgtgaaataagctatgtgtccagggtattgctcccctgagtgtatatgagtgctgagtagtattgcagagaatgtgatgagttattcactgtcacaactttttctatagaaaacaggggctgctttttaaactctcactatgggcactttaccaaaatacttccatatcaattatttgaactcggtagttgtttgacctagttagatgtggtgtttattcaagtttgtatgaaatcatgtttgacaatactgtaaattaggttaattttgtaagtcttagcatcatcatattgtgctgttttggataacacgtttgttacaagcatttaaactgtttcatttggtagtacctttacattgaaataaattgtgtttgtgcctccaaacaaaaagtttaattaccgacaaaattatttctaaaacaacagattgatctgatattgtgtcatatacttgaaaggctcatacacagctggtaagcataataccttccaaatttgaaggtcatggctactcttcaacccttcctgtaaggtattttacaaaacagtggcctagagtagcaaaattgaagtggatgtgagctaacctttcaagatttagtctatcctagattgaacacacatgtggctgtgaccattctcatgtacttacaaaccttctgttacaaaagggaactttcctatattttttgtcctcctcagtcctaaacttggcatgctaacttaaaaccagttataggagagagatgctggaggattcccaggatgaaacattcctcagcagcctcctgacttaactcagatccagcagctcttggcagatcctgaactaatgtcattacagtgaattgagccaaaacgattattgcttgctcacattttaggaacacttgttgttgaagaagcaaactaacaataacaagttaggcattccttctgaatttaccatataaggattatgtataaacaattatattgaatttgtcattagattctatatttgtagacgatttaacgtagtctttcatctgtacatctttatcttgctcaaaatgggctgaggtttttaataggtggttttctaccacattaagtacttggttcttcagtttaaaaaatatgaagaataacttcaactcttttttgcattattttgatttttgattttgcagtcattgctcctaactgtagatacatgttgcaaaagtgatgtttttctgaattttttttaaaagtagaagactattctgttaaacattaaaattcagagacaacagtgataacacctgggatataatgaaaatgaggtgctgtgaatcagtaaactaaagggatacctgctttaacctgcaccttaatggaatctggtatagagatgtacccacaataaatgttttataagatttaagatcataatagtaggttagaggaagagcatttattaagtctgttgtttctaatctatagctaagttaacatttcccatattattccattttaatttcccattactgaccaaggtgaaagtatatgtgattgtacttttatctttctgttgggatcatggatctaatttaactggcttaatttgatgcttctgtcactaggctctaagtgccccttttttagtcagaagtttttcatgtgaaataatttgattctgtgttctgcttgatcatactcctaagcaagcaccaagggaagacgttctattcaccccacaatttaagcttaacaatctttaactcagagggagatatgaagaaatatgattctaagtagggtctagcagaggcattggaaagtgataaaagtaggaagtaagagaaagcaaacctttataaagagataaagacatagttgttacctaagatgccactgtatgtgtgccctctctttttttttttttttttttggagacagagactcactctgtcacccattctggagtgcagtggcgcaatcctggctcactgcaacctctgcctcccgggttcaagcatttctcctgcctcagcctcctgagtagctgggattacaggcacacgccacaatgcccggctaatttttgtatttttagtagagacggggtttcgccatgctaggctggtctcgaactcctgacctcatgatctgcctgtctcagcctcccaaatgcttggattacaggcttgagccaccacgcccggccatgtgtgtccttttaagggaagtaccatatgtgactgctgatggtaacatttcttgtatgcagcaggaaaacctgcaggctatacgcaaggtatgtgaataaagactgtggattgaagggggaaaagttgataatacatacccatgataagaattcatattttctctttctttgtctcttcatacagaagcaagttcgagcagagaaggttagcagttacagcacttaaaagtttaggattgagggtttttggttggtttttttgttttttcatatttcactgttgctgaacattgatttagtcttccaaaatggacatcactagtaagtgcactgaatactgaaatatgctgattggcaagcatatatctgtagctagaatttttttaaccgtaattccagaatttaaaaaggtaagagatctgctttttgatagaggccttttaaaaagactatataacatttctatttggctgtttatgtgaatgctcagggaatttggacatgtgttttatacagaagtggctttttatatttcttcaagtgataaattagcattaggacatatcagatagaacaggccagtttcctgatgagattggtagagatgttacggtaggttcatccttcctttttccatgttatatgtggagaagtgttaaacttgctcaagcaaatgggagtaggagataggctgaaaatagagattgctacaccattctattttgttttcatgcctgttttttctccaatcctatatggacatttgagaaatggaccacaaatctgagagggatagagtaaaaagaggcattaatgtatgtactcacaagttagacctattttgctgttaaaataggtctggtcttgttataggtcataggaattgtgtagtttgagttgctgcgagaaagagtcaagaacttagacttgaatgggaaggccaactggtgagggaagtggggtattatctactcaaatgttctaagctaatacaaaagaattacctggcaagcatccccctctgcccttcttgaaattctgaatgaacttagaatcagatcaatggtgagacccagttatgtaactttcctttgaagttctaaaggataattgaaaataaagtagtctggcatgtttaacagtaaggagtgacactaaaatttgaatataacagtatgttgcaactatttataatagacctatttatgttttgagaactaagtaaaatgctatgaaaaattcacataaagcacgtaagcaccaaatgaaaatcatttcgtgctttcaaattaatgatactaggcttgtaggatgtcttagaatcatgtttaacaagaagttaaaatatttgcattttgaaatttttatgcagtttggctaaggaggaacttggaaaataacattcatcagcttctacactgcactttttgtatgtggactttgtaaagtttaatgtccgtttaacagttgcttgtttatttgtgtaaacctagctagtaaatattgatgatgttcagggccactgacttgcacagcccttggagcactattcacacagaacacaattcagagtttgttaagacattaacacactttgatatctattccaaaaatacttttgttaccacaggttcattgctgtcatttagacaaaattaatgtactgtgatattttcctactcttaagatgatgttgcccagccgagtactgtcagaaattcagttctgatgtctgtgtgtgcaagatattaatgtggtccctgtaagaaataccagagttggtcatgatttactaaggagatgtaatattttctttgacctgttaggaatataacttgtgtcttgatttgttgcacatcatattttttgcaacattaatgaatttaaataaattaattggaacgtt

SEQ ID NO: 110990 - DNA, 1305 bp, Homo sapiens
  Payload ID: 1773
  Gene Symbol: BNIP2
  Gene Name: BCL2/adenovirus E1B 19kDa interacting protein 2
  ENST ID: ENST00000439052
  CDS Start-End: 1-615
gaaaaagaagatggacgacgctggcgtatgttcaggattggagaacaggaccacagggttgatatgaaggcaattgaaccctataaaaaagttatcagccatgggggatattatggggatggattaaatgccattgttgtgtttgctgtctgtttcatgcctgaaagtagtcagcctaactatagatacctgatggacaatctttttaaatatgttattggcactttggagctattagtagcagaaaactacatgatagtttatttaaatggtgcaacaactcgaagaaaaatgcccagtctgggatggctcaggaaatgttatcagcaaattgatagaaggttacggaaaaatctaaaatccctaatcattgtacatccttcttggtttatcagaacacttctggctgttacaagaccatttattagctcgaaattcagccaaaaaattagatacgtgtttaatttggcagaactagcagaacttgtccccatggaatacgttggcataccagaatgcataaaacagtatgaagaagaaaagtttaaaaagaaacaaaaaagagttgatcaagaacttaatggaaaacaagatgaaccgaaaaatgaacagtaagtttggcatctagtccaaacaagactgaagaatgtgctgatggagcagtgctgtttctgcattcataatgcatttattggcccatatttttatgtaacctgttacaaaatagacttgactttttcataatggacttttgtattatacaagggactgttcactgctgtactggtttgcaaatttcttgaatttagctctttaatagctaactgtattattatcgttttatattttatattgctaaatagagaaccacactttatataaagtagtttttgcatttgtttattgaatgatgcatcttcttcggtgaaatatttatatgcataaatggcaaaggaaagaaataatatatatttttatgtcattgagcaatattttttaatgtgtacctgtcttatggaagaaatatgcaggtatataagaccacgattttctaaagtgcatattagaatttttgtttttgtaaatggttaaatacatttcctgggtaacttaggaaattaagtttttcataaggcaacagatggttaaactgattgtcatgaatacccaaagatcatgtatataatcgaagtgtattagtaccatcccaaggtttttttctcatttaacatatttgtttcataattcagcaagtacagatgcaagcgcattgcacactttttcctttctaaacttaaagacaag

SEQ ID NO: 110991 - DNA, 806 bp, Homo sapiens
  Payload ID: 1773
  Gene Symbol: BNIP2
  Gene Name: BCL2/adenovirus E1B 19kDa interacting protein 2
  ENST ID: ENST00000448414
  CDS Start-End: 1-262
agatgatagtattgaagcagatatactagctataactggaccagaggaccagcctggctcactagaagttaatggaaataaagtgagaaagaaactaatggctccagacattagcctgacactggatcctagtgatggctctgtattgtcagatgatttggatgaaagtggggagattgacttagatggcttagacacaccgtcagagaatagtaatgagtttgagtgggaagtcatttcctggaaggatattttccgttaacagctttgtcttggaaacaactaacatgcagtaggtttccccctccccccatcttttgatgatcttccaaaacccaagactactgaagtaattaggaaaggctcaattactgaatacacagcagcagaggaaaaagaagatggacgacgctggcgtatgttcaggattggagaacaggaccacagggttgatatgaaggcaattgaaccctataaaaaagttatcagccatgggggatattatggggatggattaaatgccattgttgtgtttgctgtctgtttcatgcctgaaagtagtcagcctaactatagatacctgatggacaatctttttaaatatgttattggcactttggagctattagtagcagaaaactacatgatagtttatttaaatggtgcaacaactcgaagaaaaatgcccagtctgggatggctcaggaaatgttatcagcaaattgatagaaggttacggaaaaatctaaaatccctaatcattgtacatccttcttggtttatcagaacacttctggctgttacaa

SEQ ID NO: 110992 - DNA, 1509 bp, Homo sapiens
  Payload ID: 1773
  Gene Symbol: BNIP2
  Gene Name: BCL2/adenovirus E1B 19kDa interacting protein 2
  Uniprot ID: Q12982
  ENST ID: ENST00000415213
  CDS Start-End: 67-1197
ctgtttgtatttggcagtttggccccccaccccgtcgcttttccgtttctggtagttgtgctcgggatggaaccttgcccctcctccgctcccccacccttttaccctggtgtgggtgaagtggctgggctacgatggttcagtatttatgaccagcgtccgtcctggtacagaacaaagaaacttggacttctggacattggctccctggattatcaagagtttgtagttgacattgaatccaggctgaggatggaaggtgtggaacttaaagaagaatggcaagatgaagattttccgatacctttaccagaagatgatagtattgaagcagatatactagctataactggaccagaggaccagcctggctcactagaagttaatggaaataaagtgagaaagaaactaatggctccagacattagcctgacactggatcctagtgatggctctgtattgtcagatgatttggatgaaagtggggagattgacttagatggcttagacacaccgtcagagaatagtaatgagtttgagtgggaagatgatcttccaaaacccaagactactgaagtaattaggaaaggctcaattactgaatacacagcagcagaggaaaaagaagatggacgacgctggcgtatgttcaggattggagaacaggaccacagggttgatatgaaggcaattgaaccctataaaaaagttatcagccatgggggatattatggggatggattaaatgccattgttgtgtttgctgtctgtttcatgcctgaaagtagtcagcctaactatagatacctgatggacaatctttttaaatatgttattggcactttggagctattagtagcagaaaactacatgatagtttatttaaatggtgcaacaactcgaagaaaaatgcccagtctgggatggctcaggaaatgttatcagcaaattgatagaaggttacggaaaaatctaaaatccctaatcattgtacatccttcttggtttatcagaacacttctggctgttacaagaccatttattagctcgaaattcagccaaaaaattagatacgtgtttaatttggcagaactagcagaacttgtccccatggaatacgttggcataccagaatgcataaaacaagttgatcaagaacttaatggaaaacaagatgaaccgaaaaatgaacagtaagtttggcatctagtccaaacaagactgaagaatgtgctgatggagcagtgctgtttctgcattcataatgcatttattggcccatatttttatgtaacctgttacaaaatagacttgactttttcataatggacttttgtattatacaagggactgttcactgctgtactggtttgcaaatttcttgaatttagctctttaatagctaactgtattattatcgttttatattttatattgctaaatagagaaccacactttatataaagtagtttttgcatttgtttattgaatgatgcatcttcttcggtg

SEQ ID NO: 110993 - DNA, 1851 bp, Homo sapiens
  Payload ID: 1773
  Gene Symbol: BNIP2
  Gene Name: BCL2/adenovirus E1B 19kDa interacting protein 2
  Uniprot ID: Q12982
  ENST ID: ENST00000607373
  CDS Start-End: 204-1148
tgcggccgggggattgggccggggtctccaccgccgaccgaggggagcgggctccgctcggccctgctttttgcgacctggccgtcagccccacgtcgccggcctggaggggcgaagaggacgagggggccaaggcttcctccggggacattggctccctggattatcaagagtttgtagttgacattgaatccaggctgaggatggaaggtgtggaacttaaagaagaatggcaagatgaagattttccgatacctttaccagaagatgatagtattgaagcagatatactagctataactggaccagaggaccagcctggctcactagaagttaatggaaataaagtgagaaagaaactaatggctccagacattagcctgacactggatcctagtgatggctctgtattgtcagatgatttggatgaaagtggggagattgacttagatggcttagacacaccgtcagagaatagtaatgagtttgagtgggaagatgatcttccaaaacccaagactactgaagtaattaggaaaggctcaattactgaatacacagcagcagaggaaaaagaagatggacgacgctggcgtatgttcaggattggagaacaggaccacagggttgatatgaaggcaattgaaccctataaaaaagttatcagccatgggggatattatggggatggattaaatgccattgttgtgtttgctgtctgtttcatgcctgaaagtagtcagcctaactatagatacctgatggacaatctttttaaatatgttattggcactttggagctattagtagcagaaaactacatgatagtttatttaaatggtgcaacaactcgaagaaaaatgcccagtctgggatggctcaggaaatgttatcagcaaattgatagaaggttacggaaaaatctaaaatccctaatcattgtacatccttcttggtttatcagaacacttctggctgttacaagaccatttattagctcgaaattcagccaaaaaattagatacgtgtttaatttggcagaactagcagaacttgtccccatggaatacgttggcataccagaatgcataaaacaagttgatcaagaacttaatggaaaacaagatgaaccgaaaaatgaacagtaagtttggcatctagtccaaacaagactgaagaatgtgctgatggagcagtgctgtttctgcattcataatgcatttattggcccatatttttatgtaacctgttacaaaatagacttgactttttcataatggacttttgtattatacaagggactgttcactgctgtactggtttgcaaatttcttgaatttagctctttaatagctaactgtattattatcgttttatattttatattgctaaatagagaaccacactttatataaagtagtttttgcatttgtttattgaatgatgcatcttcttcggtgaaatatttatatgcataaatggcaaaggaaagaaataatatatatttttatgtcattgagcaatattttttaatgtgtacctgtcttatggaagaaatatgcaggtatataagaccacgattttctaaagtgcatattagaatttttgtttttgtaaatggttaaatacatttcctgggtaacttaggaaattaagtttttcataaggcaacagatggttaaactgattgtcatgaatacccaaagatcatgtatataatcgaagtgtattagtaccatcccaaggtttttttctcatttaacatatttgtttcataattcagcaagtacagatgcaagcgcattgcacactttttcctttctaaacttaaagacaagtcaaaaagccatt

SEQ ID NO: 110994 - DNA, 2515 bp, Homo sapiens
  Payload ID: 1773
  Gene Symbol: BNIP2
  Gene Name: BCL2/adenovirus E1B 19kDa interacting protein 2
  ENST ID: ENST00000612191
  CDS Start-End: 4-1311
gggatgctgtgtgggtttcaagaagacgccacgcctccgccgccgccacgcccccgccgcctccaccgccggctgccgcgcccggaggaggtcgggatgttatcacttccgccggggcttctcactgtgtccgggtcagctgctgccgccgacgccgtaccgctgcggccgggggattgggccggggtctccaccgccgaccgaggggagcgggctccgctcggccctgctttttgcgacctggccgtcagccccacgtcgccggcctggaggggcgaagaggacgagggggccaaggcttcctccggggacattggctccctggattatcaagagtttgtagttgacattgaatccaggctgaggatggaaggtgtggaacttaaagaagaatggcaagatgaagattttccgatacctttaccagaagatgatagtattgaagcagatatactagctataactggaccagaggaccagcctggctcactagaagttaatggaaataaagtgagaaagaaactaatggctccagacattagcctgacactggatcctagtgatggctctgtattgtcagatgatttggatgaaagtggggagattgacttagatggcttagacacaccgtcagagaatagtaatgagtttgagtgggaagatgatcttccaaaacccaagactactgaagtaattaggaaaggctcaattactgaatacacagcagcagaggaaaaagaagatggacgacgctggcgtatgttcaggattggagaacaggaccacagggttgatatgaaggcaattgaaccctataaaaaagttatcagccatgggggatattatggggatggattaaatgccattgttgtgtttgctgtctgtttcatgcctgaaagtagtcagcctaactatagatacctgatggacaatctttttaaatatgttattggcactttggagctattagtagcagaaaactacatgatagtttatttaaatggtgcaacaactcgaagaaaaatgcccagtctgggatggctcaggaaatgttatcagcaaattgatagaaggttacggaaaaatctaaaatccctaatcattgtacatccttcttggtttatcagaacacttctggctgttacaagaccatttattagctcgaaattcagccaaaaaattagatacgtgtttaatttggcagaactagcagaacttgtccccatggaatacgttggcataccagaatgcataaaacaagttgatcaagaacttaatggaaaacaagatgaaccgaaaaatgaacagtaagtttggcatctagtccaaacaagactgaagaatgtgctgatggagcagtgctgtttctgcattcataatgcatttattggcccatatttttatgtaacctgttacaaaatagacttgactttttcataatggacttttgtattatacaagggactgttcactgctgtactggtttgcaaatttcttgaatttagctctttaatagctaactgtattattatcgttttatattttatattgctaaatagagaaccacactttatataaagtagtttttgcatttgtttattgaatgatgcatcttcttcggtgaaatatttatatgcataaatggcaaaggaaagaaataatatatatttttatgtcattgagcaatattttttaatgtgtacctgtcttatggaagaaatatgcaggtatataagaccacgattttctaaagtgcatattagaatttttgtttttgtaaatggttaaatacatttcctgggtaacttaggaaattaagtttttcataaggcaacagatggttaaactgattgtcatgaatacccaaagatcatgtatataatcgaagtgtattagtaccatcccaaggtttttttctcatttaacatatttgtttcataattcagcaagtacagatgcaagcgcattgcacactttttcctttctaaacttaaagacaagtcaaaaagccattcttagaactagaggatttaagagggtaggaattagggtttgtatatatgtatatatgggacattttatcttctggcccaaagtcagaactttataaaaatcttgagtttgttcactaatgtgaaataagctatgtgtccagggtattgctcccctgagtgtatatgagtgctgagtagtattgcagagaatgtgatgagttattcactgtcacaactttttctatagaaaacaggggctgctttttaaactctcactatgggcactttaccaaaatacttccatatcaattatttgaactcggtagttgtttgacctagttagatgtggtgtttattcaagtttgtatgaaatcatgtttgacaatactgtaaattaggttaattttgtaagtcttagcatcatcatattgtgctgttttggataacacgtttgttacaagcatttaaactgtttcatttggtagtacctttacattgaaataaattgtgtttgtgcctcc

SEQ ID NO: 110995 - DNA, 2861 bp, Homo sapiens
  Payload ID: 1774
  Gene Symbol: BNIP3
  Gene Name: BCL2/adenovirus E1B 19kDa interacting protein 3
  Uniprot ID: Q12983
  ENST ID: ENST00000368636
  CDS Start-End: 13-792
aagtcgcggccaatgggcgacgcggccgcagatccgcccggccccgccctgccctgtgagttcctccggccgggctgcggggctccgctcagtccgggagcgcagctgggccgcggcgctccgacctccgctttcccaccgcccgcagctgaagcacatcccgcagcccggcgcggactccgatcgccgcagttgccctctggcgccatgtcgcagaacggagcgcccgggatgcaggaggagagcctgcagggctcctgggtagaactgcacttcagcaataatgggaacgggggcagcgttccagcctcggtttctatttataatggagacatggaaaaaatactgctggacgcacagcatgagtctggacggagtagctccaagagctctcactgtgacagcccacctcgctcgcagacaccacaagataccaacagagcttctgaaacagatacccatagcattggagagaaaaacagctcacagtctgaggaagatgatattgaaagaaggaaagaagttgaaagcatcttgaagaaaaactcagattggatatgggattggtcaagtcggccggaaaatattccccccaaggagttcctctttaaacacccgaagcgcacggccaccctcagcatgaggaacacgagcgtcatgaagaaagggggcatattctctgcagaatttctgaaagttttccttccatctctgctgctctctcatttgctggccatcggattggggatctatattggaaggcgtctgacaacctccaccagcaccttttgatgaagaactggagtctgacttggttcgttagtggattacttctgagcttgcaacatagctcactgaagagctgttagatcctggggtggccacgtcacttgtgtttatttgttctgtaaatgctgcgttcctaatttagtaaaataaaagaatagacactaaaatcatgttgatctataattacacctatgggatcaataagcatgtcagactgattaatgtctactgtgaaaatttggtagtaaattttcatttgatattagatataaatatctgaatataaataattttaatatactagtcatgatgtgtgttgtattttaaaaattatctgcaaccttaattcagctgaagtactttatatttcaaaagaatgaataacattgataataaaatcgctactttaaggggtttgtccaaaataaatattgtggccttatatatcacactattgtagaaagtattatttaatttaaatggatgcaggttgtctactaaagaaagattatatataactatgctaattgttcataatcaacagaaaccaagatagagctacaaactcagctgtacagttcgtacactaaactcttcttgcttttgcattataaggaattaagtctccgattattaggtgatcaccctggatgatcagttttctgctgaaggcacctactcagtatcttttcctctttatcactctgcattggtgaatttaatcctctcctttgtgttcaacttttgtgtgcttttaaaatcagctttattctaagcaaatctgtgtctactttaaaaaactggaaatggaaaaaaaaataaatctttgccaaatccttcagattactgtatttacatatggtttaaaatcagacgtcatgatagcttcttaatgaaaccaggactggtccctattttgacattatctttcctacagcaaactttttagaaaggctgcctgccgccttgatgtttcacctttccacgcttaattcgggtgttaaatctaacgttttcatttgtaaaaatctttgttgatgctaccttggaagcagtcatctctcagtcttacatttggagaatgtggatggcatgacatcagaattcctttatataatttaacttcagaatagtctgagatcatcgaagcacgatggtcaagggaattccgtttttgttttagagcaaatatgtttgctgtttgtctttcatcacaaacatcagtggagtttcagcaccttacagagctcagtgaaccccctggtcaccatcaaagttagcacacaacaaagccaaccacgtgtccccctcacagatgacaatggctgaactctgagtgaaaccacctgtatggccgggcacagtggctcacgcctgtaatcccagcactttgggaggttgaggtgggtggatcacctgaagtcagaagattggcctggccaacatgatgaaaccccgtctctaataaaaatgcaaaaattagctgggcgcagtggcacgtgcctgtaatcccagctacttgggaggctgaggcaggagaaccgctggaacccagaaggcagaggttgcagtgagtggagatcatgccactgcactccagcctgggagggagaacgagactccatctcaaaaaaaaaaaaaaaaacaaccagttggaggtactaagctctgggactgggccagtgtgatggctccacacctgtaatctcaacactttgggaggctgaggtaggaggatcacaagtccagaagttcgagaccagcctgggggagcatagcaagaccctgtctctacacaaaatacaaaaattagcctcgtgtggtggcacacacctgtagccccagctacttggtagactgaggcaggaggatcccttgagcccaggagttcaaggctgcagtgagccaggatagtgcacacggcctgagcaagagcaagaccctgtttcagaaaaaacaactctgggactggagtgctttagacagatgggagaccaagaatcaagttttctggaggtgtttttcgttagattgtaacattagacattttattaaaaatgaaacaagtttga

SEQ ID NO: 110996 - DNA, 3066 bp, Homo sapiens
  Payload ID: 1774
  Gene Symbol: BNIP3
  Gene Name: BCL2/adenovirus E1B 19kDa interacting protein 3
  ENST ID: ENST00000540159
  CDS Start-End: 1-660
agtccgggagcgcagctgggccgcggcgctccgacctccgctttcccaccgcccgcagctgaagcacatcccgcagcccggcgcggactccgatcgccgcagttgccctctggcgccatgtcgcagaacggagcgcccgggatgcaggaggagagcctgcagggctcctgggtagaactgcacttcagcaataatgggaacgggggcagcgttccagcctcggtttctatttataatggagacatggaaaaaatactgctggacgcacagcatgagtctggacggagtagctccaagagctctcactgtgacagcccacctcgctcgcagacaccacaagataccaacagagcttctgaaacagatacccatagcattggagagaaaaacagctcacagtctgaggaagatgatattgaaagaaggaaagaagttgaaagcatcttgaagaaaaactcagattggatatgggattggtcaagtcggccggaaaatattccccccaaggagttcctctttaaacacccgaagcgcacggccaccctcagcatgaggaacacgagcgtcatgaagaaagggggcatattctctgcagaatttctgaaagttttccttccatctctgctgctctctcatttgctggccatcggattggggtaggtgatgtgactgtgtgactcctgtcatggcatgtcgtggggcgattctgggttgcagtgatttattcgtaacctgtttcctgaagtccagatcatcagttacagcttggtgcattttcacaaacacccacgtagtcactgttcaggtccagaaaccaccagcctgcagcccccaaaggccccagcacaggcgccctgtggtgctgctgtctggcctgacgagtctgcctgttgctcactgaatataaacggagtcaaagcagggcttcttaggtctgacctctttgtcctgtgtgtaggtgaaagcagtctcatttctgtgtagtactgtggcgggaatgcacccagctctgctgtaggtggagggtctcagttacctgctgtacttcctccagacaggactgttgttctagtaactctcagcaatgaaggaaccaatgcagtctccgactttactggcttgagtttcgctcttgttgcccaggctgagtgcaggggcgtgatctcggctcactgcagcctctgcctcctgggttcaagcgactctcctgcctcagcctcctgggtagctgggattacaggtgcccaccaccaggcctggctaatttttgtatttttaatagagacggggcttcgccacgttgcccaggctgatctcgaactcaagggatggctcacctcggcctccaaagtgctgggattacaggcgtgagccaccgcgcctggcctttcctggctgcttatactcactcaccctgcagaaaacacagagaccaggcaggcgccgctgtgggttctgaagagcgttcgccgcagcggtggtgaagagccagagcgggaagccaaaacggctcctcctcgggctggtcccagcctctcagcggggaggagggctctagtcctggcgtgcagacagtgttctgtggctgccgtgtgttggacagactggaaagaccggaatgccactgggggcaggtgggttaggtaggttggccagagggctcacatctggggttgaaggaaacgggataaaagccactgagtttcctgggccgggacctgagcgctgcccgtgtctccacctcgccctcccgtgtgcgtggctttctcctagctcttgggcacattctcacgtcccccccataacccgtcaccttcatttctgctggtgcttttgggagtcagacctacagactgcatcagcatcaccaggcagtttgctttctggagccttttccagaactgtcaagcagactctgggggcaaggcctcgggatcctcattttaaatacaaggtttaagcccttcgtttcaggatggatttctgcagccactacttcccagctactgtccttcgtcctgcccgggttttcagagcctgatgctgccactggcgacccacaccccctcagctgcttttcagaaccacacgataaaatctgccccgaaagctgctgcagcactgtctgcgctcacagtgcccaccacaccaccgcccacaggccaggccagccaggcttccgattctgccctttcctggagacccatcctcctccctccgggagtgatgcccgctggtcagctggagcgagcctctctattgccgaaaagccttttctgacactcctgcatctttagtttgggacatctctcccactaccaaacttaaaccacatgagggcaggggcttcatttttaagcagttggctttggtgaggctggtggtgatgaactagcaacaccatcttgccctggtaggtgacttcccccagcactgagttggaacaaagcagaagctttctgtgtggaaacagcattcggtttggtgatccttctatgtaagaatacgatctgatgttttctaagttaattaatacaaaatacatattgataaaacactagataaaagatcacagatagattcattacaaaatttttataatgggtataaaatcaccagtccccttgcataagctctaaccacagtgagctaccctgtttcagctgtaacacagtctcctgtgaatcacaagatacattaactactgataatttttctgtgaaggatctatattggaaggcgtctgacaacctccaccagcaccttttgatgaagaactggagtctgacttggttcgttagtggattacttctgagcttgcaacatagctcactgaagagctgttagatcctggggtggccacgtcacttgtgtttatttgttctgtaaatgctgcgttcctaatttagtaaaataaaagaatagacactaaaatcatgttgatctataattacacctatgggatcaataagcatgtcagactgattaatgtctactgtgaaaatttggtagtaaattttcatttgatattagatataaatatctgaatataaataattttaatat

SEQ ID NO: 110997 - DNA, 1062 bp, Homo sapiens
  Payload ID: 1774
  Gene Symbol: BNIP3
  Gene Name: BCL2/adenovirus E1B 19kDa interacting protein 3
  ENST ID: ENST00000633835
  CDS Start-End: 1-731
ccctgccctgtgagttcctccggccgggctgcggggctccgctcagtccgggagcgcagctgggccgcggcgctccgacctccgctttcccaccgcccgcagctgaagcacatcccgcagcccggcgcggactccgatcgccgcagttgccctctggcgccatgtcgcagaacggagcgcccgggatgcaggaggagagcctgcagggctcctgggtagaactgcacttcagcaataatgggaacgggggcagcgttccagcctcggtttctatttataatggagacatggaaaaaatactgctggacgcacagcatgagtctggacggagtagctccaagagctctcactgtgacagcccacctcgctcgcagacaccacaagataccaacagagcttctgaaacagatacccatagcattggagagaaaaacagctcacagtctgaggaagatgatattgaaagaaggaaagaagttgaaagcatcttgaagaaaaactcagattggatatgggattggtcaagtcggccggaaaatattccccccaaggagttcctctttaaacacccgaagcgcacggccaccctcagcatgaggaacacgagcgtcatgaagaaagggggcatattctctgcagaatttctgaaagttttccttccatctctgctgctctctcatttgctggccatcggattgggagacggggcttcgccacgttgcccaggctgatctcgaactcaagggatggctcacctcggcctccaaagtgctgggattacaggcgtgagccaccgcgcctggcctttcctggctgcttatactcactcaccctgcagaaaacacagagaccaggcaggcgccgctgtgggttctgaagagcgttcgccgcagcggtggtgaagagccagagcgggaagccaaaacggctcctcctcgggctggtcccagcctctcagcggggaggagggctctagtcctggcgtgcagacagtgttctgtggctgccgtgtgttggacagactggaaagaccggaatgccactgggggcaggtgggttagg

SEQ ID NO: 110998 - DNA, 3610 bp, Homo sapiens
  Payload ID: 1775
  Gene Symbol: BNIP3L
  Gene Name: BCL2/adenovirus E1B 19kDa interacting protein 3-like
  Uniprot ID: O60238
  ENST ID: ENST00000380629
  CDS Start-End: 234-893
gcgcgtcagcctgactcgagcgtctccacgtccggggcccgcaggggagcgcccctgccccgtccggtcgcttgttgtgttgtcatcacgtggcctgggcgggccctgacgtcaggggcaggggagggacggcgcaggcgcagaaaagggggcggcggactcggcttgttgtgttgctgcctgagtgccggagacggtcctgctgctgccgcagtcctgccagctgtccgacaatgtcgtcccacctagtcgagccgccgccgcccctgcacaacaacaacaacaactgcgaggaaaatgagcagtctctgcccccgccggccggcctcaacagttcctgggtggagctacccatgaacagcagcaatggcaatgataatggcaatgggaaaaatggggggctggaacacgtaccatcctcatcctccatccacaatggagacatggagaagattcttttggatgcacaacatgaatcaggacagagtagttccagaggcagttctcactgtgacagcccttcgccacaagaagatgggcagatcatgtttgatgtggaaatgcacaccagcagggaccatagctctcagtcagaagaagaagttgtagaaggagagaaggaagtcgaggctttgaagaaaagtgcggactgggtatcagactggtccagtagacccgaaaacattccacccaaggagttccacttcagacaccctaaacgttctgtgtctttaagcatgaggaaaagtggagccatgaagaaagggggtattttctccgcagaatttctgaaggtgttcattccatctctcttcctttctcatgttttggctttggggctaggcatctatattggaaagcgactgagcacaccctctgccagcacctactgagggaaaggaaaagcccctggaaatgcgtgtgacctgtgaagtggtgtattgtcacagtagcttatttgaacttgagaccattgtaagcatgacccaacctaccaccctgtttttacatatccaattccagtaactctcaaattcaatattttattcaaactctgttgaggcattttactaaccttataccctttttggcctgaagacattttagaatttcctaacagagtttactgttgtttagaaatttgcaagggcttcttttccgcaaatgccaccagcagattataattttgtcagcaatgctattatctctaattagtgccaccagactagacctgtatcattcatggtataaattttactcttgcaacataactaccatctctctcttaaaacgagatcaggttagcaaatgatgtaaaagaagctttattgtctagttgttttttttcccccaagacaaaggcaagtttccctaagtttgagttgatagttattaaaaagaaaacaaaacaaaaaaaaaaggcaaggcacaacaaaaaaatatcctgggcaataaaaaaaatattttaaaccagctttggagccacttttttgtctaagcctcctaatagcgtcttttaatttataggaggcaaactgtataaatgataggtatgaaatagaataagaagtaaaatacatcagcagattttcatactagtatgttgtaatgctgtcttttctatggtgtagaatctttctttctgataaggaacgtctcaggcttagaaatatatgaaattgctttttgagatttttgcgtgtgtgtttgatattttttacgataattagctgcatgtgaatttttcatgaccttctttacattttttattttttatttctttatttttttttctctaagaagaggctttggaatgagttccaatttgtgatgttaatacaggcttcttgttttaggaagcatcacctatactctgaagcctttaaactctgaagagaattgtttcagagttattccaagcacttgtgcaacttggaaaaacagacttgggttgtgggaacagttgacagcgttctgaaaagatgccatttgtttccttctgatctctcactgaataatgtttactgtacagtcttcccaaggtgattcctgcgactgcaggcactggtcattttctcatgtagctgtcttttcagttatggtaaactcttaaagttcagaacactcaacagattccttcagtgatatacttgttcgttcatttctaaaatgtgaagctttaggaccaaattgttagaaagcatcaggatgaccagttatctcgagtagattttcttggatttcagaacatctagcatgactctgaaggataccacatgttttatatataaataattactgtttatgatatagacattgatattgactatttagagaaccgttgttaattttaaaactagcaatctataaagtgcaccaggtcaacttgaataaaaacactatgacagacaggtttgccagtttgcagaaactaactcttttctcacatcaacatttgtaaaattgatgtgttatagtggaaaataacatatagattaaacaaaatttttatcttttttcaagaatatagctggctatctttaagaaagatgatatatcctagttttgaaagtaattttcttttttctttctagcatttgatgtctaaataattttggacatctttttcctagaccatgtttctgtcttactcttaaacctggtaacacttgatttgccttctataacctatttatttcaagtgttcatatttgaatttctttgggaagaaagtaaatctgatggctcactgatttttgaaaagcctgaataaaattggaaagactggaaagttaggagaactgactagctaaactgctacagtatgcaatttctattacaattggtattacaggggggaaaagtaaaattacactttacctgaaagtgacttcttacagctagtgcattgtgctctttccaagttcagcagcagttctatcagtggtgccactgaaactgggtatatttatgatttctttcagcgttaaaaagaaacatagtgttgccctttttcttaaagcatcagtgaaattatggaaaattacttaaaacgtgaatacatcatcacagtagaatttattatgagagcatgtagtatgtatctgtagccctaacacatgggatgaacgttttactgctacacccagatttgtgttgaacgaaaacattgtggtttggaaaggagaattcaacaattaatagttgaaattgtgaggttaatgtttaaaaagctttacacctgtttacaatttggggacaaaaaggcaggcttcatttttcatatgtttgatgaaaactggctcaagatgtttgtaaatagaatcaagagcaaaactgcacaaacttgcacattggaaagtgcaacaagttcccgtgattgcagtaaaaatatttactattctaaaaaaatgagaattgaagacttagccagtcagataagttttttcatgaacccgttgtggaaattattggaattaactgagccaaagtgattatgcattcttcatctattttagttagcactttgtatcgttatatacagtttacaatacatgtataacttgtagctataaacattttgtgccattaaagctctcacaaaactttt

SEQ ID NO: 110999 - DNA, 739 bp, Homo sapiens
  Payload ID: 1775
  Gene Symbol: BNIP3L
  Gene Name: BCL2/adenovirus E1B 19kDa interacting protein 3-like
  Uniprot ID: O60238
  ENST ID: ENST00000520409
  CDS Start-End: 103-642
ctctgttgcctcctggggtcttgggcccggggccgtttgggctcgcggtccgggagcggcgcgggtagcgcggatccccctggttcctgggtggagctacccatgaacagcagcaatggcaatgataatggcaatgggaaaaatggggggctggaacacgtaccatcctcatcctccatccacaatggagacatggagaagattcttttggatgcacaacatgaatcaggacagagtagttccagaggcagttctcactgtgacagcccttcgccacaagaagatgggcagatcatgtttgatgtggaaatgcacaccagcagggaccatagctctcagtcagaagaagaagttgtagaaggagagaaggaagtcgaggctttgaagaaaagtgcggactgggtatcagactggtccagtagacccgaaaacattccacccaaggagttccacttcagacaccctaaacgttctgtgtctttaagcatgaggaaaagtggagccatgaagaaagggggtattttctccgcagaatttctgaaggtgttcattccatctctcttcctttctcatgttttggctttggggctaggcatctatattggaaagcgactgagcacaccctctgccagcacctactgagggaaaggaaaagcccctggaaatgcgtgtgacctgtgaagtggtgtattgtcacagtagcttatttgaacttgagaccattgtaagcatgacccaa

SEQ ID NO: 111000 - DNA, 922 bp, Homo sapiens
  Payload ID: 1775
  Gene Symbol: BNIP3L
  Gene Name: BCL2/adenovirus E1B 19kDa interacting protein 3-like
  ENST ID: ENST00000520077
  CDS Start-End: 78-260
ggactcggcttgttgtgttgctgcctgagtgccggagacggtcctgctgctgccgcagtcctgccagctgtccgacaatgtcgtcccacctagtcgagccgccgccgcccctgcacaacaacaacaacaactgcgaggaaaatgagcagtctctgcccccgccggccggcctcaacatcagaagaagaagttgtagaaggagagaaggaagtcgaggctttgaagaaaagtgcggactgggtatcagactggtccagtagacccgaaaacattccacccaaggagttccacttcagacaccctaaacgttctgtgtctttaagcatgaggaaaagtggagccatgaagaaagggggtattttctccgcagaatttctgaaggtgttcattccatctctcttcctttctcatgttttggctttggggctaggcatctatattggaaagcgactgagcacaccctctgccagcacctactgagggaaaggaaaagcccctggaaatgcgtgtgacctgtgaagtggtgtattgtcacagtagcttatttgaacttgagaccattgtaagcatgacccaacctaccaccctgtttttacatatccaattccagtaactctcaaattcaatattttattcaaactctgttgaggcattttactaaccttataccctttttggcctgaagacattttagaatttcctaacagagtttactgttgtttagaaatttgcaagggcttcttttccgcaaatgccaccagcagattataattttgtcagcaatgctattatctctaattagtgccaccagactagacctgtatcattcatggtataaattttactcttgcaacataactaccatctctctcttaaaacgagatcaggttagcaaatgatgtaaaagaagctttattgtcta

SEQ ID NO: 111001 - DNA, 875 bp, Homo sapiens
  Payload ID: 1775
  Gene Symbol: BNIP3L
  Gene Name: BCL2/adenovirus E1B 19kDa interacting protein 3-like
  ENST ID: ENST00000523949
  CDS Start-End: 1-558
gagcagtctctgcccccgccggccggcctcaacagttcctgggtggagctacccatgaacagcagcaatggcaatgataatggcaatgggaaaaatggggggctggaacacgtaccatcctcatcctccatccacaatggagacatggagaagattcttttggatgcacaacatgaatcaggacagagtagttccagaggcagttctcactgtgacagcccttcgccacaagaagatgggcagatcatgtttgatgtggaaatgcacaccagcagggaccatagctctcagtcagaagaagaagttgtagaaggagagaaggaagtcgaggctttgaagaaaagtgcggactgggtatcagactggtccagtagacccgaaaacattccacccaaggagttccacttcagacaccctaaacgttctgtgtctttaagcatgaggaaaagtggagccatgaagaaagggggtattttctccgcagaatttctgaaggtgttcattccatctctcttcctttctcatgttttggctttggggctaggatgtggaaactgatgtctagagaagctaagcaatttgcttacagtatgcacaaatctaccacaagactacacatcaactgtgttggagatttgcctagcacatataactaaatggtgctcatctgcactgcactcacacacttacgtgatacacaggtctgatctaaatacacaggtctgatctacacaaccatgtggtgctaccgcttttaaaatctgtgaacaattaaaagaagtttggatacgtacacagataccataaaggaaactttgctctaaggtctgcacaaaatgagccaatctgaaaataaaagtaaacctggtggtgaa

SEQ ID NO: 111002 - DNA, 915 bp, Homo sapiens
  Payload ID: 1775
  Gene Symbol: BNIP3L
  Gene Name: BCL2/adenovirus E1B 19kDa interacting protein 3-like
  Uniprot ID: O60238
  ENST ID: ENST00000523515
  CDS Start-End: 122-661
ctgtcaagaggaggggcgcctgccttgctccgggcctctctgttgcctcctggggtcttgggcccggggccgtttgggctcgcggtccgggagcggcgcgggttcctgggtggagctacccatgaacagcagcaatggcaatgataatggcaatgggaaaaatggggggctggaacacgtaccatcctcatcctccatccacaatggagacatggagaagattcttttggatgcacaacatgaatcaggacagagtagttccagaggcagttctcactgtgacagcccttcgccacaagaagatgggcagatcatgtttgatgtggaaatgcacaccagcagggaccatagctctcagtcagaagaagaagttgtagaaggagagaaggaagtcgaggctttgaagaaaagtgcggactgggtatcagactggtccagtagacccgaaaacattccacccaaggagttccacttcagacaccctaaacgttctgtgtctttaagcatgaggaaaagtggagccatgaagaaagggggtattttctccgcagaatttctgaaggtgttcattccatctctcttcctttctcatgttttggctttggggctaggcatctatattggaaagcgactgagcacaccctctgccagcacctactgagggaaaggaaaagcccctggaaatgcgtgtgacctgtgaagtggtgtattgtcacagtagcttatttgaacttgagaccattgtaagcatgacccaacctaccaccctgtttttacatatccaattccagtaactctcaaattcaatattttattcaaactctgttgaggcattttactaaccttataccctttttggcctgaagacattttagaatttcctaacagagtttactgttgtttagaaatttgcaa

SEQ ID NO: 111003 - DNA, 1352 bp, Homo sapiens
  Payload ID: 1775
  Gene Symbol: BNIP3L
  Gene Name: BCL2/adenovirus E1B 19kDa interacting protein 3-like
  Uniprot ID: O60238
  ENST ID: ENST00000518611
  CDS Start-End: 177-716
gtggctccaccccttcaactttttgtccaagaaaacttttcgtgtttgcctgtagctgatgtgcagttgtttctgctcccaaatcaacagggtttaatgaaaaccctagaaagtagaaacccgtgggagagaaaagaaaaaagacaagttcacaaggttcctgggtggagctacccatgaacagcagcaatggcaatgataatggcaatgggaaaaatggggggctggaacacgtaccatcctcatcctccatccacaatggagacatggagaagattcttttggatgcacaacatgaatcaggacagagtagttccagaggcagttctcactgtgacagcccttcgccacaagaagatgggcagatcatgtttgatgtggaaatgcacaccagcagggaccatagctctcagtcagaagaagaagttgtagaaggagagaaggaagtcgaggctttgaagaaaagtgcggactgggtatcagactggtccagtagacccgaaaacattccacccaaggagttccacttcagacaccctaaacgttctgtgtctttaagcatgaggaaaagtggagccatgaagaaagggggtattttctccgcagaatttctgaaggtgttcattccatctctcttcctttctcatgttttggctttggggctaggcatctatattggaaagcgactgagcacaccctctgccagcacctactgagggaaaggaaaagcccctggaaatgcgtgtgacctgtgaagtggtgtattgtcacagtagcttatttgaacttgagaccattgtaagcatgacccaacctaccaccctgtttttacatatccaattccagtaactctcaaattcaatattttattcaaactctgttgaggcattttactaaccttataccctttttggcctgaagacattttagaatttcctaacagagtttactgttgtttagaaatttgcaagggcttcttttccgcaaatgccaccagcagattataattttgtcagcaatgctattatctctaattagtgccaccagactagacctgtatcattcatggtataaattttactcttgcaacataactaccatctctctcttaaaacgagatcaggttagcaaatgatgtaaaagaagctttattgtctagttgttttttttcccccaagacaaaggcaagtttccctaagtttgagttgatagttattaaaaagaaaacaaaacaaaaaaaaaaggcaaggcacaacaaaaaaatatcctgggcaataaaaaaaatattttaaaccagctttggagccacttttttgtctaagcctcctaatagcgtcttttaatttatagga

SEQ ID NO: 111004 - DNA, 1234 bp, Homo sapiens
  Payload ID: 1775
  Gene Symbol: BNIP3L
  Gene Name: BCL2/adenovirus E1B 19kDa interacting protein 3-like
  ENST ID: ENST00000620910
  CDS Start-End: 78-767
ggactcggcttgttgtgttgctgcctgagtgccggagacggtcctgctgctgccgcagtcctgccagctgtccgacaatgtcgtcccacctagtcgagccgccgccgcccctgcacaacaacaacaacaactgcgaggaaaatgagcagtctctgcccccgccggccggcctcaacagttcctgggtggagctacccatgaacagcagcaatggcaatgataatggcaatgggaaaaatggggggctggaacacgtaccatcctcatcctccatccacaatggagacatggagaagattcttttggatgcacaacatgaatcaggacagagtagttccagaggcagttctcactgtgacagcccttcgccacaagaagatgggcagatcatgtttgatgtggaaatgcacaccagcagggaccatagctctcagtcagaagaagaagttgtagaaggagagaaggaagtcgaggctttgaagaaaagtgcggactgggtatcagactggtccagtagacccgaaaacattccacccaaggagttccacttcagacaccctaaacgttctgtgtctttaagcatgaggaaaagtggagccatgaagaaagggggtattttctccgcagaatttctgaaggtgttcattccatctctcttcctttctcatgttttggctttggggctaggcatctatattggaaagcgactgagcacaccctgccagcacctactgagggaaaggaaaagcccctggaaatgcgtgtgacctgtgaagtggtgtattgtcacagtagcttatttgaacttgagaccattgtaagcatgacccaacctaccaccctgtttttacatatccaattccagtaactctcaaattcaatattttattcaaactctgttgaggcattttactaaccttataccctttttggcctgaagacattttagaatttcctaacagagtttactgttgtttagaaatttgcaagggcttcttttccgcaaatgccaccagcagattataattttgtcagcaatgctattatctctaattagtgccaccagactagacctgtatcattcatggtataaattttactcttgcaacataactaccatctctctcttaaaacgagatcaggttagcaaatgatgtaaaagaagctttattgtctagttgttttttttcccccaagacaaaggcaagtttccctaagtttgagttgatagtta

SEQ ID NO: 111005 - DNA, 2132 bp, Homo sapiens
  Payload ID: 1776
  Gene Symbol: BAK1
  Gene Name: BCL2-antagonist/killer 1
  ENST ID: ENST00000360661
  CDS Start-End: 301-876
gtctgcatccggtggccacagagcaacttcctctagagggagctgattggagccgggtgccgctggcacctctatgatcactggagtctcgcgggtccctcgggctgcacagggacaagtaaaggctacatccagatgccgggaatgcactgacgcccattcctggaaactgggctcccactcagcccctgggagcagcagccgccagcccctcgggacctccatctccaccctgctgagccacccgggttgggccaggatcccggcaggctgatcccgtcctccactgagacctgaaaaatggcttcggggcaaggcccaggtcctcccaggcaggagtgcggagagcctgccctgccctctgcttctgaggagcaggtagcccaggacacagaggaggttttccgcagctacgttttttaccgccatcagcagcaacctagcagcaccatggggcaggtgggacggcagctcgccatcatcggggacgacatcaaccgacgctatgactcagagttccagaccatgttgcagcacctgcagcccacggcagagaatgcctatgagtacttcaccaagattgccaccagcctgtttgagagtggcatcaattggggccgtgtggtggctcttctgggcttcggctaccgtctggccctacacgtctaccagcatggcctgactggcttcctaggccaggtgacccgcttcgtggtcgacttcatgctgcatcactgcattgcccggtggattgcacagaggggtggctgggtggcagccctgaacttgggcaatggtcccatcctgaacgtgctggtggttctgggtgtggttctgttgggccagtttgtggtacgaagattcttcaaatcatgactcccaagggtgccctttggggtcccggttcagacccctgcctggacttaagcgaagtctttgccttctctgttcccttgcaggggtcccccctcaagagtacagaagctttagcaagtgtgcactccagcttcggagggcccctgcgtgggggccagtcaggctgcagaggcacctcaacattgcatggtgctagtgggccctctctctgggcccaggggctgtggccgtctcctccctcagctctctgggacctccttagccctgtctgctaggcgctggggagactgataacttggggaggcaagagactgggagccacttctccccagaaagtgtttaacggttttagctttttataatacccttgtgagagcccattcccaccattctacctgaggccaggacgtctggggtgtggggattggtgggtctatgttccccaggattcagctattctggaagatcagcaccctaagagatgggactaggacctgagcctggtcctggccgtccctaagcatgtgtcccaggagcaggacctactaggagaggggggccaaggtcctgctcaactctacccctgctcccattcctccctccggccatactgcctttgcagttggactctcagggattctgggcttggggtgtggggtggggtggagtcgcagaccagagctgtctgaactcacgtgtcagaagcctccaagcctgcctcccaaggtcctctcagttctctcccttcctctctccttatagacacttgctcccaacccattcactacaggtgaaggctctcacccccatccctgggggccttgggtgagtggcctgctaaggctcctccttgcccagactacagggcttaggacttggtttgttatatcagggaaaaggagtagggagttcatctggagggttctaagtgggagaaggactatcaacaccactaggaatcccagaggtgggatcctccctcatggctctggcacagtgtaatccaggggtgtagatgggggaactgtgaatacttgaactctgttcccccaccctccatgctcctcacctgtctaggtctcctcagggtggggggtgacagtgccttctctattgggcacagcctagggtcttgggggtcaggggggagaagttcttgattcagccaaatgcagggaggggaggcagatggagcccataggccaccccctatcctctgagtgtttggaaataaactgtgcaatcccctcaccctg

SEQ ID NO: 111006 - DNA, 2136 bp, Homo sapiens
  Payload ID: 1776
  Gene Symbol: BAK1
  Gene Name: BCL2-antagonist/killer 1
  Uniprot ID: Q16611
  ENST ID: ENST00000374467
  CDS Start-End: 250-885
gccgggtgccgctggcacctctatgatcactggagtctcgcgggtccctcgggctgcacagggacaagtaaaggctacatccagatgccgggaatgcactgacgcccattcctggaaactgggctcccactcagcccctgggagcagcagccgccagcccctcgggacctccatctccaccctgctgagccacccgggttgggccaggatcccggcaggctgatcccgtcctccactgagacctgaaaaatggcttcggggcaaggcccaggtcctcccaggcaggagtgcggagagcctgccctgccctctgcttctgaggagcaggtagcccaggacacagaggaggttttccgcagctacgttttttaccgccatcagcaggaacaggaggctgaaggggtggctgcccctgccgacccagagatggtcaccttacctctgcaacctagcagcaccatggggcaggtgggacggcagctcgccatcatcggggacgacatcaaccgacgctatgactcagagttccagaccatgttgcagcacctgcagcccacggcagagaatgcctatgagtacttcaccaagattgccaccagcctgtttgagagtggcatcaattggggccgtgtggtggctcttctgggcttcggctaccgtctggccctacacgtctaccagcatggcctgactggcttcctaggccaggtgacccgcttcgtggtcgacttcatgctgcatcactgcattgcccggtggattgcacagaggggtggctgggtggcagccctgaacttgggcaatggtcccatcctgaacgtgctggtggttctgggtgtggttctgttgggccagtttgtggtacgaagattcttcaaatcatgactcccaagggtgccctttggggtcccggttcagacccctgcctggacttaagcgaagtctttgccttctctgttcccttgcaggggtcccccctcaagagtacagaagctttagcaagtgtgcactccagcttcggagggcccctgcgtgggggccagtcaggctgcagaggcacctcaacattgcatggtgctagtgggccctctctctgggcccaggggctgtggccgtctcctccctcagctctctgggacctccttagccctgtctgctaggcgctggggagactgataacttggggaggcaagagactgggagccacttctccccagaaagtgtttaacggttttagctttttataatacccttgtgagagcccattcccaccattctacctgaggccaggacgtctggggtgtggggattggtgggtctatgttccccaggattcagctattctggaagatcagcaccctaagagatgggactaggacctgagcctggtcctggccgtccctaagcatgtgtcccaggagcaggacctactaggagaggggggccaaggtcctgctcaactctacccctgctcccattcctccctccggccatactgcctttgcagttggactctcagggattctgggcttggggtgtggggtggggtggagtcgcagaccagagctgtctgaactcacgtgtcagaagcctccaagcctgcctcccaaggtcctctcagttctctcccttcctctctccttatagacacttgctcccaacccattcactacaggtgaaggctctcacccccatccctgggggccttgggtgagtggcctgctaaggctcctccttgcccagactacagggcttaggacttggtttgttatatcagggaaaaggagtagggagttcatctggagggttctaagtgggagaaggactatcaacaccactaggaatcccagaggtgggatcctccctcatggctctggcacagtgtaatccaggggtgtagatgggggaactgtgaatacttgaactctgttcccccaccctccatgctcctcacctgtctaggtctcctcagggtggggggtgacagtgccttctctattgggcacagcctagggtcttgggggtcaggggggagaagttcttgattcagccaaatgcagggaggggaggcagatggagcccataggccaccccctatcctctgagtgtttggaaataaactgtgcaatcccctca

SEQ ID NO: 111007 - DNA, 2212 bp, Homo sapiens
  Payload ID: 1776
  Gene Symbol: BAK1
  Gene Name: BCL2-antagonist/killer 1
  Uniprot ID: Q16611
  ENST ID: ENST00000442998
  CDS Start-End: 301-762
gtctgcatccggtggccacagagcaacttcctctagagggagctgattggagccgggtgccgctggcacctctatgatcactggagtctcgcgggtccctcgggctgcacagggacaagtaaaggctacatccagatgccgggaatgcactgacgcccattcctggaaactgggctcccactcagcccctgggagcagcagccgccagcccctcgggacctccatctccaccctgctgagccacccgggttgggccaggatcccggcaggctgatcccgtcctccactgagacctgaaaaatggcttcggggcaaggcccaggtcctcccaggcaggagtgcggagagcctgccctgccctctgcttctgaggagcaggtagcccaggacacagaggaggttttccgcagctacgttttttaccgccatcagcaggaacaggaggctgaaggggtggctgcccctgccgacccagagatggtcaccttacctctgcaacctagcagcaccatggggcaggtgggacggcagctcgccatcatcggggacgacatcaaccgacgctatgactcagagttccagaccatgttgcagcacctgcagcccacggcagagaatgcctatgagtacttcaccaagattgccaccaggccagcagcaacacccacagcctgtttgagagtggcatcaattggggccgtgtggtggctcttctgggcttcggctaccgtctggccctacacgtctaccagcatggcctgactggcttcctaggccaggtgacccgcttcgtggtcgacttcatgctgcatcactgcattgcccggtggattgcacagaggggtggctgggtggcagccctgaacttgggcaatggtcccatcctgaacgtgctggtggttctgggtgtggttctgttgggccagtttgtggtacgaagattcttcaaatcatgactcccaagggtgccctttggggtcccggttcagacccctgcctggacttaagcgaagtctttgccttctctgttcccttgcaggggtcccccctcaagagtacagaagctttagcaagtgtgcactccagcttcggagggcccctgcgtgggggccagtcaggctgcagaggcacctcaacattgcatggtgctagtgggccctctctctgggcccaggggctgtggccgtctcctccctcagctctctgggacctccttagccctgtctgctaggcgctggggagactgataacttggggaggcaagagactgggagccacttctccccagaaagtgtttaacggttttagctttttataatacccttgtgagagcccattcccaccattctacctgaggccaggacgtctggggtgtggggattggtgggtctatgttccccaggattcagctattctggaagatcagcaccctaagagatgggactaggacctgagcctggtcctggccgtccctaagcatgtgtcccaggagcaggacctactaggagaggggggccaaggtcctgctcaactctacccctgctcccattcctccctccggccatactgcctttgcagttggactctcagggattctgggcttggggtgtggggtggggtggagtcgcagaccagagctgtctgaactcacgtgtcagaagcctccaagcctgcctcccaaggtcctctcagttctctcccttcctctctccttatagacacttgctcccaacccattcactacaggtgaaggctctcacccccatccctgggggccttgggtgagtggcctgctaaggctcctccttgcccagactacagggcttaggacttggtttgttatatcagggaaaaggagtagggagttcatctggagggttctaagtgggagaaggactatcaacaccactaggaatcccagaggtgggatcctccctcatggctctggcacagtgtaatccaggggtgtagatgggggaactgtgaatacttgaactctgttcccccaccctccatgctcctcacctgtctaggtctcctcagggtggggggtgacagtgccttctctattgggcacagcctagggtcttgggggtcaggggggagaagttcttgattcagccaaatgcagggaggggaggcagatggagcccataggccaccccctatcctctgagtgtttggaaataaactgtgcaatcccctcaccctg

SEQ ID NO: 111008 - DNA, 929 bp, Homo sapiens
  Payload ID: 1777
  Gene Symbol: BAD
  Gene Name: BCL2-associated agonist of cell death
  Uniprot ID: Q92934
  ENST ID: ENST00000309032
  CDS Start-End: 48-554
cggcaggcccgggtcaggggcctcgagatcgggcttgggcccagagcatgttccagatcccagagtttgagccgagtgagcaggaagactccagctctgcagagaggggcctgggccccagccccgcaggggacgggccctcaggctccggcaagcatcatcgccaggccccaggcctcctgtgggacgccagtcaccagcaggagcagccaaccagcagcagccatcatggaggcgctggggctgtggagatccggagtcgccacagctcctaccccgcggggacggaggacgacgaagggatgggggaggagcccagcccctttcggggccgctcgcgctcggcgccccccaacctctgggcagcacagcgctatggccgcgagctccggaggatgagtgacgagtttgtggactcctttaagaagggacttcctcgcccgaagagcgcgggcacagcaacgcagatgcggcaaagctccagctggacgcgagtcttccagtcctggtgggatcggaacttgggcaggggaagctccgccccctcccagtgaccttcgctccacatcccgaaactccacccgttcccactgccctgggcagccatcttgaatatgggcggaagtacttccctcaggcctatgcaaaaagaggatccgtgctgtctcctttggagggagggctgacccagattcccttccggtgcgtgtgaagccacggaaggcttggtcccatcggaagttttgggttttccgcccacagccgccggaagtggctccgtggccccgccctcaggctccgggctttcccccaggcgcctgcgctaagtcgcgagccaggtttaaccgttgcgtcaccgggacccgagcccccgcgatgccctgggggccgtgctcactaccaaatgttaataaagcccgcgtctgtgc

SEQ ID NO: 111009 - DNA, 631 bp, Homo sapiens
  Payload ID: 1777
  Gene Symbol: BAD
  Gene Name: BCL2-associated agonist of cell death
  ENST ID: ENST00000394531
  CDS Start-End: 32-523
ggggcctcgagatcgggcttgggcccagagcatgttccagatcccagagtttgagccgagtgagcaggaagactccagctctgcagagaggggcctgggccccagccccgcaggggacgggccctcaggctccggcaagcatcatcgccaggccccaggcctcctgtgggacgccagtcaccagcaggagcagccaaccagcagcagccatcatggagggagaacttcgtattctccttcttgggaatctgaggactctgaaaatcccagtgcagggatgctcgcggaagcatcagcagggatgtccgccccagccgctgactcagaagcccaacacgcagagaatgtaaagctagaggcgctggggctgtggagatccggagtcgccacagctcctaccccgcggggacggaggacgacgaagggatgggggaggagcccagcccctttcggggccgctcgcgctcggcgccccccaacctctgggcagcacagcgctatggccgcgagctccggaggatgagtgacgagtttgtggactcctttaagaagggacttcctcgcccgaagagcgcgggcacagcaacgcagatgcggcaaagctccagctggacgcgagtcttccagtcct

SEQ ID NO: 111010 - DNA, 1157 bp, Homo sapiens
  Payload ID: 1777
  Gene Symbol: BAD
  Gene Name: BCL2-associated agonist of cell death
  Uniprot ID: Q92934
  ENST ID: ENST00000394532
  CDS Start-End: 272-778
gggcttggggtgagacctgtgcgccgtcaccacgggcggggcggggcctgggtccaccggggttctgaggggagactgaggtcctgagccgacagcctcagctccctgccaggccagacccggcagacagatgagggcccaggaggcctggcgggcctgggggcgctacggtgggagaggaagccaggggtacctgcctctgccttccagggccaccgttggccccagctgtgccttgactacgtaacatcttgtcctcacagcccagagcatgttccagatcccagagtttgagccgagtgagcaggaagactccagctctgcagagaggggcctgggccccagccccgcaggggacgggccctcaggctccggcaagcatcatcgccaggccccaggcctcctgtgggacgccagtcaccagcaggagcagccaaccagcagcagccatcatggaggcgctggggctgtggagatccggagtcgccacagctcctaccccgcggggacggaggacgacgaagggatgggggaggagcccagcccctttcggggccgctcgcgctcggcgccccccaacctctgggcagcacagcgctatggccgcgagctccggaggatgagtgacgagtttgtggactcctttaagaagggacttcctcgcccgaagagcgcgggcacagcaacgcagatgcggcaaagctccagctggacgcgagtcttccagtcctggtgggatcggaacttgggcaggggaagctccgccccctcccagtgaccttcgctccacatcccgaaactccacccgttcccactgccctgggcagccatcttgaatatgggcggaagtacttccctcaggcctatgcaaaaagaggatccgtgctgtctcctttggagggagggctgacccagattcccttccggtgcgtgtgaagccacggaaggcttggtcccatcggaagttttgggttttccgcccacagccgccggaagtggctccgtggccccgccctcaggctccgggctttcccccaggcgcctgcgctaagtcgcgagccaggtttaaccgttgcgtcaccgggacccgagcccccgcgatgccctgggggccgtgctcactaccaaatgttaataaagcccgcgtctgtgccgcc

SEQ ID NO: 111011 - DNA, 325 bp, Homo sapiens
  Payload ID: 1777
  Gene Symbol: BAD
  Gene Name: BCL2-associated agonist of cell death
  ENST ID: ENST00000493798
  CDS Start-End: 134-325
ggcagggccaggggcttagaggagctgagattaacgtcgcccccctacccactgaccctctgcaggcgctggggctgtggagatccggagtcgccacagctcctaccccgcggggacggaggacgacgaagggatgggggaggagcccagcccctttcggggccgctcgcgctcggcgccccccaacctctgggcagcacagcgctatggccgcgagctccggaggatgagtgacgagtttgtggactcctttaagaagggacttcctcgcccgaagagcgcgggcacagcaacgcagatgcggcaaagctccagctggacgcga

SEQ ID NO: 111012 - DNA, 359 bp, Homo sapiens
  Payload ID: 1777
  Gene Symbol: BAD
  Gene Name: BCL2-associated agonist of cell death
  ENST ID: ENST00000492141
  CDS Start-End: 207-359
ggacacaggctaagagagtcgaaggctggctagacaaggggagagacacagagctccgctgatcatcactggactctggattccaccaaacctttggaaccttccagcctcaggcctccacagcttcacagaaactgggcgctggggctgtggagatccggagtcgccacagctcctaccccgcggggacggaggacgacgaagggatgggggaggagcccagcccctttcggggccgctcgcgctcggcgccccccaacctctgggcagcacagcgctatggccgcgagctccggaggatgagtgacgagtttgtggactcctttaagaagggacttcctcgcccgaagagcgcgggc

SEQ ID NO: 111013 - DNA, 525 bp, Homo sapiens
  Payload ID: 1777
  Gene Symbol: BAD
  Gene Name: BCL2-associated agonist of cell death
  ENST ID: ENST00000544785
  CDS Start-End: 2-475
catgttccagatcccagagtttgagccgagtgagcaggaagactccagctctgcagagaggggcctgggccccagccccgcaggggacgggccctcaggctccggcaagcatcatcgccaggccccaggcctcctgtgggacgccagtcaccagcaggagcagccaaccagcagcagccatcatggagaagggacttcctcgcccgaagagcgcgggcacagcaacgcagatgcggcaaagctccagctggacgcgagtcttccagtcctggtgggatcggaacttgggcaggggaagctccgccccctcccagtgaccttcgctccacatcccgaaactccacccgttcccactgccctgggcagccatcttgaatatgggcggaagtacttccctcaggcctatgcaaaaagaggatccgtgctgtctcctttggagggagggctgacccagattcccttccggtgcgtgtgaagccacggaaggcttggtcccatcggaagttttgggttttccgcccacag

SEQ ID NO: 111014 - DNA, 1128 bp, Homo sapiens
  Payload ID: 1778
  Gene Symbol: BAG1
  Gene Name: BCL2-associated athanogene
  Uniprot ID: Q99933
  ENST ID: ENST00000379704
  CDS Start-End: 243-935
ccccggcccagcgtggtccgcctccctctgggcgtccacctgcccggagtactgccagcgggcatgaccgacccaccaggggcgccgccgccggcgctcgcaggccgcggatgaagaagaaaacccggcgccgctcgacccggagcgaggagttgacccggagcgaggagttgaccctgagtgaggaagcgacctggagtgaagaggcgacccagagtgaggaggcgacccagggcgaagagatgaatcggagccaggaggtgacccgggacgaggagtcgacccggagcgaggaggtgaccagggaggaaatggcggcagctgggctcaccgtgactgtcacccacagcaatgagaagcacgaccttcatgttacctcccagcagggcagcagtgaaccagttgtccaagacctggcccaggttgttgaagaggtcataggggttccacagtcttttcagaaactcatatttaagggaaaatctctgaaggaaatggaaacaccgttgtcagcacttggaatacaagatggttgccgggtcatgttaattgggaaaaagaacagtccacaggaagaggttgaactaaagaagttgaaacatttggagaagtctgtggagaagatagctgaccagctggaagagttgaataaagagcttactggaatccagcagggttttctgcccaaggatttgcaagctgaagctctctgcaaacttgataggagagtaaaagccacaatagagcagtttatgaagatcttggaggagattgacacactgatcctgccagaaaatttcaaagacagtagattgaaaaggaaaggcttggtaaaaaaggttcaggcattcctagccgagtgtgacacagtggagcagaacatctgccaggagactgagcggctgcagtctacaaactttgccctggccgagtgaggtgtagcagaaaaaggctgtgctgccctgaagaatggcgccaccagctctgccgtctctggagcggaatttacctgatttcttcagggctgctgggggcaactggccatttgccaattttcctactctcacactggttctcaatgaaaaatagtgtctttgtgattttgagtaaagctcctatctgttttct

SEQ ID NO: 111015 - DNA, 1396 bp, Homo sapiens
  Payload ID: 1778
  Gene Symbol: BAG1
  Gene Name: BCL2-associated athanogene
  ENST ID: ENST00000379707
  CDS Start-End: 392-874
gacgccgcgctcagcttccatcgctgggcggtcaacaagtgcgggcctggctcagcgcgggggggcgcggagaccgcgaggcgaccgggagcggctgggttcccggctgcgcgcccttcggccaggccgggagccgcgccagtcggagcccccggcccagcgtggtccgcctccctctgggcgtccacctgcccggagtactgccagcgggcatgaccgacccaccaggggcgccgccgccggcgctcgcaggccgcggatgaagaagaaaacccggcgccgctcgacccggagcgaggagttgacccggagcgaggagttgaccctgagtgaggaagcgacctggagtgaagaggcgacccagagtgaggaggcgacccagggcgaagagatgaatcggagccaggaggtgacccgggacgaggagtcgacccggagcgaggaggtgaccagggaggaaatggcggcagctgggctcaccgtgactgtcacccacagcaatgagaagcacgaccttcatgttacctcccagcagggcagcagtgaaccagttgtccaagacctggcccaggttgttgaagaggtcataggggttccacagtcttttcagaaactcatatttaaggttcttcaacagatatttattgaggacctgctaggtattggacactctcaaacacctggacaggtgtcagatttgaagtcttatgatgatggcagaaatctcaccattttcgatgaagctcatgggcagtcttccctcgctaggaaaatctctgaaggaaatggaaacaccgttgtcagcacttggaatacaagatggttgccgggtcatgttaattgggaaaaagaacagtccacaggaagaggttgaactaaagaagttgaaacatttggagaagtctgtggagaagatagctgaccagctggaagagttgaataaagagcttactggaatccagcagggttttctgcccaaggatttgcaagctgaagctctctgcaaacttgataggagagtaaaagccacaatagagcagtttatgaagatcttggaggagattgacacactgatcctgccagaaaatttcaaagacagtagattgaaaaggaaaggcttggtaaaaaaggttcaggcattcctagccgagtgtgacacagtggagcagaacatctgccaggagactgagcggctgcagtctacaaactttgccctggccgagtgaggtgtagcagaaaaaggctgtgctgccctgaagaatggcgccaccagctctgccgtctctggagcggaatttacctgatttcttcagggctgctgggggcaactggccatttgccaattttcctactctcacactggttctcaatgaaaaatagtgtctttgtgattttg

SEQ ID NO: 111016 - DNA, 485 bp, Homo sapiens
  Payload ID: 1778
  Gene Symbol: BAG1
  Gene Name: BCL2-associated athanogene
  ENST ID: ENST00000488499
  CDS Start-End: 342-485
ctcagcgcgggggggcgcggagaccgcgaggcgaccgggagcggctgggttcccggctgcgcgcccttcggccaggccgggagccgcgccagtcggagcccccggcccagcgtggtccgcctccctctgggcgtccacctgcccggagtactgccagcgggcatgaccgacccaccaggggcgccgccgccggcgctcgcaggccgcggatgaagaagaaaacccggcgccgctcgacccggagcgaggagttgacccggagcgaggagttgaccctgagtgaggaagcgacctggagtgaagaggcgacccagagtgaggaggcgacccagggcgaagagatgaatcggagccaggaggtgacccgggacgaggagtcgacccggagcgaggaggcaatgagaagcacgaccttcatgttacctcccagcagggcagcagtgaaccagttgtccaagacctggcccaggttgttgaagaggtca

SEQ ID NO: 111017 - DNA, 681 bp, Homo sapiens
  Payload ID: 1778
  Gene Symbol: BAG1
  Gene Name: BCL2-associated athanogene
  ENST ID: ENST00000473781
  CDS Start-End: 231-681
gtggtccgcctccctctgggcgtccacctgcccggagtactgccagcgggcatgaccgacccaccaggggcgccgccgccggcgctcgcaggccgcggatgaagaagaaaacccggcgccgctcgacccggagcgaggagttgacccggagcgaggagttgaccctgagtgaggaagcgacctggagtgaagaggcgacccagagtgaggaggcgacccagggcgaagagatgaatcggagccaggaggtgacccgggacgaggagtcgacccggagcgaggaggtgaccagggaggaaatggcggcagctgggctcaccgtgactgtcacccacagtgagtgtcgggcgccaggcaatgagaagcacgaccttcatgttacctcccagcagggcagcagtgaaccagttgtccaagacctggcccaggttgttgaagaggtcataggggttccacagtcttttcagaaactcatatttaagggaaaatctctgaaggaaatggaaacaccgttgtcagcacttggaatacaagatggttgccgggtcatgttaattgggaaaaagaacagtccacaggaagaggttgaactaaagaagttgaaacatttggagaagtctgtggagaagatagctgaccagctggaagagttgaataaagagcttactggaatccagcagg

SEQ ID NO: 111018 - DNA, 3867 bp, Homo sapiens
  Payload ID: 1778
  Gene Symbol: BAG1
  Gene Name: BCL2-associated athanogene
  ENST ID: ENST00000472232
  CDS Start-End: 88-1125
aggccggggcggggctgggaagtagtcgggcggggttgtgagacgccgcgctcagcttccatcgctgggcggtcaacaagtgcgggcctggctcagcgcgggggggcgcggagaccgcgaggcgaccgggagcggctgggttcccggctgcgcgcccttcggccaggccgggagccgcgccagtcggagcccccggcccagcgtggtccgcctccctctgggcgtccacctgcccggagtactgccagcgggcatgaccgacccaccaggggcgccgccgccggcgctcgcaggccgcggatgaagaagaaaacccggcgccgctcgacccggagcgaggagttgacccggagcgaggagttgaccctgagtgaggaagcgacctggagtgaagaggcgacccagagtgaggaggcgacccagggcgaagagatgaatcggagccaggaggtgacccgggacgaggagtcgacccggagcgaggaggtgaccagggaggaaatggcggcagctgggctcaccgtgactgtcacccacagcaatgagaagcacgaccttcatgttacctcccagcagggcagcagtgaaccagttgtccaagacctggcccaggttgttgaagaggtcataggggttccacagtcttttcagaaactcatatttaagggaaaatctctgaaggaaatggaaacaccgttgtcagcacttggaatacaagatggttgccgggtcatgttaattgggaaaaagaacagtccacaggaagaggttgaactaaagaagttgaaacatttggagaagtctgtggagaagatagctgaccagctggaagagttgaataaagagcttactggaatccagcagggttttctgcccaaggatttgcaagctgaagctctctgcaaacttgataggagagtaaaagccacaatagagcagtttatgaagatcttggaggagattgacacactgatcctgccagaaaatttcaaagacagtagattgaaaaggaaaggcttggtaaaaaaggttcaggcattcctagccgagtgtgacacagtggagcagaacatctgccaggagactgagcggctgcagtctacaaactttgccctggccgagtgaggtgtagcagaaaaaggctgtgctgccctgaagaatggcgccaccagctctgccgtctctggagcggaatttacctgatttcttcagggctgctgggggcaactggccatttgccaattttcctactctcacactggttctcaatgaaaaatagtgtctttgtgattttgagtaaagctcctatctgttttctccttctgtctctgtggttgtactgtccagcaatccaccttttctggagagggccacctctgcccaaattttcccagctgtttggacctctgggtgctttctttgggctggtgagagctctaatttgccttgggccagtttcaggtttataggccccctcagtcttcagatacatgagggcttctttgctcttgtgatcgtgtagtcccatagctgtaaaaccagaatcaccaggaggttgcacctagtcaggaatattgggaatggcctagaacaaggtgtttggcacataagtagaccacttatccctcattgtgacctaattccagagcatctggctgggttgttgggttctagactttgtcctcacctcccagtgaccctgactagccacaggccatgagataccagggggccgttccttggatggagcctgtggttgatgcaaggcttccttgtccccaagcaagtcttcagaaggttagaacccagtgttgactgagtctgtgcttgaaaccaggccagagccatggattaggaagggcaaagagaaggcaccagaatgagtaaagcaggcaggtggtgaagccaaccataaacttctcaggagtgacatgtgcttccttcaaaggcatttttgttaaccatatccttctgagttctatgtttccttcacagctgttctatccattttgtggactgtcccccacccccaccccatcattgtttttaaaaaattaaggcctggcgcagcagctcatgcctataatcccagcactttgggaggctgaggcgggcggatcacttgaggccaggagtttgagaccagcccaggcaacatagcaaaaccccattctgctttaaaaaaaaaaaaaaaaaaaattagcttggcgtagtggcatgtgcctataatcccagctactggggaggctgaggcacaagaatcatttgaacctgggaggtagaggttgctgtgagccgagattacgcccctgcactccagcctgggtcacagagtgagactccatctcagaaaaaaaaaaaattgagtcaggtgcagtagctccttcctgtagtcccagctacttgggaggctgaggctagaggatcacttgagcccaggagtttgagtctagtctgggcaacatagcaagaccccatctctaaaatttaagtaagtaaaagtagataaataaaaagaaaaaaaaactgtttatgtgctcatcataaagtagaagagtggtttgcttttttttttttttttggattaatgaggaaatcattctgtggctctagtcataatttatgcttaataacattgatagtagccctttgcgctataactctacctaaagactcacatcatttggcagagagagagtcgttgaagtcccaggaattcaggactgggcaggttaagacctcagacaaggtagtagaggtagacttgtggacaaggctcgggtcccagcccaccgcaccccaactttaatcagagtggttcactattgatctatttttgtgtgatagctgtgtggcgtgggccacaacatttaatgagaagttactgtgcaccaaactgccgaacaccattctaaactattcatatatattagtcatttaattcttacataacttgagaggtagacagatatccttattttagagatgaggaaaccaagagaacttaggtcattagcgcaaggttgtagagtaagcggcaaagccaagacacaaagctgggtggtttggtttcagagccagtgcttttcccctctactgtactgcctctcaaccaacacagggttgcacaggcccattctctgatttttttcctcttgtcctctgcctctccctctagctcccacttcctctctgctctagttcattttctttagagcagcccgagtgatcatgaagtgcaaatcttgccatgtcagtcccctgcttagaaccctccaatggctcactttctctttaggcaaaagtctttaccccatgccttctcccatctcatctcaaccccctcatttgttggctgtctgctgtcagccactcttctttcaggtcctcagatgcactgcaccctctcctgcctgggggtctttgctcctgctactacctctgcttgaacagctcctcaccttccttcctccaaccctacccttgtataggtgacttttgttcatccttcagaattcaactcacatgtctcttgcatggagaaccctcacctactgtgttgagaccctgtccagcccccaggtgggatcctctctcgacttcccatacatttctttcacagcatttacatagtccatgatagtttacttgtgggattatttggttaatctttgcctttaacaccagggttccttgggtgaaggagcttctttatcttggtaacagcattatttcaagcataacttgtaatatagttatattacatatataacatatatatatataacataacatatataacatatataacaagcataacttgttatatagtcttgtatatagtaagacctcaataaatatttggag

SEQ ID NO: 111019 - DNA, 658 bp, Homo sapiens
  Payload ID: 1778
  Gene Symbol: BAG1
  Gene Name: BCL2-associated athanogene
  ENST ID: ENST00000635077
  CDS Start-End: 377-658
ttccatcgctgggcggtcaacaagtgcgggcctggctcagcgcgggggggcgcggagaccgcgaggcgaccgggagcggctgggttcccggctgcgcgcccttcggccaggccgggagccgcgccagtcggagcccccggcccagcgtggtccgcctccctctgggcgtccacctgcccggagtactgccagcgggcatgaccgacccaccaggggcgccgccgccggcgctcgcaggccgcggatgaagaagaaaacccggcgccgctcgacccggagcgaggagttgacccggagcgaggagttgaccctgagtgaggaagcgacctggagtgaagaggcgacccagagtgaggaggcgacccagggcgaagagatgaatcggagccaggaggtgacccgggacgaggagtcgacccggagcgaggaggtgaccagggaggaaatggcggcagctgggctcaccgtgactgtcacccacagtgagtgtcgggcgccaggcaatgagaagcacgaccttcatgttacctcccagcagggcagcagtgaaccagttgtccaagacctggcccaggttgttgaagaggtcataggggttccacagtcttttcagaaactcatatttaaggttcttcaacagatatttattgaggacctg

SEQ ID NO: 111020 - DNA, 3786 bp, Homo sapiens
  Payload ID: 1778
  Gene Symbol: BAG1
  Gene Name: BCL2-associated athanogene
  ENST ID: ENST00000634734
  CDS Start-End: 1-1038
ctggctcagcgcgggggggcgcggagaccgcgaggcgaccgggagcggctgggttcccggctgcgcgcccttcggccaggccgggagccgcgccagtcggagcccccggcccagcgtggtccgcctccctctgggcgtccacctgcccggagtactgccagcgggcatgaccgacccaccaggggcgccgccgccggcgctcgcaggccgcggatgaagaagaaaacccggcgccgctcgacccggagcgaggagttgacccggagcgaggagttgaccctgagtgaggaagcgacctggagtgaagaggcgacccagagtgaggaggcgacccagggcgaagagatgaatcggagccaggaggtgacccgggacgaggagtcgacccggagcgaggaggtgaccagggaggaaatggcggcagctgggctcaccgtgactgtcacccacagcaatgagaagcacgaccttcatgttacctcccagcagggcagcagtgaaccagttgtccaagacctggcccaggttgttgaagaggtcataggggttccacagtcttttcagaaactcatatttaagggaaaatctctgaaggaaatggaaacaccgttgtcagcacttggaatacaagatggttgccgggtcatgttaattgggaaaaagaacagtccacaggaagaggttgaactaaagaagttgaaacatttggagaagtctgtggagaagatagctgaccagctggaagagttgaataaagagcttactggaatccagcagggttttctgcccaaggatttgcaagctgaagctctctgcaaacttgataggagagtaaaagccacaatagagcagtttatgaagatcttggaggagattgacacactgatcctgccagaaaatttcaaagacagtagattgaaaaggaaaggcttggtaaaaaaggttcaggcattcctagccgagtgtgacacagtggagcagaacatctgccaggagactgagcggctgcagtctacaaactttgccctggccgagtgaggtgtagcagaaaaaggctgtgctgccctgaagaatggcgccaccagctctgccgtctctggagcggaatttacctgatttcttcagggctgctgggggcaactggccatttgccaattttcctactctcacactggttctcaatgaaaaatagtgtctttgtgattttgagtaaagctcctatctgttttctccttctgtctctgtggttgtactgtccagcaatccaccttttctggagagggccacctctgcccaaattttcccagctgtttggacctctgggtgctttctttgggctggtgagagctctaatttgccttgggccagtttcaggtttataggccccctcagtcttcagatacatgagggcttctttgctcttgtgatcgtgtagtcccatagctgtaaaaccagaatcaccaggaggttgcacctagtcaggaatattgggaatggcctagaacaaggtgtttggcacataagtagaccacttatccctcattgtgacctaattccagagcatctggctgggttgttgggttctagactttgtcctcacctcccagtgaccctgactagccacaggccatgagataccagggggccgttccttggatggagcctgtggttgatgcaaggcttccttgtccccaagcaagtcttcagaaggttagaacccagtgttgactgagtctgtgcttgaaaccaggccagagccatggattaggaagggcaaagagaaggcaccagaatgagtaaagcaggcaggtggtgaagccaaccataaacttctcaggagtgacatgtgcttccttcaaaggcatttttgttaaccatatccttctgagttctatgtttccttcacagctgttctatccattttgtggactgtcccccacccccaccccatcattgtttttaaaaaattaaggcctggcgcagcagctcatgcctataatcccagcactttgggaggctgaggcgggcggatcacttgaggccaggagtttgagaccagcccaggcaacatagcaaaaccccattctgctttaaaaaaaaaaaaaaaaaaaattagcttggcgtagtggcatgtgcctataatcccagctactggggaggctgaggcacaagaatcatttgaacctgggaggtagaggttgctgtgagccgagattacgcccctgcactccagcctgggtcacagagtgagactccatctcagaaaaaaaaaaaattgagtcaggtgcagtagctccttcctgtagtcccagctacttgggaggctgaggctagaggatcacttgagcccaggagtttgagtctagtctgggcaacatagcaagaccccatctctaaaatttaagtaagtaaaagtagataaataaaaagaaaaaaaaactgtttatgtgctcatcataaagtagaagagtggtttgcttttttttttttttttggattaatgaggaaatcattctgtggctctagtcataatttatgcttaataacattgatagtagccctttgcgctataactctacctaaagactcacatcatttggcagagagagagtcgttgaagtcccaggaattcaggactgggcaggttaagacctcagacaaggtagtagaggtagacttgtggacaaggctcgggtcccagcccaccgcaccccaactttaatcagagtggttcactattgatctatttttgtgtgatagctgtgtggcgtgggccacaacatttaatgagaagttactgtgcaccaaactgccgaacaccattctaaactattcatatatattagtcatttaattcttacataacttgagaggtagacagatatccttattttagagatgaggaaaccaagagaacttaggtcattagcgcaaggttgtagagtaagcggcaaagccaagacacaaagctgggtggtttggtttcagagccagtgcttttcccctctactgtactgcctctcaaccaacacagggttgcacaggcccattctctgatttttttcctcttgtcctctgcctctccctctagctcccacttcctctctgctctagttcattttctttagagcagcccgagtgatcatgaagtgcaaatcttgccatgtcagtcccctgcttagaaccctccaatggctcactttctctttaggcaaaagtctttaccccatgccttctcccatctcatctcaaccccctcatttgttggctgtctgctgtcagccactcttctttcaggtcctcagatgcactgcaccctctcctgcctgggggtctttgctcctgctactacctctgcttgaacagctcctcaccttccttcctccaaccctacccttgtataggtgacttttgttcatccttcagaattcaactcacatgtctcttgcatggagaaccctcacctactgtgttgagaccctgtccagcccccaggtgggatcctctctcgacttcccatacatttctttcacagcatttacatagtccatgatagtttacttgtgggattatttggttaatctttgcctttaacaccagggttccttgggtgaaggagcttctttatcttggtaacagcattatttcaagcataacttgtaatatagttatattacatatataacatatatatatataacataacatatataacatatataacaagcataacttgttatatagtcttgtatatagtaagacctcaataaatatttggagaacaaa

SEQ ID NO: 111021 - DNA, 551 bp, Homo sapiens
  Payload ID: 1778
  Gene Symbol: BAG1
  Gene Name: BCL2-associated athanogene
  ENST ID: ENST00000473464
  CDS Start-End: 1-192
gatggttgccgggtcatgttaattgggaaaaagaacagtccacaggaagaggttgaactaaagaagttgaaacatttggagaagtctgtggagaagatagctgaccagctggaagagttgaataaagagcttactggaatccagcagagatggggtttcaccatgttggccagactggtctcaaactcctgacctcaagtgatctgcccgcctcggcctcccaaagtgctgggattacaggcatgagccactgcgcccggcctatatgtttgtgttttaattacagaatacatgctgactgtacaaaagttttaagtacatgtataggcactaatatggaaaataaaaattacccatggggcaccaactcagagatgacgattaccaaagcctgaaatatatttttcatcttaaaaaaatttgatataatgttatttacactttataaactattcttttattggataaaaaattaaacattttcctgtgatggtatttttcaaagctcgcatgcatttcatcttgtataaatgtattatttacctagccaa

SEQ ID NO: 111022 - DNA, 6651 bp, Homo sapiens
  Payload ID: 1779
  Gene Symbol: BAG2
  Gene Name: BCL2-associated athanogene 2
  Uniprot ID: O95816
  ENST ID: ENST00000370693
  CDS Start-End: 373-1008
agacgatccgctagccacattaggcgctcggtctctgcgtccgcccctcccgtgcctcagagacttgcgctccccaggcccgagcccctgtcggcccatcctcgagcccgtgtggctcgcgaacctctaactccagccgctgcagccccctcccaggcccggcgtccccgagccccgcgggcgccgcgcctgcccttctttggctacgctgcagccgcggtgtcggcgagtcctcccgggttgcccccgcgggcgtcagagggagggcgggcgcccgcgtggtgacggcgacgcctgcagcccaaggagcgctccactcgctgccgccggaggggccggtgacctcttggctaccccgcgtcggaggcttagatggctcaggcgaagatcaacgctaaagccaacgaggggcgcttctgccgctcctcctccatggctgaccgctccagccgcctgctggagagcctggaccagctggagctcagggttgaagctttgagagaagcagcaactgctgttgagcaagagaaagaaatccttctggaaatgatccacagtatccaaaatagccaggacatgaggcagatcagtgacggagaaagagaagaattaaatctgactgcaaaccgtttgatgggaagaactctcaccgttgaagtgtcagtagaaacaattagaaacccccagcagcaagaatccctaaagcatgccacaaggattattgatgaggtggtcaataagtttctggatgatttgggaaatgccaagagtcatttaatgtcgctctacagtgcatgttcatctgaggtgccacatgggccagttgatcagaagtttcaatccatagtaattggctgtgctcttgaagatcagaagaaaattaagagaagattagagactctgcttagaaatattgaaaactctgacaaggccatcaagctattagagcattctaaaggagctggttccaaaactctgcaacaaaatgctgaaagcagattcaattagtcttcaaacctaagagcatttacacaatacacaaggtgtaaaaatgataaaatactattttaattgataactagttctttgttaggtataaccacttagttgacactgatagttgtttcagatgaggaaaatattccatcaagtatcttcagttttgtgaataacaaaactagcaatattttaattatctatctagagattttttagattgaattcttgtcttgtactaggatctagcatatttcactattctgtggatgaatacatagtttgtggggaaaacaaacgttcagctaggggcaaaaagcatgactgctttttcctgtctggcatggaatcacgcagtcaccttgggcatttagtttactagaaattctttaccttaagcagcacacacatttactacacacacagtgttaacaaagcactgtgcttagagggtaaaaaggaatcacaaaacaagaatctttccaaagttgtctcattcagcaatgttaaggcatctgtatcaaattattttggatgtaaagattcctgtgtctcataatatgaatgtattttttgatatacaagaaactgacataaaatgtgagaaaaccacctataatttaccactgtgaacaattatatatctatctgcttcatcttttctcaaatgcatcaattctctaaaattcctatattgtaacttgcctttttttaaaaaagttagatgctgatataaagtctgcttaattgtcaacttaatgagctctattttgtgtagttatatctttatccattcctcttttatggacatttaggttgtttccaacttgttgctattactgcaacatatttttgtacacaggactttttccttctttcatttttgtttttctctgtataaaggcccagcagtgaattatattgggtcaaaggatatagacgttttcatggcctcacacatattaaactttttttgtataaaggttacagcaatttatacttttttcagtaattaaaatatagctatttcactgaaatatttccagcactgagcattaatacctagtttgcattttgtttactaaaaaggttgaccagtgtgttgattcttcttttatctgataaagtgtgaagcaactagagaacacttatttgttcaaagtaactagtcctattgatatacaaaaaccacaacaacttccctggatactattttgaaatgaacacatcaatttttatttgaatgtaggtattcttcacactgaaaaaccaaatcaagatccaaactgactttatgtatgtatatatctctcaatgcaagcaatatcaaacttcattttctctacaaaaatgccaagttagtctctttataaaaagcagttacaatctgaagacattcatgttacttcctttgccagctccaactctgccttatttaaatctttgcatttcatgggaaacattaattctatctatggcagagccacttggtttgttagcagactgatttgctgtcatcagactgtgagatgattttttgtgtgcatcatttttttcttgaccagctttttgaaaattaagaaatggatagtcatgttttcttcaggttctcaagtattgtcagcatccgtaaatcccttccactctgggaaatactactgctccctgcttcccatggcttccacatcagtccaggactttttctacacaaattattctggctctgcctccttgaccttggtattcttagcattatttttcccatttttttgcaatggagtttttaatggaggtcattgatttctgatcacagacttgaagagctatgatccacatttccaagctgcttggggtccctggtttacagtgtctccagcattctgtacctagagccacatctaaagggcagggaatctccagtgtggttttttgtttttttgttttttgttttggagtcttgctctgtcacccaggctgtctgacaagtagaagacatatccactgtagcaaggaacactatggagtatatgagttagggaaaagagactgtgaagggaagagaacaaacattttgtagacgtttggtgttgaatatatgctatggaggcagtttctatagtttcatttacttcatgaggtttcattttttcttttctgagatggagtcttgctctgttgcccaggctggagtgcagtggtgtgatctcagctcactgcaacctccacctcccgggttcaagcgattctcctgcctcagcctccctagtagttgggactacaggcgcccaccaccacgcccggctaaatttttgtatttttagtagacatggggtttcaccatattggccaggctggtctcaaactcctgaccttgtgatctgcctgccttggcctcccaaagtacagggattacaggcatgagccaccacgcttggccaatgggttggttcttaacatgtatttttatttataagaatgggagtataatttattttcaaatgatgatgaatctcctgagtcacatttttaccctcatttaaactattgtcttttatatagactataagtggatatagagtatgttttgctgtatctcaattctctaccattcctagcatataatacataattttagggtagccctcctgccattccttgttagcactactttcaataaaatgagagtattaaatattggcagagtatctgaaatatgaaataattttaggttgctttgatctttaaagaagttgcattatatattttactatttagatccacactgttgatacaatcatacatatcacacaaaattttagctttgaaatgcatttattttctgattattggaattcatccttcatgaaatttttagagtagtgttttaaattaagctccagagtgtaactgcaaccaaatagcaatacatacaagtggttttccattcaaatttacaaaagcattatttattagtaataaaaatatagaaggaattcagttttccttttatccccaattttttgcttttaaaagaccatttactaacatcctactgtagatatttcgagagacagatgaaaataataataataaagattattatagccaaatcatccagttagccaggagtttgatgactggatatttcagagtctactgcgggttttaaatattttgttagcaaatgaattcatctgtatgatgagagacttacatgttttatagctgaaaacctaaggagtgacaatagtacatgtgacattcttaacagttaaaaactgagtaagtcctgttcattaggtaggtgccatgtggaacaagctttcacctcatcaatgcattttgttttcagagaaacagactaatgatagattaatgggaacattttatcaggttagcagtaactatttcaaaggttttgaaaagtatgctaataattaacaatatcttatattaaaagggtccaacactaagttgggacattaggtcctaaggccaactccctattctaaggtcttcagaaaaggtccagtttcctaaaactcacaggtccaaggagtacatgttatttattgagagttccttctgagcactgcactgccaacttctaaagcaaccacctagaacttcactccataatgaggaaaaagttttcatcctctttttggtagttttagctttattttgaaaaagtaacgtgtgctatcaactttgggcagatacaaaggaaatcatttaacctggttttatttaactatattgccttatatgggtcattctatatactatttaattcatagacagagactggaaaaggaaaaggaaacctgaggaactctgaaatatggcagttattccacagcgatatgtctacgcaaaagattagccgtaatgttaaaaaagtagattagagcacaaatgcacaatcacctggaatcttggaaaagtttttctttagtatacatggtttcataaaattaaagttatttaagagaatgaagggtcttggaaaaaaaatgtcaatttttgaaggctttaagaattgattaaattgagaaattaacatggctgactttcaggcctacttaattattttaaatgactaattatggttaggtttaaaatacagcagtgcaaattaaaaattcaaatatgtaacaaagctctctcttcagttcttatttaaaaaaagataaaactaggtacataaaattatattacaggaactgtaactatcctcagagattactttttttaaatatagaaaggtaacacgcttttagccacacagctaacatgaaaaagaactaactagaacacatataacaagtgatttttctgccaataaagacaaaagactatttgttgcaaagtattattttgtgcaaaaattaaagaggagagtagagagtagaaaattgaagagagtagaaaagatgactcattagcagtatccactgtttgttaggaactgaattttgcccccaaaacctatgtcactatcagcaatgggagtggtgacaactggtgacataaaaataagcattttacattactgtgaaatagataatgccagatcatttcaatataatgaaaagcaaaaatttactttttaattttttttatttttccatctaaaatggcaaagagaacatttacttttgatcacttaacaaggacacacccaggaaatttgattttctcaacattaggaggatgaggggagtacagatggaaaaacaaaagataaaacacaaaaggagtacataaaacattgtttagtacaaataatgaaaaatgacttcatgacattttccaataaaagttatttttacagattttgcaatgctgtaaaaaccaggtatattgaaaggggttatttataggttaaaaataaagccattgatgagtgataatcagttttaacagagttcacgcaattatcttagctggaaagctactgtcccaagtgacaaaatttatgtcctgacacatgattacatattaaatcattttgtaaaagaaatgattctgtatgtgggactgacagctcttgagaaagtgctatacaaacaaggttatagaaatgttgaagtgattgataatcttaaaataccatacaaaaatgtgtaaacaaaaggatggtttagagttgcagggcattataaaatatgtaattttagttaagactaataataatatttttgtgcactttaaaaatggttagtgtaatcttgtaagttcaaagctgggttctcagtgagcagcaaaaggtgttagatgcatcaccacacttcacaggacctcctgaatgactgcagatgtgctgtgtaccttcttaaggggctttggctgaccttatgagagcaggagctcaccatgcttatgggtgactatatcaaaaagatctgcaataaggctcacctgggagatgctctagcattcaaattcctatactcctcttttatctacgctgtcagatgaaaactgcttactgcttttaaaagatataataaacaatataaattctgatagtaaagcactataaaaattaggtatgatatttttggcacaaagcactttttaaacccaagctcattttgcaaaatatatgtctagagtttatcatttgaaaataaaaacatatacacaata

SEQ ID NO: 111023 - DNA, 2571 bp, Homo sapiens
  Payload ID: 1780
  Gene Symbol: BAG3
  Gene Name: BCL2-associated athanogene 3
  Uniprot ID: O95817
  ENST ID: ENST00000369085
  CDS Start-End: 307-2034
gcggagctccgcatccaaccccgggccgcggccaacttctctggactggaccagaagtttctagccggccagttgctacctccctttatctcctccttcccctctggcagcgaggaggctatttccagacacttccacccctctctggccacgtcacccccgcctttaattcataaaggtgcccggcgccggcttcccggacacgtcggcggcggagaggggcccacggcggcggcccggccagagactcggcgcccggagccagcgccccgcacccgcgccccagcgggcagaccccaacccagcatgagcgccgccacccactcgcccatgatgcaggtggcgtccggcaacggtgaccgcgaccctttgccccccggatgggagatcaagatcgacccgcagaccggctggcccttcttcgtggaccacaacagccgcaccactacgtggaacgacccgcgcgtgccctctgagggccccaaggagactccatcctctgccaatggcccttcccgggagggctctaggctgccgcctgctagggaaggccaccctgtgtacccccagctccgaccaggctacattcccattcctgtgctccatgaaggcgctgagaaccggcaggtgcaccctttccatgtctatccccagcctgggatgcagcgattccgaactgaggcggcagcagcggctcctcagaggtcccagtcacctctgcggggcatgccagaaaccactcagccagataaacagtgtggacaggtggcagcggcggcggcagcccagcccccagcctcccacggacctgagcggtcccagtctccagctgcctctgactgctcatcctcatcctcctcggccagcctgccttcctccggcaggagcagcctgggcagtcaccagctcccgcgggggtacatctccattccggtgatacacgagcagaacgttacccggccagcagcccagccctccttccaccaagcccagaagacgcactacccagcgcagcagggggagtaccagacccaccagcctgtgtaccacaagatccagggggatgactgggagccccggcccctgcgggcggcatccccgttcaggtcatctgtccagggtgcatcgagccgggagggctcaccagccaggagcagcacgccactccactccccctcgcccatccgtgtgcacaccgtggtcgacaggcctcagcagcccatgacccatcgagaaactgcacctgtttcccagcctgaaaacaaaccagaaagtaagccaggcccagttggaccagaactccctcctggacacatcccaattcaagtgatccgcaaagaggtggattctaaacctgtttcccagaagcccccacctccctctgagaaggtagaggtgaaagttccccctgctccagttccttgtcctcctcccagccctggcccttctgctgtcccctcttcccccaagagtgtggctacagaagagagggcagcccccagcactgcccctgcagaagctacacctccaaaaccaggagaagccgaggctcccccaaaacatccaggagtgctgaaagtggaagccatcctggagaaggtacaggggctggagcaggctgtagacaactttgaaggcaagaagactgacaaaaagtacctgatgatcgaagagtatttgaccaaagagctgctggccctggattcagtggaccccgagggacgagccgatgtgcgtcaggccaggagagacggtgtcaggaaggttcagaccatcttggaaaaacttgaacagaaagccattgatgtcccaggtcaagtccaggtctatgaactccagcccagcaaccttgaagcagatcagccactgcaggcaatcatggagatgggtgccgtggcagcagacaagggcaagaaaaatgctggaaatgcagaagatccccacacagaaacccagcagccagaagccacagcagcagcgacttcaaaccccagcagcatgacagacacccctggtaacccagcagcaccgtagcctctgccctgtaaaaatcagactcggaaccgatgtgtgctttagggaattttaagttgcatgcatttcagagactttaagtcagttggtttttattagctgcttggtatgcagtaacttgggtggaggcaaaacactaataaaagggctaaaaaggaaaatgatgcttttcttctatattcttactctgtacaaataaagaagttgcttgttgtttgagaagtttaaccccgttgcttgttgttctgcagccctgtctacttgggcacccccaccacctgttagctgtggttgtgcactgtcttttgtagctctggactggaggggtagatggggagtcaattacccatcacataaatatgaaacatttatcagaaatgttgccattttaatgagatgattttcttcatctcataattaaaatacctgactttagagagagtaaaatgtgccaggagccataggaatatctgtatgttggatgactttaatgctacattttaaaaaaagaaaataaagtaataatataactcaaaa

SEQ ID NO: 111024 - DNA, 1146 bp, Homo sapiens
  Payload ID: 1780
  Gene Symbol: BAG3
  Gene Name: BCL2-associated athanogene 3
  ENST ID: ENST00000450186
  CDS Start-End: 171-1146
tcatgtggcacatgtgataccatgtgaggtatctggtgttactaagtcgtcacgtatttcgatgaagggtccacaggctcagaaaagatggaacgagtgactgtggagaagggtagaacatgggcctgcccagagcgcgaaggcagatacagaagagctgcccgtgaaggatgcaggagactccatcctctgccaatggcccttcccgggagggctctaggctgccgcctgctagggaaggccaccctgtgtacccccagctccgaccaggctacattcccattcctgtgctccatgaaggcgctgagaaccggcaggtgcaccctttccatgtctatccccagcctgggatgcagcgattccgaactgaggcggcagcagcggctcctcagaggtcccagtcacctctgcggggcatgccagaaaccactcagccagataaacagtgtggacaggtggcagcggcggcggcagcccagcccccagcctcccacggacctgagcggtcccagtctccagctgcctctgactgctcatcctcatcctcctcggccagcctgccttcctccggcaggagcagcctgggcagtcaccagctcccgcgggggtacatctccattccggtgatacacgagcagaacgttacccggccagcagcccagccctccttccaccaagcccagaagacgcactacccagcgcagcagggggagtaccagacccaccagcctgtgtaccacaagatccagggggatgactgggagccccggcccctgcgggcggcatccccgttcaggtcatctgtccagggtgcatcgagccgggagggctcaccagccaggagcagcacgccactccactccccctcgcccatccgtgtgcacaccgtggtcgacaggcctcagcccatgacccatcgagaaactgcacctgtttcccagcctgaaaacaaaccagaaagtaagccaggcccagttggaccagaactccctcctggacacatcccaattcaagtgatccgcaaagaggtggattctaaacctgtttcccagaagcccccacctccctctgagaaggtagaggtgaaagttccccctgctccagttccttgtcctcctcccagccctggcccttctgctgtcccct

SEQ ID NO: 111025 - DNA, 4453 bp, Homo sapiens
  Payload ID: 1781
  Gene Symbol: BAG4
  Gene Name: BCL2-associated athanogene 4
  Uniprot ID: O95429
  ENST ID: ENST00000287322
  CDS Start-End: 272-1645
aactccattggataaatggcgaggaaacgtatactccctcttaaggaacacggtgtcttccttcgtctccgggttcccgagaccccagagtcactgacctccgtccctcagctttcggggttcggcagcagaaggggcgggcccgggcctgggattggctggcgtcgtccgacccccttcgctgctctccattcgcaatcgcccgcgggcgcctgcgcgatgggtcggccgtggggagcggggcgggaagcgcttcagggcagcggatcccatgtcggccctgaggcgctcgggctacggccccagtgacggtccgtcctacggccgctactacgggcctgggggtggagatgtgccggtacacccacctccacccttatatcctcttcgccctgaacctccccagcctcccatttcctggcgggtgcgcgggggcggcccggcggagaccacctggctgggagaaggcggaggaggcgatggctactatccctcgggaggcgcctggccagagcctggtcgagccggaggaagccaccaggagcagccaccatatcctagctacaattctaactattggaattctactgcgagatctagggctccttacccaagtacatatcctgtaagaccagaattgcaaggccagagtttgaattcttatacaaatggagcgtatggtccaacataccccccaggccctggggcaaatactgcctcatactcaggggcttattatgcacctggttatactcagaccagttactccacagaagttccaagtacttaccgttcatctggcaacagcccaactccagtctctcgttggatctatccccagcaggactgtcagactgaagcaccccctcttagggggcaggttccaggatatccgccttcacagaaccctggaatgaccctgccccattatccttatggagatggtaatcgtagtgttccacaatcaggaccgactgtacgaccacaagaagatgcgtgggcttctcctggtgcttatggaatgggtggccgttatccctggccttcatcagcgccctcagcaccacccggcaatctctacatgactgaaagtacttcaccatggcctagcagtggctctccccagtcacccccttcacccccagtccagcagcccaaggattcttcatacccctatagccaatcagatcaaagcatgaaccggcacaactttccttgcagtgtccatcagtacgaatcctcggggacagtgaacaatgatgattcagatcttttggattcccaagtccagtatagtgctgagcctcagctgtatggtaatgccaccagtgaccatcccaacaatcaagatcaaagtagcagtcttcctgaagaatgtgtaccttcagatgaaagtactcctccgagtattaaaaaaatcatacatgtgctggagaaggtccagtatcttgaacaagaagtagaagaatttgtaggaaaaaagacagacaaagcatactggcttctggaagaaatgctaaccaaggaacttttggaactggattcagttgaaactgggggccaggactctgtacggcaggccagaaaagaggctgtttgtaagattcaggccatactggaaaaattagaaaaaaaaggattatgaaaggatttagaacaaagtggaagcctgttactaacttgaccaaagaacacttgatttggttaattaccctctttttgaaatgcctgttgatgacaagaagcaatacattccagctttcctttgattttatacttgaaaaactggcaaaggaatggaagaatattttagtcatgagttgttttcagttttcagacgaatgaatgtaataggaaactatggagttaccaatattgccaagtagactcactccttaaaaaatttatggatatctacaagctgcttcttaccagcaggagggaaacacacttcacacaacaggcttatcagaaacctaccagatgaaactggatataatctgagacaaacaggatgtgtttttttaaacatctggatatcttgtcacatttttgtacattgtgactgctttcaacatatacttcatgtgtaattatagcttagactttagccttcttggacttctgttttgttttgttatttgcagtttacaaatatagtattattctctacttcttggtacattttgtagtaatatgtttaatataattattcaagagactatattgacagccagatagtatggcagttctgaaaaaatttatatcttttcaccacttgaatatactgcaatgtgtagtgagtaaattgtctccctttttctatagatcattaggttagagtttttttcttcttttttttttttttttttttttaccacttctgctgttcatggtagtagtggaaggtaaatttggaaatggcattgacataaaatgaaaatgtttacggacacttttcttttttgcttttttattgtatttggataaagatccacttaaaagttatctgttttttcctgttttttttttttttccccaaagtgtagttatgttttcactattgctgcttctatagagggcattgtgatagagagttacagatgaaacattaaatgccacagtgagtagaaataattactacaaaaagtaataaatatgattacttggtaatatcattctccatctaaaatactagtttcacctgtgagcagatttcagctcagtttatagttaaaaacaatgagggtaaaatgggattcatgctcagggaatgaatcagccatagttagagtgggaaattattattttcttcatttaaaggtagattttatgtttatttccctaaattgcataagataaaattgtctgtttaataaaaagacatttattaccattattaacagtcattttagagccaaatttaagaaaaggatattgaaagggtctttattggccttgtttgggtaactctatgctgttagatagaagagacttaggtaaataactttttatgtctgaggtgagtacacaatattggttcttggaaaaatagctgtttcttcataagatacccaagtgataattttttttcccctagactgtcaggcctatgagtaaatactaaatctattagctgtccccactcataaaccaaaccaaaccaatacaaacagatgaggagaggaaatgtagtaaaaatactggctgggtcttatgattgggatgagtgattttataagataatatggtgataattttattctaggattttatttttggcctaatataggaatgtttaaaaaaggcttttctatgaaaattagaaatttatacttgaaattaaaagtctagaagggggaggaccttaaagctaagctaccagtaagacaatgaataattcagaagagaacactattcttttactgactgagtgcccaagatgccaatttccatgaagtcttgatttatatatatgtacacatgttatgcacatacatgtttgttttctaacagttattttttaagcttttgagataattttagacttacagaagagttgtaaaagtagtagagttcttgtatactctgcacccaccttgcccttatgttaacatcttacgtaacaatagaacatttgtcaaaattaagaaattaaccttgatataatactaactaaagtagaaagtttaaaaagtagagattttagtcttttcactaatgtccttttactgttccaagacccagccttgcatttagctatcatgcctacgtcctgtcttccagtctgtgacagtgtatcataacaggggatacctgatgttgtaatgtatttctggtgttgttaaccttgatcactatgctaaggtggtgtctgctaggattcgctactgtaaacttactgtgttttccttgtaattattgaatatttgctggagatacccggagactatgcaaatgtcccgtttctgcttaaacttttgctcattttactatccattggcagatcttgcttgtggcagttactactgtggtgttctaatggtgattttctatttctctcaatccttctacatttattattggaattcttctgtaaggaagagttgtcagttctggatttatatttttaactataataagatattcaggataagtatagatttagaacttaaagatgttaaatcatgttaaaattattccaaataccaatatcaaagaaaactaagttggtaatctatctcagaaaatatatgaacttaagaaggaaaatagtatttatgatttgtagaattggttcaacttttgacttaatactgactttggactgaattcaaagttttcttgaaatttcacatctggactttttaaagtgtctacatttatattactttggggatcattttgtcaaagtcttgaataaagttacccagtcctggcatgataaacacaa

SEQ ID NO: 111026 - DNA, 1943 bp, Homo sapiens
  Payload ID: 1781
  Gene Symbol: BAG4
  Gene Name: BCL2-associated athanogene 4
  Uniprot ID: O95429
  ENST ID: ENST00000432471
  CDS Start-End: 283-1548
aggtaagaggaaactccattggataaatggcgaggaaacgtatactccctcttaaggaacacggtgtcttccttcgtctccgggttcccgagaccccagagtcactgacctccgtccctcagctttcggggttcggcagcagaaggggcgggcccgggcctgggattggctggcgtcgtccgacccccttcgctgctctccattcgcaatcgcccgcgggcgcctgcgcgatgggtcggccgtggggagcggggcgggaagcgcttcagggcagcggatcccatgtcggccctgaggcgctcgggctacggccccagtgacggtccgtcctacggccgctactacgggcctgggggtggagatgtgccggtacacccacctccacccttatatcctcttcgccctgaacctccccagcctcccatttcctggcgggtgcgcgggggcggcccggcggagaccacctggctgggagaaggcggaggaggcgatggctactatccctcgggaggcgcctggccagagcctggtcgagccggaggaagccaccagagtttgaattcttatacaaatggagcgtatggtccaacataccccccaggccctggggcaaatactgcctcatactcaggggcttattatgcacctggttatactcagaccagttactccacagaagttccaagtacttaccgttcatctggcaacagcccaactccagtctctcgttggatctatccccagcaggactgtcagactgaagcaccccctcttagggggcaggttccaggatatccgccttcacagaaccctggaatgaccctgccccattatccttatggagatggtaatcgtagtgttccacaatcaggaccgactgtacgaccacaagaagatgcgtgggcttctcctggtgcttatggaatgggtggccgttatccctggccttcatcagcgccctcagcaccacccggcaatctctacatgactgaaagtacttcaccatggcctagcagtggctctccccagtcacccccttcacccccagtccagcagcccaaggattcttcatacccctatagccaatcagatcaaagcatgaaccggcacaactttccttgcagtgtccatcagtacgaatcctcggggacagtgaacaatgatgattcagatcttttggattcccaagtccagtatagtgctgagcctcagctgtatggtaatgccaccagtgaccatcccaacaatcaagatcaaagtagcagtcttcctgaagaatgtgtaccttcagatgaaagtactcctccgagtattaaaaaaatcatacatgtgctggagaaggtccagtatcttgaacaagaagtagaagaatttgtaggaaaaaagacagacaaagcatactggcttctggaagaaatgctaaccaaggaacttttggaactggattcagttgaaactgggggccaggactctgtacggcaggccagaaaagaggctgtttgtaagattcaggccatactggaaaaattagaaaaaaaaggattatgaaaggatttagaacaaagtggaagcctgttactaacttgaccaaagaacacttgatttggttaattaccctctttttgaaatgcctgttgatgacaagaagcaatacattccagctttcctttgattttatacttgaaaaactggcaaaggaatggaagaatattttagtcatgagttgttttcagttttcagacgaatgaatgtaataggaaactatggagttaccaatattgccaagtagactcactccttaaaaaatttatggatatctacaagctgcttcttaccagcaggagggaaacacacttcacacaacaggcttatcagaaacctaccagatgaaactggatataatctgagacaaacaggatgtgtttttttaaacatctggatat

SEQ ID NO: 111027 - DNA, 719 bp, Homo sapiens
  Payload ID: 1781
  Gene Symbol: BAG4
  Gene Name: BCL2-associated athanogene 4
  ENST ID: ENST00000521311
  CDS Start-End: 1-468
gcttattatgcacctggttatactcagaccagttactccacagaagttccaagtacttaccgttcatctggcaacagcccaactccagtctctcgttggatctatccccagcaggactgtcagactgaagcaccccctcttagggggcaggttccaggatatccgccttcacagaaccctggaatgaccctgccccattatccttatggagatggtaatcgtagtgttccacaatcaggaccgactgtacgaccacaagaagatgcgtgggcttctcctggtgcttatggaatgggtggccgttatccctggccttcatcagcgccctcagcaccacccggcaatctctacatgactgaaagtacttcaccatggcctagcagtggctctccccagtcacccccttcacccccagtccagcagcccaaggtaggagacctaaatgttgttcctttaatgtgtgtgtaattaggagaacataacatggtttatatagtttctgtactggtttgtgttaaatggggactaattacaaaaagttggtgactacttatctatagctttacctcagctcggtttcctttttcttttttttaatagactttatatttagagaagatttagattcacatcgtttttgttaaaagacagaaagatacacattttctgtttgttgtaattcttctaaacgttaaatgcaaagatgcattttactactt

SEQ ID NO: 111028 - DNA, 4848 bp, Homo sapiens
  Payload ID: 1782
  Gene Symbol: BAG5
  Gene Name: BCL2-associated athanogene 5
  Uniprot ID: Q9UL15
  ENST ID: ENST00000299204
  CDS Start-End: 228-1571
cggtcactccaggctgcctcgctgcgccgctggcggtgggcgtggcgctgccggcggctaggcgcggacgccggaggaggtgtccccgggtttaggggtgttcggccaggggcggggctgccgggcccgggcgactgccggagctgcggaagtcgtggaagcgtcggcgacgcatcgcgcgatggcgcgggcgggacagtgcttgtgaaactgaacacaacaaaagtatggatatgggaaaccaacatccttctattagtaggcttcaggaaatccaaaaggaagtaaaaagtgtagaacagcaagttatcggcttcagtggtctgtcagatgacaagaattacaagaaactggagaggattctaacaaaacagctttttgaaatagactctgtagatactgaaggaaaaggagatattcagcaagctaggaagcgggcagcacaggagacagaacgtcttctcaaagagttggagcagaatgcaaaccacccacaccggattgaaatacagaacatttttgaggaagcccagtccctcgtgagagagaaaattgtgccattttataatggaggcaactgcgtaactgatgagtttgaagaaggcatccaagatatcattctgaggctgacacatgttaaaactggaggaaaaatctccttgcggaaagcaaggtatcacactttaaccaaaatctgtgcggtgcaagagataatcgaagactgcatgaaaaagcagccttccctgccgctttccgaggatgcacatccttccgttgccaaaatcaacttcgtgatgtgtgaggtgaacaaggcccgaggggtcctgattgcacttctgatgggtgtgaacaacaatgagacctgcaggcacttatcctgtgtgctctcggggctgatcgctgacctggatgctctagatgtgtgcggccggacagaaatcagaaattatcggagggaggtagtagaagatatcaacaaattattgaaatatctggatttggaagaggaagcagacacaactaaagcatttgacctgagacagaatcattccattttaaaaatagaaaaggtcctcaagagaatgagagaaataaaaaatgaacttctccaagcacaaaacccttctgaattgtacctgagctccaaaacagaattgcagggtttaattggacagttggatgaggtaagtcttgaaaaaaacccctgcatccgggaagccaggagaagagcagtgatcgaggtgcaaactctgatcacatatattgacttgaaggaggcccttgagaaaagaaagctgtttgcttgtgaggagcacccatcccataaagccgtctggaacgtccttggaaacttgtctgagatccagggagaagttctttcatttgatggaaatcgaaccgataagaactacatccggctggaagagctgctcaccaagcagctgctagccctggatgctgttgatccgcagggagaagagaagtgtaaggctgccaggaaacaagctgtgaggcttgcgcagaatattctcagctatctcgacctgaaatctgatgaatgggagtactgaaataccagagatctcacttttgatactgttttgcacttcatatgtgcttctatgtatagagagctttcagttcattgatttatacgtgcatatttcagtctcagtatttatgattgaagcaaattctattcagtatctgctgcttttgatgttgcaagacaaatatcattacagcacgttaacttttccattcggatcattatctgtatgatgtggtgtggtttgtttggtttgtccttttttttgcgtttttaatcagaaaacaaaatagaggcagcttttgtagattttaaatgggttgtgcaagcattaaaatgcaggtctttcagaatctagaactaggcataaccttacataatactaggaaaattatgagaaaggggaaatttttggttaaataagagtaaggttcaaacacaagcagtacatgttctgtttcattatgctcgatagaaggcttttttttcacttataaggcctgattggtcctacccagcttaacggggtggggtttttttgtttgttcagacagtctgttcttttgtaaacatttttagttggaaaaacagcatctgcattttccccatcctctacgttttagagaggaatcttgtttttgtgtgcaacataagaaaattatgaaaactaatagccaaaaaacctttgagattgcattaaagagaagggataaaggaccagcaataataccttgtaagttgcttttgtttgtaaaatctgagcttatagttttccttagtgagtaaattcataaggatgggaacatttaaattaagttaatgggcctttaaaaaaaaaaaaaggaaacactcatacctgtagttggaggatgaatactggagacgggttaccaatgtcaggttatactaaaactaaatcagaaagtctgaatgtagcacataatggttctcttctgttgtccaaggctgtaaaatggacagccttgtcacacctccccggtgctgttttacaacgtgagggtagacgctgtcagtaacccagagggaccaggccttcctaggttttctaggcagtcagctgttaaccactcacttagtaaatgtcataactacacctgctccaggaccaatcagtgaaacctgctcggaattaaaggcttcctctgggtgcctgctgaacaactgagctcatgtcatgggcatgtggtggtttctctgttgcctgaaagagccattaaagtcagtcgtgcgtgaagcatctctcttctaaaggatgtgtatttccataaatgctttctgaggatccggtacaaaatgatttcccaaagttctgaagtgccttgagaacatgtgggtccgagtgttataacagactcctcccccgggtcaccttttgcctggtcatcctgttagagtacatctttggaaatccagggtaatattctctttcagagatgctcattgtgtaactctgtgtagggagatagtcactttaaacagctcaaagtagctagctaaaggagtagccttaaatacctaaaagatgacagaagcatagcccttaacaaatcttcagcttgtctctcagtatttcccaatcatgaaaatcccttgctatgtctttcctactagaaatgttctagaatcgctggacggtggggtcagagggcagtcggtatttaggccgtgagcttcccatactactgcaggtccaactcctggcaaccgcgggctcaaggcaggtcattggaatccacgttttggccacagtagttgtaggattgcttttctgtatcataattttagaatgctcttaaaatcttgaggaagagtttttattttttatttatttttgagatggagtctctgttgcccaggctgcagtgcagtggtgccatctcagctcactgcaacctccacctcccaggttcaagcgattctcctgcctcagccacctgagtagctgggagtacaggcatgtggcaccatgcctggctaatttttgtatttttaatagagttgagatttcaccatgatggtcaggctggtctcgaactcctgacctcgtgatccgcccgcctcggccccccaaagtgctgggattaacgggtgtgagccacggcgcccagcccaggaagagtttttaaattagagctctgtttaattataccactgggaaatcatggttacgcttcaggcatattcttccccagagtactacttacattttaaatttcattttgtaaagttaaatgtcagcattccctttaaaagtgtccattgttctttgaaagtagacgtttcagtcattcttttcaaacaagtgtttgtgtaccttttgccaagctgtgggcatcgtgtgtgagtacagggtgctcagctcttccaccgtcattttgaattgttcacatgggtaattggtcatggaaatgatcagattgaccttgattgactgtcaggcatggctttgtttctggtttcaatctgttctcgttccttgtaccggattattctactcctgcaatgaaccctgttgacaccggatttagctcttgtcggccttcgtggggagctgtttgtgttaatatgagctactgcatgtaattcttaaactgggcttgtcacattgtattgtatttttgtgatctgtaatgaaaagaatctgtactgcaagtaaaacctactccccaaaaatgtgtggctttgggtctgcattaaacgctgtagtccatgttcatgccaaaaatggctgggaacgtttgctttatttacattcagtcagcgttgctttcagatcacactttatccacacaggaaagccagtcagcctataatgaagtagttattaaaataaatgtaatgaatatgtctacaaagtatagtttagtggtttattttgctaaaatgcacatatatttgatataatttagtttgagaagttcagctagtttttctcctttgtttgactttgtcaatttctatctggtttttaagggtctgagcttagcttgtgcatgcaaggttttgggtttttttattttttttttgagcacagcttttcaccttttaatttgttgggtatttttctcttaataagagaaatattggccatcgatttttacatataatacaagtgtgtttttccagtacattggttcctgtcccctctctgtgaactgtttgagtattggaacagtatgtcttcaataattcaatgttactttgagatacatgtgttaatatacccttagttattcttgaaataaaaccagtctcttacgcttgcagtggagaaaggc

SEQ ID NO: 111029 - DNA, 1960 bp, Homo sapiens
  Payload ID: 1782
  Gene Symbol: BAG5
  Gene Name: BCL2-associated athanogene 5
  Uniprot ID: Q9UL15
  ENST ID: ENST00000337322
  CDS Start-End: 292-1758
gggccaagacgcccggagcggctgctgcagccagtagcggccccttcaccggctgccccgctcagacctagtcgggaggggtgcgaggcatgcagctgggggcccagctccggtgccgcaccccgtaaagggctgatcttccacctcgccacctcagccacgggacgccaagaccgcatccaattcagacttcttttgggtaaagggccaagagggaagggcgaggcggggaggaagcagctcgggccgccttccctccgtggcctccaggacatccgccggggatagattatgcgtttccattggttacccaccttgagcgagccgtttgatagaaaccaagagcttgaaacgtgcattaggccattgtggactcccagtgggagtgcttgtgaaactgaacacaacaaaagtatggatatgggaaaccaacatccttctattagtaggcttcaggaaatccaaaaggaagtaaaaagtgtagaacagcaagttatcggcttcagtggtctgtcagatgacaagaattacaagaaactggagaggattctaacaaaacagctttttgaaatagactctgtagatactgaaggaaaaggagatattcagcaagctaggaagcgggcagcacaggagacagaacgtcttctcaaagagttggagcagaatgcaaaccacccacaccggattgaaatacagaacatttttgaggaagcccagtccctcgtgagagagaaaattgtgccattttataatggaggcaactgcgtaactgatgagtttgaagaaggcatccaagatatcattctgaggctgacacatgttaaaactggaggaaaaatctccttgcggaaagcaaggtatcacactttaaccaaaatctgtgcggtgcaagagataatcgaagactgcatgaaaaagcagccttccctgccgctttccgaggatgcacatccttccgttgccaaaatcaacttcgtgatgtgtgaggtgaacaaggcccgaggggtcctgattgcacttctgatgggtgtgaacaacaatgagacctgcaggcacttatcctgtgtgctctcggggctgatcgctgacctggatgctctagatgtgtgcggccggacagaaatcagaaattatcggagggaggtagtagaagatatcaacaaattattgaaatatctggatttggaagaggaagcagacacaactaaagcatttgacctgagacagaatcattccattttaaaaatagaaaaggtcctcaagagaatgagagaaataaaaaatgaacttctccaagcacaaaacccttctgaattgtacctgagctccaaaacagaattgcagggtttaattggacagttggatgaggtaagtcttgaaaaaaacccctgcatccgggaagccaggagaagagcagtgatcgaggtgcaaactctgatcacatatattgacttgaaggaggcccttgagaaaagaaagctgtttgcttgtgaggagcacccatcccataaagccgtctggaacgtccttggaaacttgtctgagatccagggagaagttctttcatttgatggaaatcgaaccgataagaactacatccggctggaagagctgctcaccaagcagctgctagccctggatgctgttgatccgcagggagaagagaagtgtaaggctgccaggaaacaagctgtgaggcttgcgcagaatattctcagctatctcgacctgaaatctgatgaatgggagtactgaaataccagagatctcacttttgatactgttttgcacttcatatgtgcttctatgtatagagagctttcagttcattgatttatacgtgcatatttcagtctcagtatttatgattgaagcaaattctattcagtatctgctgcttttgatgttgcaagacaaatatcattacagcacgttaacttttccattcggatcatta

SEQ ID NO: 111030 - DNA, 4867 bp, Homo sapiens
  Payload ID: 1782
  Gene Symbol: BAG5
  Gene Name: BCL2-associated athanogene 5
  Uniprot ID: Q9UL15
  ENST ID: ENST00000445922
  CDS Start-End: 248-1591
gcaggcgcgccctggcacccgggccaagacgcccggagcggctgctgcagccagtagcggccccttcaccggctgccccgctcagacctagtcgggaggggtgcgaggcatgcagctgggggcccagctccggtgccgcaccccgtaaagggctgatcttccacctcgccacctcagccacgggacgccaagaccgcatccaattcagacttcttttggtgcttgtgaaactgaacacaacaaaagtatggatatgggaaaccaacatccttctattagtaggcttcaggaaatccaaaaggaagtaaaaagtgtagaacagcaagttatcggcttcagtggtctgtcagatgacaagaattacaagaaactggagaggattctaacaaaacagctttttgaaatagactctgtagatactgaaggaaaaggagatattcagcaagctaggaagcgggcagcacaggagacagaacgtcttctcaaagagttggagcagaatgcaaaccacccacaccggattgaaatacagaacatttttgaggaagcccagtccctcgtgagagagaaaattgtgccattttataatggaggcaactgcgtaactgatgagtttgaagaaggcatccaagatatcattctgaggctgacacatgttaaaactggaggaaaaatctccttgcggaaagcaaggtatcacactttaaccaaaatctgtgcggtgcaagagataatcgaagactgcatgaaaaagcagccttccctgccgctttccgaggatgcacatccttccgttgccaaaatcaacttcgtgatgtgtgaggtgaacaaggcccgaggggtcctgattgcacttctgatgggtgtgaacaacaatgagacctgcaggcacttatcctgtgtgctctcggggctgatcgctgacctggatgctctagatgtgtgcggccggacagaaatcagaaattatcggagggaggtagtagaagatatcaacaaattattgaaatatctggatttggaagaggaagcagacacaactaaagcatttgacctgagacagaatcattccattttaaaaatagaaaaggtcctcaagagaatgagagaaataaaaaatgaacttctccaagcacaaaacccttctgaattgtacctgagctccaaaacagaattgcagggtttaattggacagttggatgaggtaagtcttgaaaaaaacccctgcatccgggaagccaggagaagagcagtgatcgaggtgcaaactctgatcacatatattgacttgaaggaggcccttgagaaaagaaagctgtttgcttgtgaggagcacccatcccataaagccgtctggaacgtccttggaaacttgtctgagatccagggagaagttctttcatttgatggaaatcgaaccgataagaactacatccggctggaagagctgctcaccaagcagctgctagccctggatgctgttgatccgcagggagaagagaagtgtaaggctgccaggaaacaagctgtgaggcttgcgcagaatattctcagctatctcgacctgaaatctgatgaatgggagtactgaaataccagagatctcacttttgatactgttttgcacttcatatgtgcttctatgtatagagagctttcagttcattgatttatacgtgcatatttcagtctcagtatttatgattgaagcaaattctattcagtatctgctgcttttgatgttgcaagacaaatatcattacagcacgttaacttttccattcggatcattatctgtatgatgtggtgtggtttgtttggtttgtccttttttttgcgtttttaatcagaaaacaaaatagaggcagcttttgtagattttaaatgggttgtgcaagcattaaaatgcaggtctttcagaatctagaactaggcataaccttacataatactaggaaaattatgagaaaggggaaatttttggttaaataagagtaaggttcaaacacaagcagtacatgttctgtttcattatgctcgatagaaggcttttttttcacttataaggcctgattggtcctacccagcttaacggggtggggtttttttgtttgttcagacagtctgttcttttgtaaacatttttagttggaaaaacagcatctgcattttccccatcctctacgttttagagaggaatcttgtttttgtgtgcaacataagaaaattatgaaaactaatagccaaaaaacctttgagattgcattaaagagaagggataaaggaccagcaataataccttgtaagttgcttttgtttgtaaaatctgagcttatagttttccttagtgagtaaattcataaggatgggaacatttaaattaagttaatgggcctttaaaaaaaaaaaaaggaaacactcatacctgtagttggaggatgaatactggagacgggttaccaatgtcaggttatactaaaactaaatcagaaagtctgaatgtagcacataatggttctcttctgttgtccaaggctgtaaaatggacagccttgtcacacctccccggtgctgttttacaacgtgagggtagacgctgtcagtaacccagagggaccaggccttcctaggttttctaggcagtcagctgttaaccactcacttagtaaatgtcataactacacctgctccaggaccaatcagtgaaacctgctcggaattaaaggcttcctctgggtgcctgctgaacaactgagctcatgtcatgggcatgtggtggtttctctgttgcctgaaagagccattaaagtcagtcgtgcgtgaagcatctctcttctaaaggatgtgtatttccataaatgctttctgaggatccggtacaaaatgatttcccaaagttctgaagtgccttgagaacatgtgggtccgagtgttataacagactcctcccccgggtcaccttttgcctggtcatcctgttagagtacatctttggaaatccagggtaatattctctttcagagatgctcattgtgtaactctgtgtagggagatagtcactttaaacagctcaaagtagctagctaaaggagtagccttaaatacctaaaagatgacagaagcatagcccttaacaaatcttcagcttgtctctcagtatttcccaatcatgaaaatcccttgctatgtctttcctactagaaatgttctagaatcgctggacggtggggtcagagggcagtcggtatttaggccgtgagcttcccatactactgcaggtccaactcctggcaaccgcgggctcaaggcaggtcattggaatccacgttttggccacagtagttgtaggattgcttttctgtatcataattttagaatgctcttaaaatcttgaggaagagtttttattttttatttatttttgagatggagtctctgttgcccaggctgcagtgcagtggtgccatctcagctcactgcaacctccacctcccaggttcaagcgattctcctgcctcagccacctgagtagctgggagtacaggcatgtggcaccatgcctggctaatttttgtatttttaatagagttgagatttcaccatgatggtcaggctggtctcgaactcctgacctcgtgatccgcccgcctcggccccccaaagtgctgggattaacgggtgtgagccacggcgcccagcccaggaagagtttttaaattagagctctgtttaattataccactgggaaatcatggttacgcttcaggcatattcttccccagagtactacttacattttaaatttcattttgtaaagttaaatgtcagcattccctttaaaagtgtccattgttctttgaaagtagacgtttcagtcattcttttcaaacaagtgtttgtgtaccttttgccaagctgtgggcatcgtgtgtgagtacagggtgctcagctcttccaccgtcattttgaattgttcacatgggtaattggtcatggaaatgatcagattgaccttgattgactgtcaggcatggctttgtttctggtttcaatctgttctcgttccttgtaccggattattctactcctgcaatgaaccctgttgacaccggatttagctcttgtcggccttcgtggggagctgtttgtgttaatatgagctactgcatgtaattcttaaactgggcttgtcacattgtattgtatttttgtgatctgtaatgaaaagaatctgtactgcaagtaaaacctactccccaaaaatgtgtggctttgggtctgcattaaacgctgtagtccatgttcatgccaaaaatggctgggaacgtttgctttatttacattcagtcagcgttgctttcagatcacactttatccacacaggaaagccagtcagcctataatgaagtagttattaaaataaatgtaatgaatatgtctacaaagtatagtttagtggtttattttgctaaaatgcacatatatttgatataatttagtttgagaagttcagctagtttttctcctttgtttgactttgtcaatttctatctggtttttaagggtctgagcttagcttgtgcatgcaaggttttgggtttttttattttttttttgagcacagcttttcaccttttaatttgttgggtatttttctcttaataagagaaatattggccatcgatttttacatataatacaagtgtgtttttccagtacattggttcctgtcccctctctgtgaactgtttgagtattggaacagtatgtcttcaataattcaatgttactttgagatacatgtgttaatatacccttagttattcttgaaataaaaccagtctcttacgcttgcagtggagaaagg

SEQ ID NO: 111031 - DNA, 878 bp, Homo sapiens
  Payload ID: 1782
  Gene Symbol: BAG5
  Gene Name: BCL2-associated athanogene 5
  ENST ID: ENST00000557666
  CDS Start-End: 245-878
cggccgctccttggtcgcggtcactccaggctgcctcgctgcgccgctggcggtgggcgtggcgctgccggcggctaggcgcggacgccggaggaggtgtccccgggtttaggggtgttcggccaggggcggggctgccgggcccgggcgactgccggagctgcggaagtcgtggaagcgtcggcgacgcatcgcgcgatggcgcgggcgggacagtgcttgtgaaactgaacacaacaaaagtatggatatgggaaaccaacatccttctattagtaggcttcaggaaatccaaaaggaagtaaaaagtgtagaacagcaagttatcggcttcagtggtctgtcagatgacaagaattacaagaaactggagaggattctaacaaaacagctttttgaaatagactctgtagatactgaaggaaaaggagatattcagcaagctaggaagcgggcagcacaggagacagaacgtcttctcaaagagttggagcagaatgcaaaccacccacaccggattgaaatacagaacatttttgaggaagcccagtccctcgtgagagagaaaattgtgccattttataatggaggcaactgcgtaactgatgagtttgaagaaggcatccaagatatcattctgaggctgacacatgttaaaactggaggaaaaatctccttgcggaaagcaaggtatcacactttaaccaaaatctgtgcggtgcaagagataatcgaagactgcatgaaaaagcagccttccctgccgctttccgaggatgcacatccttccgttgccaaaatcaacttcgtgatgtgtgaggtgaacaaggcccgaggggtcctgattgcacttctgatgggtgtgaacaacaatgaga

SEQ ID NO: 111032 - DNA, 3779 bp, Homo sapiens
  Payload ID: 1783
  Gene Symbol: BAG6
  Gene Name: BCL2-associated athanogene 6
  Uniprot ID: P46379
  ENST ID: ENST00000211379
  CDS Start-End: 296-3676
gggggtggggcgatgcttaagtgtccacgcatccgtagtgcgacgcacgcaggcgtagtacggtcccccgggcgacagcggtggcggctcctcggggtgctcggctccctcccacctaggccggccccggcccgactcgccctcagaaactcactgtttggggctgcggactttctcgtcgtgccccacaaaagtaaagcttggggacctggggggagccggaagtatcgcttcgagatccccaaatactatcggggaaacggaagtggccgtcggtggcagagacctgtcggccatggagcctaatgatagtaccagtaccgctgtggaggagcctgacagcttggaggtgttggtgaagaccttggactctcaaactcgtacctttattgtgggggcccagatgaatgtaaaagagtttaaggagcacattgctgcctctgtcagcatcccatctgaaaaacaacggctcatttaccagggacgagttctgcaagatgataagaagcttcaggaatacaatgttgggggaaaggttatccacctggtggaacgggctcctcctcagactcacctcccttctggggcatcttctgggacggggtctgcctcagccactcatggtgggggatccccccctggtactcgggggcctggggcctctgttcatgaccggaatgccaacagctatgtcatggttggaaccttcaatcttcctagtgacggctctgctgtggatgttcacatcaacatggaacaggccccgattcagagtgagccccgggtacggctggtgatggctcagcacatgatcagggatatacagaccttactatcccggatggagtgtcgaggagggccccaaccgcagcacagtcagccgcccccgcagccaccggctgtgaccccggagccagtagccttgagctctcaaacatcagaaccagttgaaagtgaagcacctccccgggagcccatggaggcagaagaagtggaggagcgtgccccagcccagaacccggagctcactcctggcccagccccagcgggcccaacacctgccccggaaacaaatgcacccaaccatccttcccctgcggagtatgtcgaggtgctccaggagctacagcggctggagagtcgcctccagcccttcttgcagcgctactacgaggttctgggtgctgctgccaccacggactacaataacaatcacgagggccgggaggaggatcagcggttgatcaacttggtaggggagagcctgcgactgctgggcaacacctttgttgcactgtctgacctgcgctgcaatctggcctgcacgcccccacgacacctgcatgtggtccggcctatgtctcactacaccacccccatggtgctccagcaggcagccattcccatacagatcaatgtgggaaccactgtgaccatgacaggaaatgggactcggccccccccaactcccaatgcagaggcacctccccctggtcctgggcaggcctcatccgtggctccgtcttctaccaatgtcgagtcctcagctgagggggctcccccgccaggtccagctcccccgccagccaccagccacccgagggtcatccggatttcccaccagagtgtggaacccgtggtcatgatgcacatgaacattcaagattctggcacacagcctggtggtgttccgagtgctcccactggccccctgggaccccctggtcatggccaaaccctgggacagcaggtgccaggcttcccaacagctccaacccgggtggtgattgcccggcccactcctccacaggctcggccttcccatcctggagggcccccagtctctgggacactgcagggcgccggtctgggtaccaatgcctcgttggcccagatggtgagcggccttgtggggcagcttcttatgcagccagtccttgtggctcaggggaccccaggtatggctccaccgccagcccctgccactgcttctgccagtgctggcaccaccaacacagctaccacagctggccccgctcctggggggcctgcccagcctccacccacccctcaaccctccatggctgatcttcagttctctcagcttctggggaacctgctagggcctgcagggccaggggctggagggtctggtgtggcttctcccaccatcactgtggcgatgcctggtgtccctgcctttctccaaggcatgactgacttcttgcaggcaacacagacagcccctccaccacccccacctcctccacccccaccacctgccccagagcagcagaccatgcccccaccaggctccccttctggtggcgcagggagtcctggaggcctgggtcttgagagcctgtcaccggagttttttacctcagtggtgcagggtgtgctcagctccctgctgggctccctgggggctcgggctggcagcagtgaaagtattgctgccttcatacaacgcctcagtggatccagcaacatctttgagcctggagctgatggggcccttggattctttggggccttgctttctcttctgtgccagaacttctctatggtggacgtagtgatgcttctccatgggcatttccagccactacaacggctccagccccagctgcgatccttcttccaccagcactacctgggtggtcaggagcccacacccagtaacatccggatggcaacccacacattgatcacggggctagaagagtatgtgcgggagagtttttccttggtgcaggttcagccaggtgtggacatcatccggacaaacctggaatttctccaagagcagtttaatagcattgctgcgcatgtgctgcattgcacagatagtggatttggggcccggttgctggagttgtgtaaccaaggcctgtttgaatgcctggccctaaacctgcactgcttggggggacagcagatggagcttgctgctgttatcaatggccgaattcgtcgtatgtctcgtggggtgaatccctccttggtgagctggctgaccactatgatgggactgaggcttcaggtggtactggagcacatgcctgtaggccctgatgccattctcagatacgttcgcagggttggtgatcccccccagccacttcctgaggagccaatggaagttcagggagcagaaagagcttcccctgagcctcagcgggagaatgcttccccagcccctggaacaacagcagaagaggccatgtcccgaggtccacctcctgctcctgaggggggctcccgggatgaacaggatggagcttcagctgagacagaaccttgggcagctgcagtccccccagaatgggtccctattatccagcaggacattcagagccagcggaaggtgaaaccgcagccccctctgagtgatgcctacctcagtggtatgcctgccaagagacgcaagacgatgcagggtgagggcccccagctgcttctctcagaggctgtgagccgggcagctaaggcagccggagctcggcccctgacgagccccgagagcctgagccgggacctggaggcaccagaggttcaggagagctacaggcagcagctccggtctgatatacaaaaacgactgcaggaagaccccaactacagtccccagcgcttccccaatgcccagcgggcctttgctgatgatccttagctctttgctctatggcccttcctcatcaggggaccgtttcccccctcttccttcacagtatttaagaaataaaagtcggatttttctggctgctttctctcta

SEQ ID NO: 111033 - DNA, 3755 bp, Homo sapiens
  Payload ID: 1783
  Gene Symbol: BAG6
  Gene Name: BCL2-associated athanogene 6
  Uniprot ID: P46379
  ENST ID: ENST00000361076
  CDS Start-End: 250-3648
ggcgacagcggtggcggctcctcggggtgctcggctccctcccacctaggccggccccggcccgactcgccctcagaaactcactgtttggggctgcggactttctcgtcgtgccccacaaaagtaaagcttggggacctggggggagccggaagtatcgcttcgagatccccaaatactatcggggaaacggaagtggccgtcggtggcaggtttgggggagaccggaagtgacgagacctgtcggccatggagcctaatgatagtaccagtaccgctgtggaggagcctgacagcttggaggtgttggtgaagaccttggactctcaaactcgtacctttattgtgggggcccagatgaatgtaaaagagtttaaggagcacattgctgcctctgtcagcatcccatctgaaaaacaacggctcatttaccagggacgagttctgcaagatgataagaagcttcaggaatacaatgttgggggaaaggttatccacctggtggaacgggctcctcctcagactcacctcccttctggggcatcttctgggacggggtctgcctcagccactcatggtgggggatccccccctggtactcgggggcctggggcctctgttcatgaccggaatgccaacagctatgtcatggttggaaccttcaatcttcctagtgacggctctgctgtggatgttcacatcaacatggaacaggccccgattcagagtgagccccgggtacggctggtgatggctcagcacatgatcagggatatacagaccttactatcccggatggagactctcccctaccttcagtgtcgaggagggccccaaccgcagcacagtcagccgcccccgcagccaccggctgtgaccccggagccagtagccttgagctctcaaacatcagaaccagttgaaagtgaagcacctccccgggagcccatggaggcagaagaagtggaggagcgtgccccagcccagaacccggagctcactcctggcccagccccagcgggcccaacacctgccccggaaacaaatgcacccaaccatccttcccctgcggagtatgtcgaggtgctccaggagctacagcggctggagagtcgcctccagcccttcttgcagcgctactacgaggttctgggtgctgctgccaccacggactacaataacaatcacgagggccgggaggaggatcagcggttgatcaacttggtaggggagagcctgcgactgctgggcaacacctttgttgcactgtctgacctgcgctgcaatctggcctgcacgcccccacgacacctgcatgtggtccggcctatgtctcactacaccacccccatggtgctccagcaggcagccattcccatacagatcaatgtgggaaccactgtgaccatgacaggaaatgggactcggccccccccaactcccaatgcagaggcacctccccctggtcctgggcaggcctcatccgtggctccgtcttctaccaatgtcgagtcctcagctgagggggctcccccgccaggtccagctcccccgccagccaccagccacccgagggtcatccggatttcccaccagagtgtggaacccgtggtcatgatgcacatgaacattcaagattctggcacacagcctggtggtgttccgagtgctcccactggccccctgggaccccctggtcatggccaaaccctgggacagcaggtgccaggcttcccaacagctccaacccgggtggtgattgcccggcccactcctccacaggctcggccttcccatcctggagggcccccagtctctgggacactgcagggcgccggtctgggtaccaatgcctcgttggcccagatggtgagcggccttgtggggcagcttcttatgcagccagtccttgtggctcaggggaccccaggtatggctccaccgccagcccctgccactgcttctgccagtgctggcaccaccaacacagctaccacagctggccccgctcctggggggcctgcccagcctccacccacccctcaaccctccatggctgatcttcagttctctcagcttctggggaacctgctagggcctgcagggccaggggctggagggtctggtgtggcttctcccaccatcactgtggcgatgcctggtgtccctgcctttctccaaggcatgactgacttcttgcaggcaacacagacagcccctccaccacccccacctcctccacccccaccacctgccccagagcagcagaccatgcccccaccaggctccccttctggtggcgcagggagtcctggaggcctgggtcttgagagcctgtcaccggagttttttacctcagtggtgcagggtgtgctcagctccctgctgggctccctgggggctcgggctggcagcagtgaaagtattgctgccttcatacaacgcctcagtggatccagcaacatctttgagcctggagctgatggggcccttggattctttggggccttgctttctcttctgtgccagaacttctctatggtggacgtagtgatgcttctccatgggcatttccagccactacaacggctccagccccagctgcgatccttcttccaccagcactacctgggtggtcaggagcccacacccagtaacatccggatggcaacccacacattgatcacggggctagaagagtatgtgcgggagagtttttccttggtgcaggttcagccaggtgtggacatcatccggacaaacctggaatttctccaagagcagtttaatagcattgctgcgcatgtgctgcattgcacagatagtggatttggggcccggttgctggagttgtgtaaccaaggcctgtttgaatgcctggccctaaacctgcactgcttggggggacagcagatggagcttgctgctgttatcaatggccgaattcgtcgtatgtctcgtggggtgaatccctccttggtgagctggctgaccactatgatgggactgaggcttcaggtggtactggagcacatgcctgtaggccctgatgccattctcagatacgttcgcagggttggtgatcccccccagccacttcctgaggagccaatggaagttcagggagcagaaagagcttcccctgagcctcagcgggagaatgcttccccagcccctggaacaacagcagaagaggccatgtcccgaggtccacctcctgctcctgaggggggctcccgggatgaacaggatggagcttcagctgagacagaaccttgggcagctgcagtccccccagaatgggtccctattatccagcaggacattcagagccagcggaaggtgaaaccgcagccccctctgagtgatgcctacctcagtggtatgcctgccaagagacgcaagacgatgcagggtgagggcccccagctgcttctctcagaggctgtgagccgggcagctaaggcagccggagctcggcccctgacgagccccgagagcctgagccgggacctggaggcaccagaggttcaggagagctacaggcagcagctccggtctgatatacaaaaacgactgcaggaagaccccaactacagtccccagcgcttccccaatgcccagcgggcctttgctgatgatccttagctctttctttgctctatggcccttcctcatcaggggaccgtttcccccctcttccttcacagtatttaagaaataaaagtcggatttttctggctgctttctctcta

SEQ ID NO: 111034 - DNA, 3626 bp, Homo sapiens
  Payload ID: 1783
  Gene Symbol: BAG6
  Gene Name: BCL2-associated athanogene 6
  Uniprot ID: P46379
  ENST ID: ENST00000362049
  CDS Start-End: 291-3524
tggggcgatgcttaagtgtccacgcatccgtagtgcgacgcacgcaggcgtagtacggtcccccgggcgacagcggtggcggctcctcggggtgctcggctccctcccacctaggccggccccggcccgactcgccctcagaaactcactgtttggggctgcggactttctcgtcgtgccccacaaaagtaaagcttggggacctggggggagccggaagtatcgcttcgagatccccaaatactatcggggaaacggaagtggccgtcggtggcagagacctgtcggccatggagcctaatgatagtaccagtaccgctgtggaggagcctgacagcttggaggtgttggtgaagaccttggactctcaaactcgtacctttattgtgggggcccagatgaatgtaaaagagtttaaggagcacattgctgcctctgtcagcatcccatctgaaaaacaacggctcatttaccagggacgagttctgcaagatgataagaagcttcaggaatacaatgttgggggaaaggttatccacctggtggaacgggctcctcctcagactcacctcccttctggggcatcttctgggacggggtctgcctcagccactcatggtgggggatccccccctggtactcgggggcctggggcctctgttcatgaccggaatgccaacagctatgtcatggttggaaccttcaatcttcctagtgacggctctgctgtggatgttcacatcaacatggaacaggccccgattcagagtgagccccgggtacggctggtgatggctcagcacatgatcagggatatacagaccttactatcccggatggagtgtcgaggagggccccaaccgcagcacagtcagccgcccccgcagccaccggctgtgaccccggagccagtagccttgagctctcaaacatcagaaccagttgaaagtgaagcacctccccgggagcccatggaggcagaagaagtggaggagcgtgccccagcccagaacccggagctcactcctggcccagccccagcgggcccaacacctgccccggaaacaaatgcacccaaccatccttcccctgcggagtatgtcgaggtgctccaggagctacagcggctggagagtcgcctccagcccttcttgcagcgctactacgaggttctgggtgctgctgccaccacggactacaataacaatcacgagggccgggaggaggatcagcggttgatcaacttggtaggggagagcctgcgactgctgggcaacacctttgttgcactgtctgacctgcgctgcaatctggcctgcacgcccccacgacacctgcatgtggtccggcctatgtctcactacaccacccccatggtgctccagcaggcagccattcccatacagatcaatgtgggaaccactgtgaccatgacaggaaatgggactcggccccccccaactcccaatgcagaggcacctccccctggtcctgggcaggcctcatccgtggctccgtcttctaccaatgtcgagtcctcagctgagggggctcccccgccaggtccagctcccccgccagccaccagccacccgagggtcatccggatttcccaccagagtgtggaacccgtggtcatgatgcacatgaacattcaagattctggcacacagcctggtggtgttccgagtgctcccactggccccctgggaccccctggtcatggccaaaccctgggacagcaggtgccaggcttcccaacagctccaacccgggtggtgattgcccggcccactcctccacaggctcggccttcccatcctggagggcccccagtctctgggacactgcagggcgccggtctgggtaccaatgcctcgttggcccagatggtgagcggccttgtggggcagcttcttatgcagccagtccttgtggctcaggggaccccaggtatggctccaccgccagcccctgccactgcttctgccagtgctggcaccaccaacacagctaccacagctggccccgctcctggggggcctgcccagcctccacccacccctcaaccctccatggctgatcttcagttctctcagcttctggggaacctgctagggcctgcagggccaggggctggagggtctggtgtggcttctcccaccatcactgtggcgatgcctggtgtccctgcctttctccaaggcatgactgacttcttgcaggcaacacagacagcccctccaccacccccacctcctccacccccaccacctgccccagagcagcagaccatgcccccaccaggctccccttctggtggcgcagggagtcctggaggcctgggtcttgagagcctgtcaccggagttttttacctcagtggtgcagggtgtgctcagctccctgctgggctccctgggggctcgggctggcagcagtgaaagtattgctgccttcatacaacgcctcagtggatccagcaacatctttgagcctggagctgatggggcccttggattctttggggccttgctttctcttctgtgccagaacttctctatggtggacgtagtgatgcttctccatgggcatttccagccactacaacggctccagccccagctgcgatccttcttccaccagcactacctgggtggtcaggagcccacacccagtaacatccggatggcaacccacacattgatcacggggctagaagagtatgtgcgggagagtttttccttggtgcaggttcagccaggtgtggacatcatccggacaaacctggaatttctccaagagcagtttaatagcattgctgcgcatgtgctgcattgcacagatagtggatttggggcccggttgctggagttgtgtaaccaaggcctgtttgaatgcctggccctaaacctgcactgcttggggggacagcagatggagcttgctgctgttatcaatggccgaattcgtcgtatgtctcgtggggtgaatccctccttggtgagctggctgaccactatgatgggactgaggcttcaggtggtactggagcacatgcctgtaggccctgatgccattctcagatacgttcgcagggttggtgatcccccccagccacttcctgaggagccaatggaagttcagggagcagaaagagcttcccctgagcctcagcgggagaatgcttccccagcccctggaacaacagcagaagaggccatgtcccgaggtccacctcctgctcctgaggggggctcccgggatgaacaggatggagcttcagctgagacagaaccttgggcagctgcagtccccccagaatgggtccctattatccagcaggacattcagagccagcggaaggtgaaaccgcagccccctctgagtgatgcctacctcagtggtatgcctgccaagagacgcaagctccggtctgatatacaaaaacgactgcaggaagaccccaactacagtccccagcgcttccccaatgcccagcgggcctttgctgatgatccttagctctttgctctatggcccttcctcatcaggggaccgtttcccccctcttccttcacagtatttaagaaataaaagtcggatttttctggctgctttctctct

SEQ ID NO: 111035 - DNA, 3815 bp, Homo sapiens
  Payload ID: 1783
  Gene Symbol: BAG6
  Gene Name: BCL2-associated athanogene 6
  Uniprot ID: P46379
  ENST ID: ENST00000375964
  CDS Start-End: 315-3713
tggggcgatgcttaagtgtccacgcatccgtagtgcgacgcacgcaggcgtagtacggtcccccgggcgacagcggtggcggctcctcggggtgctcggctccctcccacctaggccggccccggcccgactcgccctcagaaactcactgtttggggctgcggactttctcgtcgtgccccacaaaagtaaagcttggggacctggggggagccggaagtatcgcttcgagatccccaaatactatcggggaaacggaagtggccgtcggtggcaggtttgggggagaccggaagtgacgagacctgtcggccatggagcctaatgatagtaccagtaccgctgtggaggagcctgacagcttggaggtgttggtgaagaccttggactctcaaactcgtacctttattgtgggggcccagatgaatgtaaaagagtttaaggagcacattgctgcctctgtcagcatcccatctgaaaaacaacggctcatttaccagggacgagttctgcaagatgataagaagcttcaggaatacaatgttgggggaaaggttatccacctggtggaacgggctcctcctcagactcacctcccttctggggcatcttctgggacggggtctgcctcagccactcatggtgggggatccccccctggtactcgggggcctggggcctctgttcatgaccggaatgccaacagctatgtcatggttggaaccttcaatcttcctagtgacggctctgctgtggatgttcacatcaacatggaacaggccccgattcagagtgagccccgggtacggctggtgatggctcagcacatgatcagggatatacagaccttactatcccggatggagactctcccctaccttcagtgtcgaggagggccccaaccgcagcacagtcagccgcccccgcagccaccggctgtgaccccggagccagtagccttgagctctcaaacatcagaaccagttgaaagtgaagcacctccccgggagcccatggaggcagaagaagtggaggagcgtgccccagcccagaacccggagctcactcctggcccagccccagcgggcccaacacctgccccggaaacaaatgcacccaaccatccttcccctgcggagtatgtcgaggtgctccaggagctacagcggctggagagtcgcctccagcccttcttgcagcgctactacgaggttctgggtgctgctgccaccacggactacaataacaatcacgagggccgggaggaggatcagcggttgatcaacttggtaggggagagcctgcgactgctgggcaacacctttgttgcactgtctgacctgcgctgcaatctggcctgcacgcccccacgacacctgcatgtggtccggcctatgtctcactacaccacccccatggtgctccagcaggcagccattcccatacagatcaatgtgggaaccactgtgaccatgacaggaaatgggactcggccccccccaactcccaatgcagaggcacctccccctggtcctgggcaggcctcatccgtggctccgtcttctaccaatgtcgagtcctcagctgagggggctcccccgccaggtccagctcccccgccagccaccagccacccgagggtcatccggatttcccaccagagtgtggaacccgtggtcatgatgcacatgaacattcaagattctggcacacagcctggtggtgttccgagtgctcccactggccccctgggaccccctggtcatggccaaaccctgggacagcaggtgccaggcttcccaacagctccaacccgggtggtgattgcccggcccactcctccacaggctcggccttcccatcctggagggcccccagtctctgggacactgcagggcgccggtctgggtaccaatgcctcgttggcccagatggtgagcggccttgtggggcagcttcttatgcagccagtccttgtggctcaggggaccccaggtatggctccaccgccagcccctgccactgcttctgccagtgctggcaccaccaacacagctaccacagctggccccgctcctggggggcctgcccagcctccacccacccctcaaccctccatggctgatcttcagttctctcagcttctggggaacctgctagggcctgcagggccaggggctggagggtctggtgtggcttctcccaccatcactgtggcgatgcctggtgtccctgcctttctccaaggcatgactgacttcttgcaggcaacacagacagcccctccaccacccccacctcctccacccccaccacctgccccagagcagcagaccatgcccccaccaggctccccttctggtggcgcagggagtcctggaggcctgggtcttgagagcctgtcaccggagttttttacctcagtggtgcagggtgtgctcagctccctgctgggctccctgggggctcgggctggcagcagtgaaagtattgctgccttcatacaacgcctcagtggatccagcaacatctttgagcctggagctgatggggcccttggattctttggggccttgctttctcttctgtgccagaacttctctatggtggacgtagtgatgcttctccatgggcatttccagccactacaacggctccagccccagctgcgatccttcttccaccagcactacctgggtggtcaggagcccacacccagtaacatccggatggcaacccacacattgatcacggggctagaagagtatgtgcgggagagtttttccttggtgcaggttcagccaggtgtggacatcatccggacaaacctggaatttctccaagagcagtttaatagcattgctgcgcatgtgctgcattgcacagatagtggatttggggcccggttgctggagttgtgtaaccaaggcctgtttgaatgcctggccctaaacctgcactgcttggggggacagcagatggagcttgctgctgttatcaatggccgaattcgtcgtatgtctcgtggggtgaatccctccttggtgagctggctgaccactatgatgggactgaggcttcaggtggtactggagcacatgcctgtaggccctgatgccattctcagatacgttcgcagggttggtgatcccccccagccacttcctgaggagccaatggaagttcagggagcagaaagagcttcccctgagcctcagcgggagaatgcttccccagcccctggaacaacagcagaagaggccatgtcccgaggtccacctcctgctcctgaggggggctcccgggatgaacaggatggagcttcagctgagacagaaccttgggcagctgcagtccccccagaatgggtccctattatccagcaggacattcagagccagcggaaggtgaaaccgcagccccctctgagtgatgcctacctcagtggtatgcctgccaagagacgcaagacgatgcagggtgagggcccccagctgcttctctcagaggctgtgagccgggcagctaaggcagccggagctcggcccctgacgagccccgagagcctgagccgggacctggaggcaccagaggttcaggagagctacaggcagcagctccggtctgatatacaaaaacgactgcaggaagaccccaactacagtccccagcgcttccccaatgcccagcgggcctttgctgatgatccttagctctttgctctatggcccttcctcatcaggggaccgtttcccccctcttccttcacagtatttaagaaataaaagtcggatttttctggctgctttctctct

SEQ ID NO: 111036 - DNA, 3644 bp, Homo sapiens
  Payload ID: 1783
  Gene Symbol: BAG6
  Gene Name: BCL2-associated athanogene 6
  Uniprot ID: P46379
  ENST ID: ENST00000375976
  CDS Start-End: 161-3541
ggggaagtcgggggcggagccgcggggtggtgggtgtgtgtgtgtgtgtgtgtgtgtgtgtgtgtgtgtgtgtttggctgtgggttagttgtgccgttctgctggaacaccgtgggaaggcagtagacgcgggcagtcagctagcagagacctgtcggccatggagcctaatgatagtaccagtaccgctgtggaggagcctgacagcttggaggtgttggtgaagaccttggactctcaaactcgtacctttattgtgggggcccagatgaatgtaaaagagtttaaggagcacattgctgcctctgtcagcatcccatctgaaaaacaacggctcatttaccagggacgagttctgcaagatgataagaagcttcaggaatacaatgttgggggaaaggttatccacctggtggaacgggctcctcctcagactcacctcccttctggggcatcttctgggacggggtctgcctcagccactcatggtgggggatccccccctggtactcgggggcctggggcctctgttcatgaccggaatgccaacagctatgtcatggttggaaccttcaatcttcctagtgacggctctgctgtggatgttcacatcaacatggaacaggccccgattcagagtgagccccgggtacggctggtgatggctcagcacatgatcagggatatacagaccttactatcccggatggagtgtcgaggagggccccaaccgcagcacagtcagccgcccccgcagccaccggctgtgaccccggagccagtagccttgagctctcaaacatcagaaccagttgaaagtgaagcacctccccgggagcccatggaggcagaagaagtggaggagcgtgccccagcccagaacccggagctcactcctggcccagccccagcgggcccaacacctgccccggaaacaaatgcacccaaccatccttcccctgcggagtatgtcgaggtgctccaggagctacagcggctggagagtcgcctccagcccttcttgcagcgctactacgaggttctgggtgctgctgccaccacggactacaataacaatcacgagggccgggaggaggatcagcggttgatcaacttggtaggggagagcctgcgactgctgggcaacacctttgttgcactgtctgacctgcgctgcaatctggcctgcacgcccccacgacacctgcatgtggtccggcctatgtctcactacaccacccccatggtgctccagcaggcagccattcccatacagatcaatgtgggaaccactgtgaccatgacaggaaatgggactcggccccccccaactcccaatgcagaggcacctccccctggtcctgggcaggcctcatccgtggctccgtcttctaccaatgtcgagtcctcagctgagggggctcccccgccaggtccagctcccccgccagccaccagccacccgagggtcatccggatttcccaccagagtgtggaacccgtggtcatgatgcacatgaacattcaagattctggcacacagcctggtggtgttccgagtgctcccactggccccctgggaccccctggtcatggccaaaccctgggacagcaggtgccaggcttcccaacagctccaacccgggtggtgattgcccggcccactcctccacaggctcggccttcccatcctggagggcccccagtctctgggacactgcagggcgccggtctgggtaccaatgcctcgttggcccagatggtgagcggccttgtggggcagcttcttatgcagccagtccttgtggctcaggggaccccaggtatggctccaccgccagcccctgccactgcttctgccagtgctggcaccaccaacacagctaccacagctggccccgctcctggggggcctgcccagcctccacccacccctcaaccctccatggctgatcttcagttctctcagcttctggggaacctgctagggcctgcagggccaggggctggagggtctggtgtggcttctcccaccatcactgtggcgatgcctggtgtccctgcctttctccaaggcatgactgacttcttgcaggcaacacagacagcccctccaccacccccacctcctccacccccaccacctgccccagagcagcagaccatgcccccaccaggctccccttctggtggcgcagggagtcctggaggcctgggtcttgagagcctgtcaccggagttttttacctcagtggtgcagggtgtgctcagctccctgctgggctccctgggggctcgggctggcagcagtgaaagtattgctgccttcatacaacgcctcagtggatccagcaacatctttgagcctggagctgatggggcccttggattctttggggccttgctttctcttctgtgccagaacttctctatggtggacgtagtgatgcttctccatgggcatttccagccactacaacggctccagccccagctgcgatccttcttccaccagcactacctgggtggtcaggagcccacacccagtaacatccggatggcaacccacacattgatcacggggctagaagagtatgtgcgggagagtttttccttggtgcaggttcagccaggtgtggacatcatccggacaaacctggaatttctccaagagcagtttaatagcattgctgcgcatgtgctgcattgcacagatagtggatttggggcccggttgctggagttgtgtaaccaaggcctgtttgaatgcctggccctaaacctgcactgcttggggggacagcagatggagcttgctgctgttatcaatggccgaattcgtcgtatgtctcgtggggtgaatccctccttggtgagctggctgaccactatgatgggactgaggcttcaggtggtactggagcacatgcctgtaggccctgatgccattctcagatacgttcgcagggttggtgatcccccccagccacttcctgaggagccaatggaagttcagggagcagaaagagcttcccctgagcctcagcgggagaatgcttccccagcccctggaacaacagcagaagaggccatgtcccgaggtccacctcctgctcctgaggggggctcccgggatgaacaggatggagcttcagctgagacagaaccttgggcagctgcagtccccccagaatgggtccctattatccagcaggacattcagagccagcggaaggtgaaaccgcagccccctctgagtgatgcctacctcagtggtatgcctgccaagagacgcaagacgatgcagggtgagggcccccagctgcttctctcagaggctgtgagccgggcagctaaggcagccggagctcggcccctgacgagccccgagagcctgagccgggacctggaggcaccagaggttcaggagagctacaggcagcagctccggtctgatatacaaaaacgactgcaggaagaccccaactacagtccccagcgcttccccaatgcccagcgggcctttgctgatgatccttagctctttgctctatggcccttcctcatcaggggaccgtttcccccctcttccttcacagtatttaagaaataaaagtcggatttttctggctgctttctctcta

SEQ ID NO: 111037 - DNA, 3656 bp, Homo sapiens
  Payload ID: 1783
  Gene Symbol: BAG6
  Gene Name: BCL2-associated athanogene 6
  Uniprot ID: P46379
  ENST ID: ENST00000383446
  CDS Start-End: 169-3549
ggggaagtcgggggcggagccgcggggtggtgggtgggtgggtgtgtgtgtgtgtgtgtgtgtgtgtgtgtgtgtgtgtgtttggctgtgggttagttgtgccgttctgctggaacaccgtgggaaggcagtagacgcgggcagtcagctagcagagacctgtcggccatggagcctaatgatagtaccagtaccgctgtggaggagcctgacagcttggaggtgttggtgaagaccttggactctcaaactcgtacctttattgtgggggcccagatgaatgtaaaagagtttaaggagcacattgctgcctctgtcagcatcccatctgaaaaacaacggctcatttaccagggacgagttctgcaagatgataagaagcttcaggaatacaatgttgggggaaaggttatccacctggtggaacgggctcctcctcagactcacctcccttctggggcatcttctgggacggggtctgcctcagccactcatggtgggggatccccccctggtactcgggggcctggggcctctgttcatgaccggaatgccaacagctatgtcatggttggaaccttcaatcttcctagtgacggctctgctgtggatgttcacatcaacatggaacaggccccgattcagagtgagccccgggtacggctggtgatggctcagcacatgatcagggatatacagaccttactatcccggatggagtgtcgaggagggccccaaccgcagcacagtcagccgcccccgcagccaccggctgtgaccccggagccagtagccttgagctctcaaacatcagaaccagttgaaagtgaagcacctccccgggagcccatggaggcagaagaagtggaggagcgtgccccagcccagaacccggagctcactcctggcccagccccagcgggcccaacacctgccccggaaacaaatgcacccaaccatccttcccctgcggagtatgtcgaggtgctccaggagctacagcggctggagagtcgcctccagcccttcttgcagcgctactacgaggttctgggtgctgctgccaccacggactacaataacaatcacgagggccgggaggaggatcagcggttgatcaacttggtaggggagagcctgcgactgctgggcaacacctttgttgcactgtctgacctgcgctgcaatctggcctgcacgcccccacgacacctgcatgtggtccggcctatgtctcactacaccacccccatggtgctccagcaggcagccattcccatacagatcaatgtgggaaccactgtgaccatgacaggaaatgggactcggccccccccaactcccaatgcagaggcacctccccctggtcctgggcaggcctcatccgtggctccgtcttctaccaatgtcgagtcctcagctgagggggctcccccgccaggtccagctcccccgccagccaccagccacccgagggtcatccggatttcccaccagagtgtggaacccgtggtcatgatgcacatgaacattcaagattctggcacacagcctggtggtgttccgagtgctcccactggccccctgggaccccctggtcatggccaaaccctgggacagcaggtgccaggcttcccaacagctccaacccgggtggtgattgcccggcccactcctccacaggctcggccttcccatcctggagggcccccagtctctgggacactgcagggcgccggtctgggtaccaatgcctcgttggcccagatggtgagcggccttgtggggcagcttcttatgcagccagtccttgtggctcaggggaccccaggtatggctccaccgccagcccctgccactgcttctgccagtgctggcaccaccaacacagctaccacagctggccccgctcctggggggcctgcccagcctccacccacccctcaaccctccatggctgatcttcagttctctcagcttctggggaacctgctagggcctgcagggccaggggctggagggtctggtgtggcttctcccaccatcactgtggcgatgcctggtgtccctgcctttctccaaggcatgactgacttcttgcaggcaacacagacagcccctccaccacccccacctcctccacccccaccacctgccccagagcagcagaccatgcccccaccaggctccccttctggtggcgcagggagtcctggaggcctgggtcttgagagcctgtcaccggagttttttacctcagtggtgcagggtgtgctcagctccctgctgggctccctgggggctcgggctggcagcagtgaaagtattgctgccttcatacaacgcctcagtggatccagcaacatctttgagcctggagctgatggggcccttggattctttggggccttgctttctcttctgtgccagaacttctctatggtggacgtagtgatgcttctccatgggcatttccagccactacaacggctccagccccagctgcgatccttcttccaccagcactacctgggtggtcaggagcccacacccagtaacatccggatggcaacccacacattgatcacggggctagaagagtatgtgcgggagagtttttccttggtgcaggttcagccaggtgtggacatcatccggacaaacctggaatttctccaagagcagtttaatagcattgctgcgcatgtgctgcattgcacagatagtggatttggggcccggttgctggagttgtgtaaccaaggcctgtttgaatgcctggccctaaacctgcactgcttggggggacagcagatggagcttgctgctgttatcaatggccgaattcgtcgtatgtctcgtggggtgaatccctccttggtgagctggctgaccactatgatgggactgaggcttcaggtggtactggagcacatgcctgtaggccctgatgccattctcagatacgttcgcagggttggtgatcccccccagccacttcctgaggagccaatggaagttcagggagcagaaagagcttcccctgagcctcagcgggagaatgcttccccagcccctggaacaacagcagaagaggccatgtcccgaggtccacctcctgctcctgaggggggctcccgggatgaacaggatggagcttcagctgagacagaaccttgggcagctgcagtccccccagaatgggtccctattatccagcaggacattcagagccagcggaaggtgaaaccgcagccccctctgagtgatgcctacctcagtggtatgcctgccaagagacgcaagacgatgcagggtgagggcccccagctgcttctctcagaggctgtgagccgggcagctaaggcagccggagctcggcccctgacgagccccgagagcctgagccgggacctggaggcaccagaggttcaggagagctacaggcagcagctccggtctgatatacaaaaacgactgcaggaagaccccaactacagtccccagcgcttccccaatgcccagcgggcctttgctgatgatccttagctctttctttgctctatggcccttcctcatcaggggaccgtttcccccctcttccttcacagtatttaagaaataaaagtcggatttttctggctgctttctctcta

SEQ ID NO: 111038 - DNA, 3783 bp, Homo sapiens
  Payload ID: 1783
  Gene Symbol: BAG6
  Gene Name: BCL2-associated athanogene 6
  Uniprot ID: P46379
  ENST ID: ENST00000383448
  CDS Start-End: 296-3676
gggggtggggcgatgcttaagtgtccacgcatccgtagtgcgacgcacgcaggcgtagtacggtcccccgggcgacagcggtggcggctcctcggggtgctcggctccctcccacctaggccggccccggcccgactcgccctcagaaactcactgtttggggctgcggactttctcgtcgtgccccacaaaagtaaagcttggggacctggggggagccggaagtatcgcttcgagatccccaaatactatcggggaaacggaagtggccgtcggtggcagagacctgtcggccatggagcctaatgatagtaccagtaccgctgtggaggagcctgacagcttggaggtgttggtgaagaccttggactctcaaactcgtacctttattgtgggggcccagatgaatgtaaaagagtttaaggagcacattgctgcctctgtcagcatcccatctgaaaaacaacggctcatttaccagggacgagttctgcaagatgataagaagcttcaggaatacaatgttgggggaaaggttatccacctggtggaacgggctcctcctcagactcacctcccttctggggcatcttctgggacggggtctgcctcagccactcatggtgggggatccccccctggtactcgggggcctggggcctctgttcatgaccggaatgccaacagctatgtcatggttggaaccttcaatcttcctagtgacggctctgctgtggatgttcacatcaacatggaacaggccccgattcagagtgagccccgggtacggctggtgatggctcagcacatgatcagggatatacagaccttactatcccggatggagtgtcgaggagggccccaaccgcagcacagtcagccgcccccgcagccaccggctgtgaccccggagccagtagccttgagctctcaaacatcagaaccagttgaaagtgaagcacctccccgggagcccatggaggcagaagaagtggaggagcgtgccccagcccagaacccggagctcactcctggcccagccccagcgggcccaacacctgccccggaaacaaatgcacccaaccatccttcccctgcggagtatgtcgaggtgctccaggagctacagcggctggagagtcgcctccagcccttcttgcagcgctactacgaggttctgggtgctgctgccaccacggactacaataacaatcacgagggccgggaggaggatcagcggttgatcaacttggtaggggagagcctgcgactgctgggcaacacctttgttgcactgtctgacctgcgctgcaatctggcctgcacgcccccacgacacctgcatgtggtccggcctatgtctcactacaccacccccatggtgctccagcaggcagccattcccatacagatcaatgtgggaaccactgtgaccatgacaggaaatgggactcggccccccccaactcccaatgcagaggcacctccccctggtcctgggcaggcctcatccgtggctccgtcttctaccaatgtcgagtcctcagctgagggggctcccccgccaggtccagctcccccgccagccaccagccacccgagggtcatccggatttcccaccagagtgtggaacccgtggtcatgatgcacatgaacattcaagattctggcacacagcctggtggtgttccgagtgctcccactggccccctgggaccccctggtcatggccaaaccctgggacagcaggtgccaggcttcccaacagctccaacccgggtggtgattgcccggcccactcctccacaggctcggccttcccatcctggagggcccccagtctctgggacactgcagggcgccggtctgggtaccaatgcctcgttggcccagatggtgagcggccttgtggggcagcttcttatgcagccagtccttgtggctcaggggaccccaggtatggctccaccgccagcccctgccactgcttctgccagtgctggcaccaccaacacagctaccacagctggccccgctcctggggggcctgcccagcctccacccacccctcaaccctccatggctgatcttcagttctctcagcttctggggaacctgctagggcctgcagggccaggggctggagggtctggtgtggcttctcccaccatcactgtggcgatgcctggtgtccctgcctttctccaaggcatgactgacttcttgcaggcaacacagacagcccctccaccacccccacctcctccacccccaccacctgccccagagcagcagaccatgcccccaccaggctccccttctggtggcgcagggagtcctggaggcctgggtcttgagagcctgtcaccggagttttttacctcagtggtgcagggtgtgctcagctccctgctgggctccctgggggctcgggctggcagcagtgaaagtattgctgccttcatacaacgcctcagtggatccagcaacatctttgagcctggagctgatggggcccttggattctttggggccttgctttctcttctgtgccagaacttctctatggtggacgtagtgatgcttctccatgggcatttccagccactacaacggctccagccccagctgcgatccttcttccaccagcactacctgggtggtcaggagcccacacccagtaacatccggatggcaacccacacattgatcacggggctagaagagtatgtgcgggagagtttttccttggtgcaggttcagccaggtgtggacatcatccggacaaacctggaatttctccaagagcagtttaatagcattgctgcgcatgtgctgcattgcacagatagtggatttggggcccggttgctggagttgtgtaaccaaggcctgtttgaatgcctggccctaaacctgcactgcttggggggacagcagatggagcttgctgctgttatcaatggccgaattcgtcgtatgtctcgtggggtgaatccctccttggtgagctggctgaccactatgatgggactgaggcttcaggtggtactggagcacatgcctgtaggccctgatgccattctcagatacgttcgcagggttggtgatcccccccagccacttcctgaggagccaatggaagttcagggagcagaaagagcttcccctgagcctcagcgggagaatgcttccccagcccctggaacaacagcagaagaggccatgtcccgaggtccacctcctgctcctgaggggggctcccgggatgaacaggatggagcttcagctgagacagaaccttgggcagctgcagtccccccagaatgggtccctattatccagcaggacattcagagccagcggaaggtgaaaccgcagccccctctgagtgatgcctacctcagtggtatgcctgccaagagacgcaagacgatgcagggtgagggcccccagctgcttctctcagaggctgtgagccgggcagctaaggcagccggagctcggcccctgacgagccccgagagcctgagccgggacctggaggcaccagaggttcaggagagctacaggcagcagctccggtctgatatacaaaaacgactgcaggaagaccccaactacagtccccagcgcttccccaatgcccagcgggcctttgctgatgatccttagctctttctttgctctatggcccttcctcatcaggggaccgtttcccccctcttccttcacagtatttaagaaataaaagtcggatttttctggctgctttctctcta

SEQ ID NO: 111039 - DNA, 902 bp, Homo sapiens
  Payload ID: 1783
  Gene Symbol: BAG6
  Gene Name: BCL2-associated athanogene 6
  ENST ID: ENST00000425373
  CDS Start-End: 124-902
tccctaagccgtcgatctcctgccctttgtgtttctctccctgtgccccggaatcagaagggggatggggacaggtgtgaatgtgtgtgtgtgcaggagaaactttttagagacctgtcggccatggagcctaatgatagtaccagtaccgctgtggaggagcctgacagcttggaggtgttggtgaagaccttggactctcaaactcgtacctttattgtgggggcccagatgaatgtaaaagagtttaaggagcacattgctgcctctgtcagcatcccatctgaaaaacaacggctcatttaccagggacgagttctgcaagatgataagaagcttcaggaatacaatgttgggggaaaggttatccacctggtggaacgggctcctcctcagactcacctcccttctggggcatcttctgggacggggtctgcctcagccactcatggtgggggatccccccctggtactcgggggcctggggcctctgttcatgaccggaatgccaacagctatgtcatggttggaaccttcaatcttcctagtgacggctctgctgtggatgttcacatcaacatggaacaggccccgattcagagtgagccccgggtacggctggtgatggctcagcacatgatcagggatatacagaccttactatcccggatggagtgtcgaggagggccccaaccgcagcacagtcagccgcccccgcagccaccggctgtgaccccggagccagtagccttgagctctcaaacatcagaaccagttgaaagtgaagcacctccccgggagcccatggaggcagaagaagtggaggagcgtgccccagcccagaacccggagctcactcctggcccagccccagcgggcccaacacctgccccggaaacaaa

SEQ ID NO: 111040 - DNA, 902 bp, Homo sapiens; identical to SEQ ID NO: 111039
  Payload ID: 1783
  Gene Symbol: BAG6
  Gene Name: BCL2-associated athanogene 6
  ENST ID: ENST00000446325
  CDS Start-End: 124-902

SEQ ID NO: 111041 - DNA, 902 bp, Homo sapiens; identical to SEQ ID NO: 111039
  Payload ID: 1783
  Gene Symbol: BAG6
  Gene Name: BCL2-associated athanogene 6
  ENST ID: ENST00000433828
  CDS Start-End: 124-902

SEQ ID NO: 111042 - DNA, 807 bp, Homo sapiens
  Payload ID: 1783
  Gene Symbol: BAG6
  Gene Name: BCL2-associated athanogene 6
  ENST ID: ENST00000424003
  CDS Start-End: 217-807
cagctccctaagccgtcgatctcctgccctttgtgtttctctccctgtgccccggaatcagaagggggatggggacaggtgtgaatgtgtgtgtgtgcaggagaaactttttaggtattggggcagggattaatgctagggagtctttcgggtacactctggtctgggcaacagcgggccctccttccttcgttcttctttagagacctgtcggccatggagcctaatgatagtaccagtaccgctgtggaggagcctgacagcttggaggtgttggtgaagaccttggactctcaaactcgtacctttattgtgggggcccagatgaatgtaaaagagtttaaggagcacattgctgcctctgtcagcatcccatctgaaaaacaacggctcatttaccagggacgagttctgcaagatgataagaagcttcaggaatacaatgttgggggaaaggttatccacctggtggaacgggctcctcctcagactcacctcccttctggggcatcttctgggacggggtctgcctcagccactcatggtgggggatccccccctggtactcgggggcctggggcctctgttcatgaccggaatgccaacagctatgtcatggttggaaccttcaatcttcctagtgacggctctgctgtggatgttcacatcaacatggaacaggccccgattcagagtgagccccgggtacggctggtgatggctcagcacatgatcagggatatacagaccttactatcccggatggagtgtcgaggagggccccaaccgcagcacagtcagccgccc

SEQ ID NO: 111043 - DNA, 714 bp, Homo sapiens
  Payload ID: 1783
  Gene Symbol: BAG6
  Gene Name: BCL2-associated athanogene 6
  ENST ID: ENST00000419635
  CDS Start-End: 1-714
tcctcagctgagggggctcccccgccaggtccagctcccccgccagccaccagccacccgagggtcatccggatttcccaccagagtgtggaacccgtggtcatgatgcacatgaacattcaagggccactgtctctgtctccctgcccagattctggcacacagcctggtggtgttccgagtgctcccactggccccctgggaccccctggtcatggccaaaccctgggacagcaggtgccaggcttcccaacagctccaacccgggtggtgattgcccggcccactcctccacaggctcggccttcccatcctggagggcccccagtctctgggacactgcagggcgccggtctgggtaccaatgcctcgttggcccagatggtgagcggccttgtggggcagcttcttatgcagccagtccttgtggctcaggggaccccaggtatggctccaccgccagcccctgccactgcttctgccagtgctggcaccaccaacacagctaccacagctggccccgctcctggggggcctgcccagcctccacccacccctcaaccctccatggctgatcttcagttctctcagcttctggggaacctgctagggcctgcagggccaggggctggagggcctggtgtggcttctcccaccatcactgtggcgatgcctggtgtccctgcctttctccaaggcatgactgacttcttg

SEQ ID NO: 111044 - DNA, 2407 bp, Homo sapiens
  Payload ID: 1783
  Gene Symbol: BAG6
  Gene Name: BCL2-associated athanogene 6
  ENST ID: ENST00000415170
  CDS Start-End: 180-2407
cgcatccgtagtgcgacgcacgcaggcgtagtacggtcccccgggcgacagcggtggcggctcctcggggtgctcggctccctcccacctaggccggccccggcccgactcgccctcagaaactcactgtttggggctgcggactttctcgtcgtgccccacaaaaagacctgtcggccatggagcctaatgatagtaccagtaccgctgtggaggagcctgacagcttggaggtgttggtgaagaccttggactctcaaactcgtacctttattgtgggggcccagatgaatgtaaaagagtttaaggagcacattgctgcctctgtcagcatcccatctgaaaaacaacggctcatttaccagggacgagttctgcaagatgataagaagcttcaggaatacaatgttgggggaaaggttatccacctggtggaacgggctcctcctcagactcacctcccttctggggcatcttctgggacggggtctgcctcagccactcatggtgggggatccccccctggtactcgggggcctggggcctctgttcatgaccggaatgccaacagctatgtcatggttggaaccttcaatcttcctagtgacggctctgctgtggatgttcacatcaacatggaacaggccccgattcagagtgagccccgggtacggctggtgatggctcagcacatgatcagggatatacagaccttactatcccggatggagtgtcgaggagggccccaaccgcagcacagtcagccgcccccgcagccaccggctgtgaccccggagccagtagccttgagctctcaaacatcagaaccagttgaaagtgaagcacctccccgggagcccatggaggcagaagaagtggaggagcgtgccccagcccagaacccggagctcactcctggcccagccccagcgggcccaacacctgccccggaaacaaatgcacccaaccatccttcccctgcggagtatgtcgaggtgctccaggagctacagcggctggagagtcgcctccagcccttcttgcagcgctactacgaggttctgggtgctgctgccaccacggactacaataacaatcacgagggccgggaggaggatcagcggttgatcaacttggtaggggagagcctgcgactgctgggcaacacctttgttgcactgtctgacctgcgctgcaatctggcctgcacgcccccacgacacctgcatgtggtccggcctatgtctcactacaccacccccatggtgctccagcaggcagccattcccatacagatcaatgtgggaaccactgtgaccatgacaggaaatgggactcggccccccccaactcccaatgcagaggcacctccccctggtcctgggcaggcctcatccgtggctccgtcttctaccaatgtcgagtcctcagctgagggggctcccccgccaggtccagctcccccgccagccaccagccacccgagggtcatccggatttcccaccagagtgtggaacccgtggtcatgatgcacatgaacattcaagattctggcacacagcctggtggtgttccgagtgctcccactggccccctgggaccccctggtcatggccaaaccctgggctccaccctcatccagctgccctccctgccccctgagttcatgcacgccgtcgcccaccagatcactcatcaggccatggtggcagctgttgcctccgcggccgcaggacagcaggtgccaggcttcccaacagctccaacccgggtggtgattgcccggcccactcctccacaggctcggccttcccatcctggagggcccccagtctctgggacactgcagggcgccggtctgggtaccaatgcctcgttggcccagatggtgagcggccttgtggggcagcttcttatgcagccagtccttgtggctcaggggaccccaggtatggctccaccgccagcccctgccactgcttctgccagtgctggcaccaccaacacagctaccacagctggccccgctcctggggggcctgcccagcctccacccacccctcaaccctccatggctgatcttcagttctctcagcttctggggaacctgctagggcctgcagggccaggggctggagggcctggtgtggcttctcccaccatcactgtggcgatgcctggtgtccctgcctttctccaaggcatgactgacttcttgcaggcaacacagacagcccctccaccacccccacctcctccacccccaccacctgccccagagcagcagaccatgcccccaccaggctccccttctggtggcgcagggagtcctggaggcctgggtcttgagagcctgtcaccggagttttttacctcagtggtgcagggtgtgctcagctccctgct

SEQ ID NO: 111045 - DNA, 3783 bp, Homo sapiens; identical to SEQ ID NO: 111038
  Payload ID: 1783
  Gene Symbol: BAG6
  Gene Name: BCL2-associated athanogene 6
  Uniprot ID: P46379
  ENST ID: ENST00000419847
  CDS Start-End: 296-3676

SEQ ID NO: 111046 - DNA, 1056 bp, Homo sapiens
  Payload ID: 1783
  Gene Symbol: BAG6
  Gene Name: BCL2-associated athanogene 6
  ENST ID: ENST00000441994
  CDS Start-End: 282-1056
tgcgacgcacgcaggcgtagtacggtcccccgggcgacagcggtggcggctcctcggggtgctcggctccctcccacctaggccggccccggcccgactcgccctcagaaactcactgtttggggctgcggactttctcgtcgtgccccacaaaagtaaagcttggggacctggggggagccggaagtatcgcttcgagatccccaaatactatcggggaaacggaagtggccgtcggtggcaggtttgggggagaccggaagtgacgagacctgtcggccatggagcctaatgatagtaccagtaccgctgtggaggagcctgacagcttggaggtgttggtgaagaccttggactctcaaactcgtacctttattgtgggggcccagatgaatgtaaaagagtttaaggagcacattgctgcctctgtcagcatcccatctgaaaaacaacggctcatttaccagggacgagttctgcaagatgataagaagcttcaggaatacaatgttgggggaaaggttatccacctggtggaacgggctcctcctcagactcacctcccttctggggcatcttctgggacggggtctgcctcagccactcatggtgggggatccccccctggtactcgggggcctggggcctctgttcatgaccggaatgccaacagctatgtcatggttggaaccttcaatcttcctagtgacggctctgctgtggatgttcacatcaacatggaacaggccccgattcagagtgagccccgggtacggctggtgatggctcagcacatgatcagggatatacagaccttactatcccggatggagtgtcgaggagggccccaaccgcagcacagtcagccgcccccgcagccaccggctgtgaccccggagccagtagccttgagctctcaaacatcagaaccagttgaaagtgaagcacctccccgggagcccatggaggcagaagaagtggaggagcgtgccccagcccagaacccggagctcactcctggcccagccccagcgggcccaacacctgccccggaaa

SEQ ID NO: 111047 - DNA, 654 bp, Homo sapiens
  Payload ID: 1783
  Gene Symbol: BAG6
  Gene Name: BCL2-associated athanogene 6
  ENST ID: ENST00000431989
  CDS Start-End: 36-654
cggaagtggccgtcggtggcagagacctgtcggccatggagcctaatgatagtaccagtaccgctgtggaggagcctgacagcttggaggtgttggtgaagaccttggactctcaaactcgtacctttattgtgggggcccagatgaatgtaaaagagtttaaggagcacattgctgcctctgtcagcatcccatctgaaaaacaacggctcatttaccagggacgagttctgcaagatgataagaagcttcaggaatacaatgttgggggaaaggttatccacctggtggaacgggctcctcctcagactcacctcccttctggggcatcttctgggacggggtctgcctcagccactcatggtgggggatccccccctggtactcgggggcctggggcctctgttcatgaccggaatgccaacagctatgtcatggttggaaccttcaatcttcctagtgagccccgggtacggctggtgatggctcagcacatgatcagggatatacagaccttactatcccggatggagtgtcgaggagggccccaaccgcagcacagtcagccgcccccgcagccaccggctgtgaccccggagccagtagccttgagctctcaaacatcagaaccagttgaaagtgaagcacctcccc

SEQ ID NO: 111048 - DNA, 544 bp, Homo sapiens
  Payload ID: 1783
  Gene Symbol: BAG6
  Gene Name: BCL2-associated athanogene 6
  ENST ID: ENST00000442112
  CDS Start-End: 69-544
tttccgacctctggggcgcttgtcctgccgtgaccggtgatgacactagtctctgagacctgtcggccatggagcctaatgatagtaccagtaccgctgtggaggagcctgacagcttggaggtgttggtgaagaccttggactctcaaactcgtacctttattgtgggggcccagatgaatgtaaaagagtttaaggagcacattgctgcctctgtcagcatcccatctgaaaaacaacggctcatttaccagggacgagttctgcaagatgataagaagcttcaggaatacaatgttgggggaaaggttatccacctggtggaacgggctcctcctcagactcacctcccttctggggcatcttctgggacggggtctgcctcagccactcatggtgggggatccccccctggtactcgggggcctggggcctctgttcatgaccggaatgccaacagctatgtcatggttggaaccttcaatcttcctagtgacggctctgctgtggatgttcacatcaacatggaacaggccccgattca
